United States Patent Application Publication US 2011/0183924 A1 - sequence listing, part 143

SEQ ID NO: 375228 - DNA, 4398 bp, Homo sapiens
cgcgtcgtgaggcgcgcgcccgcccgccgcctgccgcggatcgcgtggtctgcttggctcgccgcgcctctcccccgtccgtccatattgctgcagcccccgagccgggaagcccgggccgccccgggggcgggggggagggagggacgggactagaagcctgccgggctcggggtgggggcgtcttgcgaggaacgggcggggggggacgcacgcctaggaggcctggactgcagagtggggggccttcctccccccccgccccgctagtgggcctcggatttacggcggctgcatctaactgggagggggccgcacctcgcgtgaaccccgacccttctctgcagggactggggcccagcgccccggaggaaggcgtcgcgggcgctctgctagccaagttcgaggcgggggaggcagcctcgggcgcgcccggcttctccgggggggcgggcgcgcagatggccactcaggtggagccgctgctgcctgggggcgccacgctcttgcaggccgaagagcacggggggctggtgaggaagaagccgccgccggcgcccgagggcaagggcgagcccgggccaaacgacgtccgcgggggggagccggacggcagcgctcggagaccccggccgccctgcgccaagccgcacaaggagggcaccgggcagcaggagcgcgagagcccgcggccgctgcagctgcccggcgccgaaggcccggccatcagcgacggggaggagggcggcggcgagccaggcgctggcggaggagctgccggagccgcgggcgcggggcgccgggacttcgtggaagcccccccgcccaaggtgaacccgtggactaagaacgcattgccgccggtcctgaccaccgtgaacggacagtcccccccagaacactctgctccagccaaggtggtgagggcagctgttcctaaacagcgcaaaggcagcaaggttggtgactttggagatgcaatcaattggcccacacctggagagatagcccacaagagtgttcagccacagtcccacaagcctcagcctacccgtaaactgccacccaagaaggacatgaaggaacaggagaaaggagaagggagtgatagtaaggagagtccaaaaaccaaatcagatgaatcaggggaggaaaagaatggagatgaggattgccagcgaggcgggcagaagaagaaaggaaacaaacacaagtgggttccattacaaatagacatgaagcctgaagtgcccagagagaaactggcttcacgccccactcgcccaccggagcctagacacatacctgccaatcgcggagagatcaaagggtctgagtctgccacctacgtgcccgtggccccccccaccccagcctggcaaccacgaaagtttgatggtgtggaggggcctcgtacgcccaagtacatgaacaacatcacctactactttgacaatgtcagcagcaccgagctttacagtgtggatcaggaactgctcaaagactacatcaagcgccagattgaatactacttcagcgtggacaatttagagcgagacttcttcctgcgaaggaaaatggatgctgatggtttcctacccatcacccttattgcttccttccaccgagtgcaggcccttaccactgacatttcactcatctttgcggccctaaaggacagcaaggtggtggagatcgttgatgagaaagttcgtaggagggaggaaccagaaaagtggcctcttcccccaatagtggattattcacagactgatttctcccagcttctcaactgccctgaatttgttccccgtcagcactaccaaaaggagacagagtcggcacctggctctcctcgtgcagtcaccccagtgccaaccaaaacagaggaggtcagcaacctaaagacactacccaagggcctgtctgccagcctgcctgacctggattctgagaactggattgaagtgaagaagaggcctcggccatccccagcacggcccaagaagtcagaggagtccagattttcccacctgacctctctgcctcagcagctgccttcccagcagctgatgtccaaggatcaggatgagcaagaggaactggattttctgtttgacgaggagatggagcagatggatgggcggaagaacaccttcactgcctggtctgatgaggaatctgactatgagattgatgacagggatgtcaacaagatcctcattgtcacccagacaccacattacatgcgccggcacccagggggggaccgcacaggcaaccacacctcgcgtgccaagatgagcgccgaactggccaaggtcattaatgatggcctcttctactatgagcaggacctgtgggctgaaaagtttgaacctgagtattcccagatcaagcaagaagtcgagaacttcaaaaaggtcaatatgatcagccgggagcagtttgacacactgacccctgagccccctgtggatcccaaccaggaagttcctcctgggccacctcggttccagcaagttcctacggatgccctggccaacaagttgtttggtgctcctgagccctccaccatcgcccgctctctaccaaccactgtcccagagtcaccaaactaccgcaacaccaggacccctcgcactccccggacaccacagctcaaagactcaagccagacatcacggttttacccagtggtgaaagaaggacggacactggatgccaagatgcctcgaaaaagaaagacaagacacagttcaaacccacccttggagagccatgtgggctgggtgatggattcccgtgagcacaggccccgtactgcttccatcagctccagcccctcagaagggacgcctacagttggcagctatggctgtacccctcagtcattgcccaagttccagcatccttcccatgaactgctcaaggaaaatggcttcacacaacacgtctaccataagtatcgtaggcgctgccttaatgagcggaaacgcttgggcattggccagtctcaggagatgaacacactcttccgcttctggtccttcttcctccgagatcacttcaacaaaaagatgtatgaggagttcaagcagctggctctggaggacgccaaagaaggctacagatatggtttggagtgcctttttcgatactacagttatggcctggaaaagaagttccggctggacatattcaaggattttcaggaggaaacggtgaaggactatgaagctggccaactgtatgggctggagaagttctgggccttcttgaaatattccaaagccaaaaatttggacattgaccccaaactgcaagaatacctcggcaaattccgacgtcttgaagacttccgagtagatccccccatgggtgaggagggcaaccacaagcgacactcagtggtagcaggaggtggcggcggtgagggcaggaagcggtgcccctcccagtcttccagcaggcctgctgccatgatcagccaaccccctacaccacccaccggccagcctgtccgggaagatgccaaatggacaagccagcactcgaacacacagactttgggaaagtgaaaagctccttagccctggggcttgaggggggaaaggggtagggtgggtaagagtccatgggggtgcccagtcccaggagaggggacaatgaagggacaggcctggagttactaggacaggcctttgtgctgagtagcaatgtatacaccatttgggctatcagaggtacccctgggcaggagcctctacatccccttccccctcctctctccatgactcttgacatcctagcttcttctaaggggggagggaaaggggggagatttttatatatatatacatatatatatatcaagttttaaattattgatagttcatctggattaccaaaatcactctgcagccctgcccgaggctagtaggctgcaaccctggtccccacccctaacctcctgctccccctcaagccaactatgcagcccacaagaaggccctgcgggcccccccattgcccagcactgtctcatagaaggctctggtggtacctctgggccccaggagcatcagccccttgatcatctggggtttgtcatcaccatattttctccctgctgttcccaccatgcccttctgccatcttctgggagaaggaaaccaaaggatctaaaactggggtttgggggaaggtttcagcctctccccactccccttgccccacaccctttactccccagcccagagagacgctgcttttaccaggaaagactattgaaagatgttttattttatttttctctgacctttccatccttgaaaaaatggggaaaaaagaagaaaaaagacaaaatcgaccataaaagaccaaaaaaaaaaaaaa

SEQ ID NO: 375229 - DNA, 4491 bp, Homo sapiens
cgcgtcgtgaggcgcgcgcccgcccgccgcctgccgcggatcgcgtggtctgcttggctcgccgcgcctctcccccgtccgtccatattgctgcagcccccgagccgggaagcccgggccgccccgggggcgggggggagggagggacgggactagaagcctgccgggctcggggtgggggcgtcttgcgaggaacgggcggggggggacgcacgcctaggaggcctggactgcagagtggggggccttcctccccccccgccccgctagtgggcctcggatttacggcggctgcatctaactgggagggggccgcacctcgcgtgaaccccgacccttctctgcagggactggggcccagcgccccggaggaaggcgtcgcgggcgctctgctagccaagttcgaggcgggggaggcagcctcgggcgcgcccggcttctccgggggggcgggcgcgcagatggccactcaggtggagccgctgctgcctgggggcgccacgctcttgcaggccgaagagcacggggggctggtgaggaagaagccgccgccggcgcccgagggcaagggcgagcccgggccaaacgacgtccgcgggggggagccggacggcagcgctcggagaccccggccgccctgcgccaagccgcacaaggagggcaccgggcagcaggagcgcgagagcccgcggccgctgcagctgcccggcgccgaaggcccggccatcagcgacggggaggagggcggcggcgagccaggcgctggcggaggagctgccggagccgcgggcgcggggcgccgggacttcgtggaagcccccccgcccaaggtgaacccgtggactaagaacgcattgccgccggtcctgaccaccgtgaacggacagtcccccccagaacactctgctccagccaaggtggtgagggcagctgttcctaaacagcgcaaaggcagcaaggttggtgactttggagatgcaatcaattggcccacacctggagagatagcccacaagagtgttcagccacagtcccacaagcctcagcctacccgtaaactgccacccaagaaggacatgaaggaacaggagaaaggagaagggagtgatagtaaggagagtccaaaaaccaaatcagatgaatcaggggaggaaaagaatggagatgaggattgccagcgaggcgggcagaagaagaaaggaaacaaacacaagtgggttccattacaaatagacatgaagcctgaagtgcccagagagaaactggcttcacgccccactcgcccaccggagcctagacacatacctgccaatcgcggagagatcaaagggtctgagtctgccacctacgtgcccgtggccccccccaccccagcctggcaaccagagatcaaaccggagcctgcctggcacgaccaggatgagacatcgagtgtgaagagtgatggggctgcccattttgactaccagtttggctaccgaaagtttgatggtgtggaggggcctcgtacgcccaagtacatgaacaacatcacctactactttgacaatgtcagcagcaccgagctttacagtgtggatcaggaactgctcaaagactacatcaagcgccagattgaatactacttcagcgtggacaatttagagcgagacttcttcctgcgaaggaaaatggatgctgatggtttcctacccatcacccttattgcttccttccaccgagtgcaggcccttaccactgacatttcactcatctttgcggccctaaaggacagcaaggtggtggagatcgttgatgagaaagttcgtaggagggaggaaccagaaaagtggcctcttcccccaatagtggattattcacagactgatttctcccagcttctcaactgccctgaatttgttccccgtcagcactaccaaaaggagacagagtcggcacctggctctcctcgtgcagtcaccccagtgccaaccaaaacagaggaggtcagcaacctaaagacactacccaagggcctgtctgccagcctgcctgacctggattctgagaactggattgaagtgaagaagaggcctcggccatccccagcacggcccaagaagtcagaggagtccagattttcccacctgacctctctgcctcagcagctgccttcccagcagctgatgtccaaggatcaggatgagcaagaggaactggattttctgtttgacgaggagatggagcagatggatgggcggaagaacaccttcactgcctggtctgatgaggaatctgactatgagattgatgacagggatgtcaacaagatcctcattgtcacccagacaccacattacatgcgccggcacccagggggggaccgcacaggcaaccacacctcgcgtgccaagatgagcgccgaactggccaaggtcattaatgatggcctcttctactatgagcaggacctgtgggctgaaaagtttgaacctgagtattcccagatcaagcaagaagtcgagaacttcaaaaaggtcaatatgatcagccgggagcagtttgacacactgacccctgagccccctgtggatcccaaccaggaagttcctcctgggccacctcggttccagcaagttcctacggatgccctggccaacaagttgtttggtgctcctgagccctccaccatcgcccgctctctaccaaccactgtcccagagtcaccaaactaccgcaacaccaggacccctcgcactccccggacaccacagctcaaagactcaagccagacatcacggttttacccagtggtgaaagaaggacggacactggatgccaagatgcctcgaaaaagaaagacaagacacagttcaaacccacccttggagagccatgtgggctgggtgatggattcccgtgagcacaggccccgtactgcttccatcagctccagcccctcagaagggacgcctacagttggcagctatggctgtacccctcagtcattgcccaagttccagcatccttcccatgaactgctcaaggaaaatggcttcacacaacacgtctaccataagtatcgtaggcgctgccttaatgagcggaaacgcttgggcattggccagtctcaggagatgaacacactcttccgcttctggtccttcttcctccgagatcacttcaacaaaaagatgtatgaggagttcaagcagctggctctggaggacgccaaagaaggctacagatatggtttggagtgcctttttcgatactacagttatggcctggaaaagaagttccggctggacatattcaaggattttcaggaggaaacggtgaaggactatgaagctggccaactgtatgggctggagaagttctgggccttcttgaaatattccaaagccaaaaatttggacattgaccccaaactgcaagaatacctcggcaaattccgacgtcttgaagacttccgagtagatccccccatgggtgaggagggcaaccacaagcgacactcagtggtagcaggaggtggcggcggtgagggcaggaagcggtgcccctcccagtcttccagcaggcctgctgccatgatcagccaaccccctacaccacccaccggccagcctgtccgggaagatgccaaatggacaagccagcactcgaacacacagactttgggaaagtgaaaagctccttagccctggggcttgaggggggaaaggggtagggtgggtaagagtccatgggggtgcccagtcccaggagaggggacaatgaagggacaggcctggagttactaggacaggcctttgtgctgagtagcaatgtatacaccatttgggctatcagaggtacccctgggcaggagcctctacatccccttccccctcctctctccatgactcttgacatcctagcttcttctaaggggggagggaaaggggggagatttttatatatatatacatatatatatatcaagttttaaattattgatagttcatctggattaccaaaatcactctgcagccctgcccgaggctagtaggctgcaaccctggtccccacccctaacctcctgctccccctcaagccaactatgcagcccacaagaaggccctgcgggcccccccattgcccagcactgtctcatagaaggctctggtggtacctctgggccccaggagcatcagccccttgatcatctggggtttgtcatcaccatattttctccctgctgttcccaccatgcccttctgccatcttctgggagaaggaaaccaaaggatctaaaactggggtttgggggaaggtttcagcctctccccactccccttgccccacaccctttactccccagcccagagagacgctgcttttaccaggaaagactattgaaagatgttttattttatttttctctgacctttccatccttgaaaaaatggggaaaaaagaagaaaaaagacaaaatcgaccataaaagaccaaaaaaaaaaaaaa

SEQ ID NO: 375230 - DNA, 4637 bp, Homo sapiens
cgcgtcgtgaggcgcgcgcccgcccgccgcctgccgcggatcgcgtggtctgcttggctcgccgcgcctctcccccgtccgtccatattgctgcagcccccgagccgggaagcccgggccgccccgggggcgggggggagggagggacgggactagaagcctgccgggctcggggtgggggcgtcttgcgaggaacgggcggggggggacgcacgcctaggaggcctggactgcagagtggggggccttcctccccccccgccccgctagtgggcctcggatttacggcggctgcatctaactgggagggggccgcacctcgcgtgaaccccgacccttctctgcagggactggggcccagcgccccggaggaaggcgtcgcgggcgctctgctagccaagttcgaggcgggggaggcagcctcgggcgcgcccggcttctccgggggggcgggcgcgcagatggccactcaggtggagccgctgctgcctgggggcgccacgctcttgcaggccgaagagcacggggggctggtgaggaagaagccgccgccggcgcccgagggcaagggcgagcccgggccaaacgacgtccgcgggggggagccggacggcagcgctcggagaccccggccgccctgcgccaagccgcacaaggagggcaccgggcagcaggagcgcgagagcccgcggccgctgcagctgcccggcgccgaaggcccggccatcagcgacggggaggagggcggcggcgagccaggcgctggcggaggagctgccggagccgcgggcgcggggcgccgggacttcgtggaagcccccccgcccaaggtgaacccgtggactaagaacgcattgccgccggtcctgaccaccgtgaacggacagtcccccccagaacactctgctccagccaaggtggtgagggcagctgttcctaaacagcgcaaaggcagcaaggttggtgactttggagatgcaatcaattggcccacacctggagagatagcccacaagagtgttcagatgaagctgctgagacttgcagaggttaattactagcccttgatggccaagtggggattggaagtcagccacagtcccacaagcctcagcctacccgtaaactgccacccaagaaggacatgaaggaacaggagaaaggagaagggagtgatagtaaggagagtccaaaaaccaaatcagatgaatcaggggaggaaaagaatggagatgaggattgccagcgaggcgggcagaagaagaaaggaaacaaacacaagtgggttccattacaaatagacatgaagcctgaagtgcccagagagaaactggcttcacgccccactcgcccaccggagcctagacacatacctgccaatcgcggagagatcaaagggtctgagtctgccacctacgtgcccgtggccccccccaccccagcctggcaaccagagatcaaaccggagcctgcctggcacgaccaggatgagacatcgagtgtgaagagtgatggggctggtggggcgcgggcttccttccgtggccgtggacgggggcgtggtcgcggccggggacgcggccggggtggcactcgaacccattttgactaccagtttggctaccgaaagtttgatggtgtggaggggcctcgtacgcccaagtacatgaacaacatcacctactactttgacaatgtcagcagcaccgagctttacagtgtggatcaggaactgctcaaagactacatcaagcgccagattgaatactacttcagcgtggacaatttagagcgagacttcttcctgcgaaggaaaatggatgctgatggtttcctacccatcacccttattgcttccttccaccgagtgcaggcccttaccactgacatttcactcatctttgcggccctaaaggacagcaaggtggtggagatcgttgatgagaaagttcgtaggagggaggaaccagaaaagtggcctcttcccccaatagtggattattcacagactgatttctcccagcttctcaactgccctgaatttgttccccgtcagcactaccaaaaggagacagagtcggcacctggctctcctcgtgcagtcaccccagtgccaaccaaaacagaggaggtcagcaacctaaagacactacccaagggcctgtctgccagcctgcctgacctggattctgagaactggattgaagtgaagaagaggcctcggccatccccagcacggcccaagaagtcagaggagtccagattttcccacctgacctctctgcctcagcagctgccttcccagcagctgatgtccaaggatcaggatgagcaagaggaactggattttctgtttgacgaggagatggagcagatggatgggcggaagaacaccttcactgcctggtctgatgaggaatctgactatgagattgatgacagggatgtcaacaagatcctcattgtcacccagacaccacattacatgcgccggcacccagggggggaccgcacaggcaaccacacctcgcgtgccaagatgagcgccgaactggccaaggtcattaatgatggcctcttctactatgagcaggacctgtgggctgaaaagtttgaacctgagtattcccagatcaagcaagaagtcgagaacttcaaaaaggtcaatatgatcagccgggagcagtttgacacactgacccctgagccccctgtggatcccaaccaggaagttcctcctgggccacctcggttccagcaagttcctacggatgccctggccaacaagttgtttggtgctcctgagccctccaccatcgcccgctctctaccaaccactgtcccagagtcaccaaactaccgcaacaccaggacccctcgcactccccggacaccacagctcaaagactcaagccagacatcacggttttacccagtggtgaaagaaggacggacactggatgccaagatgcctcgaaaaagaaagacaagacacagttcaaacccacccttggagagccatgtgggctgggtgatggattcccgtgagcacaggccccgtactgcttccatcagctccagcccctcagaagggacgcctacagttggcagctatggctgtacccctcagtcattgcccaagttccagcatccttcccatgaactgctcaaggaaaatggcttcacacaacacgtctaccataagtatcgtaggcgctgccttaatgagcggaaacgcttgggcattggccagtctcaggagatgaacacactcttccgcttctggtccttcttcctccgagatcacttcaacaaaaagatgtatgaggagttcaagcagctggctctggaggacgccaaagaaggctacagatatggtttggagtgcctttttcgatactacagttatggcctggaaaagaagttccggctggacatattcaaggattttcaggaggaaacggtgaaggactatgaagctggccaactgtatgggctggagaagttctgggccttcttgaaatattccaaagccaaaaatttggacattgaccccaaactgcaagaatacctcggcaaattccgacgtcttgaagacttccgagtagatccccccatgggtgaggagggcaaccacaagcgacactcagtggtagcaggaggtggcggcggtgagggcaggaagcggtgcccctcccagtcttccagcaggcctgctgccatgatcagccaaccccctacaccacccaccggccagcctgtccgggaagatgccaaatggacaagccagcactcgaacacacagactttgggaaagtgaaaagctccttagccctggggcttgaggggggaaaggggtagggtgggtaagagtccatgggggtgcccagtcccaggagaggggacaatgaagggacaggcctggagttactaggacaggcctttgtgctgagtagcaatgtatacaccatttgggctatcagaggtacccctgggcaggagcctctacatccccttccccctcctctctccatgactcttgacatcctagcttcttctaaggggggagggaaaggggggagatttttatatatatatacatatatatatatcaagttttaaattattgatagttcatctggattaccaaaatcactctgcagccctgcccgaggctagtaggctgcaaccctggtccccacccctaacctcctgctccccctcaagccaactatgcagcccacaagaaggccctgcgggcccccccattgcccagcactgtctcatagaaggctctggtggtacctctgggccccaggagcatcagccccttgatcatctggggtttgtcatcaccatattttctccctgctgttcccaccatgcccttctgccatcttctgggagaaggaaaccaaaggatctaaaactggggtttgggggaaggtttcagcctctccccactccccttgccccacaccctttactccccagcccagagagacgctgcttttaccaggaaagactattgaaagatgttttattttatttttctctgacctttccatccttgaaaaaatggggaaaaaagaagaaaaaagacaaaatcgaccataaaagaccaaaaaaaaaaaaaa

SEQ ID NO: 375231 - DNA, 3939 bp, Homo sapiens
aaatattatagtcgagctgggtttattcaggacgagggtgaccccaggccctggtcactccatgcttgtggagggtgcttttgtcaaagaggcctcctttccctcacccagagctggatttccaagaggctcccatacctagctgccctggcagactcccagggaggaaaaacagcgtggccttggcagctgccccgaggaaggagcccacaggtgacagggagaagccattgccattccctgtcctggcccccttcagcaaccctgaacactctgctccagccaaggtggtgagggcagctgttcctaaacagcgcaaaggcagcaaggttggtgactttggagatgcaatcaattggcccacacctggagagatagcccacaagagtgttcagccacagtcccacaagcctcagcctacccgtaaactgccacccaagaaggacatgaaggaacaggagaaaggagaagggagtgatagtaaggagagtccaaaaaccaaatcagatgaatcaggggaggaaaagaatggagatgaggattgccagcgaggcgggcagaagaagaaaggaaacaaacacaagtgggttccattacaaatagacatgaagcctgaagtgcccagagagaaactggcttcacgccccactcgcccaccggagcctagacacatacctgccaatcgcggagagatcaaagggtctgagtctgccacctacgtgcccgtggccccccccaccccagcctggcaaccagagatcaaaccggagcctgcctggcacgaccaggatgagacatcgagtgtgaagagtgatggggctggtggggcgcgggcttccttccgtggccgtggacgggggcgtggtcgcggccggggacgcggccggggtggcactcgaacccattttgactaccagtttggctaccgaaagtttgatggtgtggaggggcctcgtacgcccaagtacatgaacaacatcacctactactttgacaatgtcagcagcaccgagctttacagtgtggatcaggaactgctcaaagactacatcaagcgccagattgaatactacttcagcgtggacaatttagagcgagacttcttcctgcgaaggaaaatggatgctgatggtttcctacccatcacccttattgcttccttccaccgagtgcaggcccttaccactgacatttcactcatctttgcggccctaaaggacagcaaggtggtggagatcgttgatgagaaagttcgtaggagggaggaaccagaaaagtggcctcttcccccaatagtggattattcacagactgatttctcccagcttctcaactgccctgaatttgttccccgtcagcactaccaaaaggagacagagtcggcacctggctctcctcgtgcagtcaccccagtgccaaccaaaacagaggaggtcagcaacctaaagacactacccaagggcctgtctgccagcctgcctgacctggattctgagaactggattgaagtgaagaagaggcctcggccatccccagcacggcccaagaagtcagaggagtccagattttcccacctgacctctctgcctcagcagctgccttcccagcagctgatgtccaaggatcaggatgagcaagaggaactggattttctgtttgacgaggagatggagcagatggatgggcggaagaacaccttcactgcctggtctgatgaggaatctgactatgagattgatgacagggatgtcaacaagatcctcattgtcacccagacaccacattacatgcgccggcacccagggggggaccgcacaggcaaccacacctcgcgtgccaagatgagcgccgaactggccaaggtcattaatgatggcctcttctactatgagcaggacctgtgggctgaaaagtttgaacctgagtattcccagatcaagcaagaagtcgagaacttcaaaaaggtcaatatgatcagccgggagcagtttgacacactgacccctgagccccctgtggatcccaaccaggaagttcctcctgggccacctcggttccagcaagttcctacggatgccctggccaacaagttgtttggtgctcctgagccctccaccatcgcccgctctctaccaaccactgtcccagagtcaccaaactaccgcaacaccaggacccctcgcactccccggacaccacagctcaaagactcaagccagacatcacggttttacccagtggtgaaagaaggacggacactggatgccaagatgcctcgaaaaagaaagacaagacacagttcaaacccacccttggagagccatgtgggctgggtgatggattcccgtgagcacaggccccgtactgcttccatcagctccagcccctcagaagggacgcctacagttggcagctatggctgtacccctcagtcattgcccaagttccagcatccttcccatgaactgctcaaggaaaatggcttcacacaacacgtctaccataagtatcgtaggcgctgccttaatgagcggaaacgcttgggcattggccagtctcaggagatgaacacactcttccgcttctggtccttcttcctccgagatcacttcaacaaaaagatgtatgaggagttcaagcagctggctctggaggacgccaaagaaggctacagatatggtttggagtgcctttttcgatactacagttatggcctggaaaagaagttccggctggacatattcaaggattttcaggaggaaacggtgaaggactatgaagctggccaactgtatgggctggagaagttctgggccttcttgaaatattccaaagccaaaaatttggacattgaccccaaactgcaagaatacctcggcaaattccgacgtcttgaagacttccgagtagatccccccatgggtgaggagggcaaccacaagcgacactcagtggtagcaggaggtggcggcggtgagggcaggaagcggtgcccctcccagtcttccagcaggcctgctgccatgatcagccaaccccctacaccacccaccggccagcctgtccgggaagatgccaaatggacaagccagcactcgaacacacagactttgggaaagtgaaaagctccttagccctggggcttgaggggggaaaggggtagggtgggtaagagtccatgggggtgcccagtcccaggagaggggacaatgaagggacaggcctggagttactaggacaggcctttgtgctgagtagcaatgtatacaccatttgggctatcagaggtacccctgggcaggagcctctacatccccttccccctcctctctccatgactcttgacatcctagcttcttctaaggggggagggaaaggggggagatttttatatatatatacatatatatatatcaagttttaaattattgatagttcatctggattaccaaaatcactctgcagccctgcccgaggctagtaggctgcaaccctggtccccacccctaacctcctgctccccctcaagccaactatgcagcccacaagaaggccctgcgggcccccccattgcccagcactgtctcatagaaggctctggtggtacctctgggccccaggagcatcagccccttgatcatctggggtttgtcatcaccatattttctccctgctgttcccaccatgcccttctgccatcttctgggagaaggaaaccaaaggatctaaaactggggtttgggggaaggtttcagcctctccccactccccttgccccacaccctttactccccagcccagagagacgctgcttttaccaggaaagactattgaaagatgttttattttatttttctctgacctttccatccttgaaaaaatggggaaaaaagaagaaaaaagacaaaatcgaccataaaagaccaaaaaaaaaaaaaa

SEQ ID NO: 375232 - DNA, 4545 bp, Homo sapiens
cgcgtcgtgaggcgcgcgcccgcccgccgcctgccgcggatcgcgtggtctgcttggctcgccgcgcctctcccccgtccgtccatattgctgcagcccccgagccgggaagcccgggccgccccgggggcgggggggagggagggacgggactagaagcctgccgggctcggggtgggggcgtcttgcgaggaacgggcggggggggacgcacgcctaggaggcctggactgcagagtggggggccttcctccccccccgccccgctagtgggcctcggatttacggcggctgcatctaactgggagggggccgcacctcgcgtgaaccccgacccttctctgcagggactggggcccagcgccccggaggaaggcgtcgcgggcgctctgctagccaagttcgaggcgggggaggcagcctcgggcgcgcccggcttctccgggggggcgggcgcgcagatggccactcaggtggagccgctgctgcctgggggcgccacgctcttgcaggccgaagagcacggggggctggtgaggaagaagccgccgccggcgcccgagggcaagggcgagcccgggccaaacgacgtccgcgggggggagccggacggcagcgctcggagaccccggccgccctgcgccaagccgcacaaggagggcaccgggcagcaggagcgcgagagcccgcggccgctgcagctgcccggcgccgaaggcccggccatcagcgacggggaggagggcggcggcgagccaggcgctggcggaggagctgccggagccgcgggcgcggggcgccgggacttcgtggaagcccccccgcccaaggtgaacccgtggactaagaacgcattgccgccggtcctgaccaccgtgaacggacagtcccccccagaacactctgctccagccaaggtggtgagggcagctgttcctaaacagcgcaaaggcagcaaggttggtgactttggagatgcaatcaattggcccacacctggagagatagcccacaagagtgttcagccacagtcccacaagcctcagcctacccgtaaactgccacccaagaaggacatgaaggaacaggagaaaggagaagggagtgatagtaaggagagtccaaaaaccaaatcagatgaatcaggggaggaaaagaatggagatgaggattgccagcgaggcgggcagaagaagaaaggaaacaaacacaagtgggttccattacaaatagacatgaagcctgaagtgcccagagagaaactggcttcacgccccactcgcccaccggagcctagacacatacctgccaatcgcggagagatcaaagggtctgagtctgccacctacgtgcccgtggccccccccaccccagcctggcaaccagagatcaaaccggagcctgcctggcacgaccaggatgagacatcgagtgtgaagagtgatggggctggtggggcgcgggcttccttccgtggccgtggacgggggcgtggtcgcggccggggacgcggccggggtggcactcgaacccattttgactaccagtttggctaccgaaagtttgatggtgtggaggggcctcgtacgcccaagtacatgaacaacatcacctactactttgacaatgtcagcagcaccgagctttacagtgtggatcaggaactgctcaaagactacatcaagcgccagattgaatactacttcagcgtggacaatttagagcgagacttcttcctgcgaaggaaaatggatgctgatggtttcctacccatcacccttattgcttccttccaccgagtgcaggcccttaccactgacatttcactcatctttgcggccctaaaggacagcaaggtggtggagatcgttgatgagaaagttcgtaggagggaggaaccagaaaagtggcctcttcccccaatagtggattattcacagactgatttctcccagcttctcaactgccctgaatttgttccccgtcagcactaccaaaaggagacagagtcggcacctggctctcctcgtgcagtcaccccagtgccaaccaaaacagaggaggtcagcaacctaaagacactacccaagggcctgtctgccagcctgcctgacctggattctgagaactggattgaagtgaagaagaggcctcggccatccccagcacggcccaagaagtcagaggagtccagattttcccacctgacctctctgcctcagcagctgccttcccagcagctgatgtccaaggatcaggatgagcaagaggaactggattttctgtttgacgaggagatggagcagatggatgggcggaagaacaccttcactgcctggtctgatgaggaatctgactatgagattgatgacagggatgtcaacaagatcctcattgtcacgcacccagggggggaccgcacaggcaaccacacctcgcgtgccaagatgagcgccgaactggccaaggtcattaatgatggcctcttctactatgagcaggacctgtgggctgaaaagtttgaacctgagtattcccagatcaagcaagaagtcgagaacttcaaaaaggtcaatatgatcagccgggagcagtttgacacactgacccctgagccccctgtggatcccaaccaggaagttcctcctgggccacctcggttccagcaagttcctacggatgccctggccaacaagttgtttggtgctcctgagccctccaccatcgcccgctctctaccaaccactgtcccagagtcaccaaactaccgcaacaccaggacccctcgcactccccggacaccacagctcaaagactcaagccagacatcacggttttacccagtggtgaaagaaggacggacactggatgccaagatgcctcgaaaaagaaagacaagacacagttcaaacccacccttggagagccatgtgggctgggtgatggattcccgtgagcacaggccccgtactgcttccatcagctccagcccctcagaagggacgcctacagttggcagctatggctgtacccctcagtcattgcccaagttccagcatccttcccatgaactgctcaaggaaaatggcttcacacaacacgtctaccataagtatcgtaggcgctgccttaatgagcggaaacgcttgggcattggccagtctcaggagatgaacacactcttccgcttctggtccttcttcctccgagatcacttcaacaaaaagatgtatgaggagttcaagcagctggctctggaggacgccaaagaaggctacagatatggtttggagtgcctttttcgatactacagttatggcctggaaaagaagttccggctggacatattcaaggattttcaggaggaaacggtgaaggactatgaagctggccaactgtatgggctggagaagttctgggccttcttgaaatattccaaagccaaaaatttggacattgaccccaaactgcaagaatacctcggcaaattccgacgtcttgaagacttccgagtagatccccccatgggtgaggagggcaaccacaagcgacactcagtggtagcaggaggtggcggcggtgagggcaggaagcggtgcccctcccagtcttccagcaggcctgctgccatgatcagccaaccccctacaccacccaccggccagcctgtccgggaagatgccaaatggacaagccagcactcgaacacacagactttgggaaagtgaaaagctccttagccctggggcttgaggggggaaaggggtagggtgggtaagagtccatgggggtgcccagtcccaggagaggggacaatgaagggacaggcctggagttactaggacaggcctttgtgctgagtagcaatgtatacaccatttgggctatcagaggtacccctgggcaggagcctctacatccccttccccctcctctctccatgactcttgacatcctagcttcttctaaggggggagggaaaggggggagatttttatatatatatacatatatatatatcaagttttaaattattgatagttcatctggattaccaaaatcactctgcagccctgcccgaggctagtaggctgcaaccctggtccccacccctaacctcctgctccccctcaagccaactatgcagcccacaagaaggccctgcgggcccccccattgcccagcactgtctcatagaaggctctggtggtacctctgggccccaggagcatcagccccttgatcatctggggtttgtcatcaccatattttctccctgctgttcccaccatgcccttctgccatcttctgggagaaggaaaccaaaggatctaaaactggggtttgggggaaggtttcagcctctccccactccccttgccccacaccctttactccccagcccagagagacgctgcttttaccaggaaagactattgaaagatgttttattttatttttctctgacctttccatccttgaaaaaatggggaaaaaagaagaaaaaagacaaaatcgaccataaaagaccaaaaaaaaaaaaaa

SEQ ID NO: 375233 - DNA, 3036 bp, Homo sapiens
ataaggccaacaccttctggccacgctccttctggaccacgctccttctggccacgctccttctggccacgctccttctggccacgctccttctggccacgctccttctggccacgctccttctggccacgctgctcaaagactacatcaagcgccagattgaatactacttcagcgtggacaatttagagcgagacttcttcctgcgaaggaaaatggatgctgatggtttcctacccatcacccttattgcttccttccaccgagtgcaggcccttaccactgacatttcactcatctttgcggccctaaaggacagcaaggtggtggagatcgttgatgagaaagttcgtaggagggaggaaccagaaaagtggcctcttcccccaatagtggattattcacagactgatttctcccagcttctcaactgccctgaatttgttccccgtcagcactaccaaaaggagacagagtcggcacctggctctcctcgtgcagtcaccccagtgccaaccaaaacagaggaggtcagcaacctaaagacactacccaagggcctgtctgccagcctgcctgacctggattctgagaactggattgaagtgaagaagaggcctcggccatccccagcacggcccaagaagtcagaggagtccagattttcccacctgacctctctgcctcagcagctgccttcccagcagctgatgtccaaggatcaggatgagcaagaggaactggattttctgtttgacgaggagatggagcagatggatgggcggaagaacaccttcactgcctggtctgatgaggaatctgactatgagattgatgacagggatgtcaacaagatcctcattgtcacccagacaccacattacatgcgccggcacccagggggggaccgcacaggcaaccacacctcgcgtgccaagatgagcgccgaactggccaaggtcattaatgatggcctcttctactatgagcaggacctgtgggctgaaaagtttgaacctgagtattcccagatcaagcaagaagtcgagaacttcaaaaaggtcaatatgatcagccgggagcagtttgacacactgacccctgagccccctgtggatcccaaccaggaagttcctcctgggccacctcggttccagcaagttcctacggatgccctggccaacaagttgtttggtgctcctgagccctccaccatcgcccgctctctaccaaccactgtcccagagtcaccaaactaccgcaacaccaggacccctcgcactccccggacaccacagctcaaagactcaagccagacatcacggttttacccagtggtgaaagaaggacggacactggatgccaagatgcctcgaaaaagaaagacaagacacagttcaaacccacccttggagagccatgtgggctgggtgatggattcccgtgagcacaggccccgtactgcttccatcagctccagcccctcagaagggacgcctacagttggcagctatggctgtacccctcagtcattgcccaagttccagcatccttcccatgaactgctcaaggaaaatggcttcacacaacacgtctaccataagtatcgtaggcgctgccttaatgagcggaaacgcttgggcattggccagtctcaggagatgaacacactcttccgcttctggtccttcttcctccgagatcacttcaacaaaaagatgtatgaggagttcaagcagctggctctggaggacgccaaagaaggctacagatatggtttggagtgcctttttcgatactacagttatggcctggaaaagaagttccggctggacatattcaaggattttcaggaggaaacggtgaaggactatgaagctggccaactgtatgggctggagaagttctgggccttcttgaaatattccaaagccaaaaatttggacattgaccccaaactgcaagaatacctcggcaaattccgacgtcttgaagacttccgagtagatccccccatgggtgaggagggcaaccacaagcgacactcagtggtagcaggaggtggcggcggtgagggcaggaagcggtgcccctcccagtcttccagcaggcctgctgccatgatcagccaaccccctacaccacccaccggccagcctgtccgggaagatgccaaatggacaagccagcactcgaacacacagactttgggaaagtgaaaagctccttagccctggggcttgaggggggaaaggggtagggtgggtaagagtccatgggggtgcccagtcccaggagaggggacaatgaagggacaggcctggagttactaggacaggcctttgtgctgagtagcaatgtatacaccatttgggctatcagaggtacccctgggcaggagcctctacatccccttccccctcctctctccatgactcttgacatcctagcttcttctaaggggggagggaaaggggggagatttttatatatatatacatatatatatatcaagttttaaattattgatagttcatctggattaccaaaatcactctgcagccctgcccgaggctagtaggctgcaaccctggtccccacccctaacctcctgctccccctcaagccaactatgcagcccacaagaaggccctgcgggcccccccattgcccagcactgtctcatagaaggctctggtggtacctctgggccccaggagcatcagccccttgatcatctggggtttgtcatcaccatattttctccctgctgttcccaccatgcccttctgccatcttctgggagaaggaaaccaaaggatctaaaactggggtttgggggaaggtttcagcctctccccactccccttgccccacaccctttactccccagcccagagagacgctgcttttaccaggaaagactattgaaagatgttttattttatttttctctgacctttccatccttgaaaaaatggggaaaaaagaagaaaaaagacaaaatcgaccataaaagaccaaaaaaaaaaaaaa

SEQ ID NO: 375234 - DNA, 4175 bp, Homo sapiens
cgcgtcgtgaggcgcgcgcccgcccgccgcctgccgcggatcgcgtggtctgcttggctcgccgcgcctctcccccgtccgtccatattgctgcagcccccgagccgggaagcccgggccgccccgggggcgggggggagggagggacgggactagaagcctgccgggctcggggtgggggcgtcttgcgaggaacgggcggggggggacgcacgcctaggaggcctggactgcagagtggggggccttcctccccccccgccccgctagtgggcctcggatttacggcggctgcatctaactgggagggggccgcacctcgcgtgaaccccgacccttctctgcagggactggggcccagcgccccggaggaaggcgtcgcgggcgctctgctagccaagttcgaggcgggggaggcagcctcgggcgcgcccggcttctccgggggggcgggcgcgcagatggccactcaggtggagccgctgctgcctgggggcgccacgctcttgcaggccgaagagcacggggggctggtgaggaagaagccgccgccggcgcccgagggcaagggcgagcccgggccaaacgacgtccgcgggggggagccggacggcagcgctcggagaccccggccgccctgcgccaagccgcacaaggagggcaccgggcagcaggagcgcgagagcccgcggccgctgcagctgcccggcgccgaaggcccggccatcagcgacggggaggagggcggcggcgagccaggcgctggcggaggagctgccggagccgcgggcgcggggcgccgggacttcgtggaagcccccccgcccaaggtgaacccgtggactaagaacgcattgccgccggtcctgaccaccgtgaacggacagtcccccccagaacactctgctccagccaaggtggtgagggcagctgttcctaaacagcgcaaaggcagcaaggttggtgactttggagatgcaatcaattggcccacacctggagagatagcccacaagagtgttcagccacagtcccacaagcctcagcctacccgtaaactgccacccaagaaggacatgaaggaacaggagaaaggagaagggagtgatagtaaggagagtccaaaaaccaaatcagatgaatcaggggaggaaaagaatggagatgaggattgccagcgaggcgggcagaagaagaaaggaaacaaacacaagtgggttccattacaaatagacatgaagcctgaagtgcccagagagaaactggcttcacgccccactcgcccaccggagcctagacacatacctgccaatcgcggagagatcaaagggtctgagtctgccacctacgtgcccgtggccccccccaccccagcctggcaaccagagatcaaaccggagcctgcctggcacgaccaggatgagacatcgagtgtgaagagtgatggggctggtggggcgcgggcttccttccgtggccgtggacgggggcgtggtcgcggccggggacgcggccggggtggcactcgaacccattttgactaccagtttggctaccgaaagtttgatggtgtggaggggcctcgtacgcccaagtacatgaacaacatcacctactactttgacaatgtcagcagcaccgagctttacagtgtggatcaggaactgctcaaagactacatcaagcgccagattgaatactacttcagcgtggacaatttagagcgagacttcttcctgcgaaggaaaatggatgctgatggtttcctacccatcacccttattgcttccttccaccgagtgcaggcccttaccactgacatttcactcatctttgcggccctaaaggacagcaaggtggtggagatcgttgatgagaaagttcgtaggagggaggaaccagaaaagtggcctcttcccccaatagtggattattcacagactgatttctcccagcttctcaactgccctgaatttgttccccgtcagcactaccaaaaggagacagagtcggcacctggctctcctcgtgcagtcaccccagtgccaaccaaaacagaggaggtcagcaacctaaagacactacccaagggcctgtctgccagcctgcctgacctggattctgagaactggattgaagtgaagaagaggcctcggccatccccagcacggcccaagaagtcagaggagtccagattttcccacctgacctctctgcctcagcagctgccttcccagcagctgatgtccaaggatcaggatgagcaagaggaactggattttctgtttgacgaggagatggagcagatggatgggcggaagaacaccttcactgcctggtctgatgaggaatctgactatgagattgatgacagggatgtcaacaagatcctcattgtcacccagacaccacattacatgcgccggcacccagggggggaccgcacaggcaaccacacctcgcgtgccaagatgagcgccgaactggccaaggtcattaatgatggcctcttctactatgagcaggacctgtgggctgaaaagtttgaacctgagtattcccagatcaagcaagaagtcgagaacttcaaaaaggtcaatatgatcagccgggagcagtttgacacactgacccctgagccccctgtggatcccaaccaggaagttcctcctgggccacctcggttccagcaagttcctacggatgccctggccaacaagttgtttggtgctcctgagccctccaccatcgcccgctctctaccaaccactgtcccagagtcaccaaactaccgcaacaccaggacccctcgcactccccggacaccacagctcaaagactcaagccagacatcacggttttacccagtggtgaaagaaggacggacactggatgccaagatgcctcgaaaaagaaagacaagacacagttcaaacccacccttggagagccatgtgggctgggtgatggattcccgtgagcacaggccccgtactgcttccatcagctccagcccctcagaagggacgcctacagttggcagctatggctgtacccctcagtcattgcccaagttccagcatccttcccatgaactgctcaaggaaaatggcttcacacaacacgtctaccataagtatcgtaggcgctgccttaatgagcggaaacgcttgggcattggccagtctcaggagatgaacacactcttccgcttctggtccttcttcctccgagatcacttcaacaaaaagatgtatgaggagttcaagcagctggctctggaggacgccaaagaaggctacagatatggtttggagtgcctttttcgatactacagttatggcctggaaaagaagttccggctggacatattcaaggattttcaggaggaaacggtgaaggactatgaagctggccaactgtatgggctggagaagttctgggccttcttgaaatattccaaagccaaaaatttggacattgaccccaaactgcaagaatacctcggcaaattccgacgtcttgaagacttccgagtagatccccccatgggtgaggagggcaaccacaagcgacactcagtggtagcaggaggtggcggcggtgagggcaggaagcggtgcccctcccagtcttccagcaggcctgctgccatgatcagccaaccccctacaccacccaccggccagcctgtccgggaagatgccaaatggacaagccagcactcgaacacacagactttgggaaagtgaaaagctcctcaagccaactatgcagcccacaagaaggccctgcgggcccccccattgcccagcactgtctcatagaaggctctggtggtacctctgggccccaggagcatcagccccttgatcatctggggtttgtcatcaccatattttctccctgctgttcccaccatgcccttctgccatcttctgggagaaggaaaccaaaggatctaaaactggggtttgggggaaggtttcagcctctccccactccccttgccccacaccctttactccccagcccagagagacgctgcttttaccaggaaagactattgaaagatgttttattttatttttctctgacctttccatccttgaaaaaatggggaaaaaagaagaaaaaagacaaaatcgaccataaaagaccaaaaaaaaaaaaaa

SEQ ID NO: 375235 - DNA, 1852 bp, Homo sapiens
acatagaaaccgacctggattactgcgtgtctgacctccgatgacgtaggattttaatcgttgcagacaaaacgcaagcttctcacatagcggctgcgccatcgggatgtcctgatccaacatcgaagtctgtggtcctatcgtggggttggactctgaagagtacggatgtgctgccgttatgcctcgggtaacacgaacgtgacgcacgtatcagatcgccccttggagagccatgtgggctgggtgatggattcccgtgagcacaggccccgtactgcttccatcagctccagcccctcagaagggacgcctacagttggcagctatggctgtacccctcagtcattgcccaagttccagcatccttcccatgaactgctcaaggaaaatggcttcacacaacacgtctaccataagtatcgtaggcgctgccttaatgagcggaaacgcttgggcattggccagtctcaggagatgaacacactcttccgcttctggtccttcttcctccgagatcacttcaacaaaaagatgtatgaggagttcaagcagctggctctggaggacgccaaagaaggctacagatatggtttggagtgcctttttcgatactacagttatggcctggaaaagaagttccggctggacatattcaaggattttcaggaggaaacggtgaaggactatgaagctggccaactgtatgggctggagaagttctgggccttcttgaaatattccaaagccaaaaatttggacattgaccccaaactgcaagaatacctcggcaaattccgacgtcttgaagacttccgagtagatccccccatgggtgaggagggcaaccacaagcgacactcagtggtagcaggaggtggcggcggtgagggcaggaagcggtgcccctcccagtcttccagcaggcctgctgccatgatcagccaaccccctacaccacccaccggccagcctgtccgggaagatgccaaatggacaagccagcactcgaacacacagactttgggaaagtgaaaagctccttagccctggggcttgaggggggaaaggggtagggtgggtaagagtccatgggggtgcccagtcccaggagaggggacaatgaagggacaggcctggagttactaggacaggcctttgtgctgagtagcaatgtatacaccatttgggctatcagaggtacccctgggcaggagcctctacatccccttccccctcctctctccatgactcttgacatcctagcttcttctaaggggggagggaaaggggggagatttttatatatatatacatatatatatatcaagttttaaattattgatagttcatctggattaccaaaatcactctgcagccctgcccgaggctagtaggctgcaaccctggtccccacccctaacctcctgctccccctcaagccaactatgcagcccacaagaaggccctgcgggcccccccattgcccagcactgtctcatagaaggctctggtggtacctctgggccccaggagcatcagccccttgatcatctggggtttgtcatcaccatattttctccctgctgttcccaccatgcccttctgccatcttctgggagaaggaaaccaaaggatctaaaactggggtttgggggaaggtttcagcctctccccactccccttgccccacaccctttactccccagcccagagagacgctgcttttaccaggaaagactattgaaagatgttttattttatttttctctgacctttccatccttgaaaaaatggggaaaaaagaagaaaaaagacaaaatcgaccataaaagaccaaaaaaaaaaaaaa

SEQ ID NO: 375236 - DNA, 1762 bp, Homo sapiens
cctctgtaaaactctctgagagttgatgcagagttaatcagacccatggatataagttaaaggtccgtaactgggcctccttgtttgataccctgtgagaggatggatcttggctgacagaacggatcagagggacccctcctgacatggtggggctgctgtggggaacctggtgacagtattttttgtggtttctgtagctccagcccctcagaagggacgcctacagttggcagctatggctgtacccctcagtcattgcccaagttccagcatccttcccatgaactgctcaaggaaaatggcttcacacaacacgtctaccataagtatcgtaggcgctgccttaatgagcggaaacgcttgggcattggccagtctcaggagatgaacacactcttccgcttctggtccttcttcctccgagatcacttcaacaaaaagatgtatgaggagttcaagcagctggctctggaggacgccaaagaaggctacagatatggtttggagtgcctttttcgatactacagttatggcctggaaaagaagttccggctggacatattcaaggattttcaggaggaaacggtgaaggactatgaagctggccaactgtatgggctggagaagttctgggccttcttgaaatattccaaagccaaaaatttggacattgaccccaaactgcaagaatacctcggcaaattccgacgtcttgaagacttccgagtagatccccccatgggtgaggagggcaaccacaagcgacactcagtggtagcaggaggtggcggcggtgagggcaggaagcggtgcccctcccagtcttccagcaggcctgctgccatgatcagccaaccccctacaccacccaccggccagcctgtccgggaagatgccaaatggacaagccagcactcgaacacacagactttgggaaagtgaaaagctccttagccctggggcttgaggggggaaaggggtagggtgggtaagagtccatgggggtgcccagtcccaggagaggggacaatgaagggacaggcctggagttactaggacaggcctttgtgctgagtagcaatgtatacaccatttgggctatcagaggtacccctgggcaggagcctctacatccccttccccctcctctctccatgactcttgacatcctagcttcttctaaggggggagggaaaggggggagatttttatatatatatacatatatatatatcaagttttaaattattgatagttcatctggattaccaaaatcactctgcagccctgcccgaggctagtaggctgcaaccctggtccccacccctaacctcctgctccccctcaagccaactatgcagcccacaagaaggccctgcgggcccccccattgcccagcactgtctcatagaaggctctggtggtacctctgggccccaggagcatcagccccttgatcatctggggtttgtcatcaccatattttctccctgctgttcccaccatgcccttctgccatcttctgggagaaggaaaccaaaggatctaaaactggggtttgggggaaggtttcagcctctccccactccccttgccccacaccctttactccccagcccagagagacgctgcttttaccaggaaagactattgaaagatgttttattttatttttctctgacctttccatccttgaaaaaatggggaaaaaagaagaaaaaagacaaaatcgaccataaaagaccaaaaaaaaaaaaaa

SEQ ID NO: 375237 - DNA, 1403 bp, Homo sapiens
tgaaatcgtgtcctcgtgtcctgaacattcgtgccctgtgtcctgaacattcgtgtccttcctccgagatcacttcaacaaaaagatgtatgaggagttcaagcagctggctctggaggacgccaaagaaggctacagatatggtttggagtgcctttttcgatactacagttatggcctggaaaagaagttccggctggacatattcaaggattttcaggaggaaacggtgaaggactatgaagctggccaactgtatgggctggagaagttctgggccttcttgaaatattccaaagccaaaaatttggacattgaccccaaactgcaagaatacctcggcaaattccgacgtcttgaagacttccgagtagatccccccatgggtgaggagggcaaccacaagcgacactcagtggtagcaggaggtggcggcggtgagggcaggaagcggtgcccctcccagtcttccagcaggcctgctgccatgatcagccaaccccctacaccacccaccggccagcctgtccgggaagatgccaaatggacaagccagcactcgaacacacagactttgggaaagtgaaaagctccttagccctggggcttgaggggggaaaggggtagggtgggtaagagtccatgggggtgcccagtcccaggagaggggacaatgaagggacaggcctggagttactaggacaggcctttgtgctgagtagcaatgtatacaccatttgggctatcagaggtacccctgggcaggagcctctacatccccttccccctcctctctccatgactcttgacatcctagcttcttctaaggggggagggaaaggggggagatttttatatatatatacatatatatatatcaagttttaaattattgatagttcatctggattaccaaaatcactctgcagccctgcccgaggctagtaggctgcaaccctggtccccacccctaacctcctgctccccctcaagccaactatgcagcccacaagaaggccctgcgggcccccccattgcccagcactgtctcatagaaggctctggtggtacctctgggccccaggagcatcagccccttgatcatctggggtttgtcatcaccatattttctccctgctgttcccaccatgcccttctgccatcttctgggagaaggaaaccaaaggatctaaaactggggtttgggggaaggtttcagcctctccccactccccttgccccacaccctttactccccagcccagagagacgctgcttttaccaggaaagactattgaaagatgttttattttatttttctctgacctttccatccttgaaaaaatggggaaaaaagaagaaaaaagacaaaatcgaccataaaagaccaaaaaaaaaaaaaa

SEQ ID NO: 375238 - DNA, 3481 bp, Homo sapiens
cgcgtcgtgaggcgcgcgcccgcccgccgcctgccgcggatcgcgtggtctgcttggctcgccgcgcctctcccccgtccgtccatattgctgcagcccccgagccgggaagcccgggccgccccgggggcgggggggagggagggacgggactagaagcctgccgggctcggggtgggggcgtcttgcgaggaacgggcggggggggacgcacgcctaggaggcctggactgcagagtggggggccttcctccccccccgccccgctagtgggcctcggatttacggcggctgcatctaactgggagggggccgcacctcgcgtgaaccccgacccttctctgcagggactggggcccagcgccccggaggaaggcgtcgcgggcgctctgctagccaagttcgaggcgggggaggcagcctcgggcgcgcccggcttctccgggggggcgggcgcgcagatggccactcaggtggagccgctgctgcctgggggcgccacgctcttgcaggccgaagagcacggggggctggtgaggaagaagccgccgccggcgcccgagggcaagggcgagcccgggccaaacgacgtccgcgggggggagccggacggcagcgctcggagaccccggccgccctgcgccaagccgcacaaggagggcaccgggcagcaggagcgcgagagcccgcggccgctgcagctgcccggcgccgaaggcccggccatcagcgacggggaggagggcggcggcgagccaggcgctggcggaggagctgccggagccgcgggcgcggggcgccgggacttcgtggaagcccccccgcccaaggtgaacccgtggactaagaacgcattgccgccggtcctgaccaccgtgaacggacagtcccccccagaacactctgctccagccaaggtggtgagggcagctgttcctaaacagcgcaaaggcagcaaggttggtgactttggagatgcaatcaattggcccacacctggagagatagcccacaagagtgttcagccacagtcccacaagcctcagcctacccgtaaactgccacccaagaaggacatgaaggaacaggagaaaggagaagggagtgatagtaaggagagtccaaaaaccaaatcagatgaatcaggggaggaaaagaatggagatgaggattgccagcgaggcgggcagaagaagaaaggaaacaaacacaagtgggttccattacaaatagacatgaagcctgaagtgcccagagagaaactggcttcacgccccactcgcccaccggagcctagacacatacctgccaatcgcggagagatcaaagggtctgagtctgccacctacgtgcccgtggccccccccaccccagcctggcaaccagagatcaaaccggagcctgcctggcacgaccaggatgagacatcgagtgtgaagagtgatggggctggtggggcgcgggcttccttccgtggccgtggacgggggcgtggtcgcggccggggacgcggccggggtggcactcgaacccattttgactaccagtttggctaccgaaagtttgatggtgtggaggggcctcgtacgcccaagtacatgaacaacatcacctactactttgacaatgtcagcagcaccgagctttacagtgtggatcaggaactgctcaaagactacatcaagcgccagattgaatactacttcagcgtggacaatttagagcgagacttcttcctgcgaaggaaaatggatgctgatggtttcctacccatcacccttattgcttccttccaccgagtgcaggcccttaccactgacatttcactcatctttgcggccctaaaggacagcaaggtggtggagatcgttgatgagaaagttcgtaggagggaggaaccagaaaagtggcctcttcccccaatagtggattattcacagactgatttctcccagcttctcaactgccctgaatttgttccccgtcagcactaccaaaaggagacagagtcggcacctggctctcctcgtgcagtcaccccagtgccaaccaaaacagaggaggtcagcaacctaaagacactacccaagggcctgtctgccagcctgcctgacctggattctgagaactggattgaagtgaagaagaggcctcggccatccccagcacggcccaagaagtcagaggagtccagattttcccacctgacctctctgcctcagcagctgccttcccagcagctgatgtccaaggatcaggatgagcaagaggaactggattttctgtttgacgaggagatggagcagatggatgggcggaagaacaccttcactgcctggtctgatgaggaatctgactatgagattgatgacagggatgtcaacaagatcctcattgtcacccagacaccacattacatgcgccggcacccagggggggaccgcacaggcaaccacacctcgcgtgccaagatgagcgccgaactggccaaggtcattaatgatggcctcttctactatgagcaggacctgtgggctgaaaagtttgaacctgagtattcccagatcaagcaagaagtcgagaacttcaaaaaggtcaatatgatcagccgggagcagtttgacacactgacccctgagccccctgtggatcccaaccaggaagttcctcctgggccacctcggttccagcaagttcctacggatgccctggccaacaagttgtttggtgctcctgagccctccaccatcgcccgctctctaccaaccactgtcccagagtcaccaaactaccgcaacaccaggacccctcgcactccccggacaccacagctcaaagactcaagccagacatcacggttttacccagtggtgaaagaaggacggacactggatgccaagatgcctcgaaaaagaaagacaagacacagttcaaacccacccttggagagccatgtgggctgggtgatggattcccgtgagcacaggccccgtactgcttccatcagtaagatggccccagtgtgtgtttcctgtttcccaaagcaagctttgagagccacctacctatgaccaatgctctctactccctgcagagatggcacagactgcaaataggcatgcttttgaagaaaatatacaattgatctttgaacaacgaagggcgtggggtgcccagctgcacacagttgaaaatccgtgtataacttttgactctccaaaagcctactgttaaccagaagccttaccaataacatatagtcaattagcacatgttttgcatattatatgtattacatactgtattcttacaataagctaaataaaaaatattactaagaaaatcacaaagaagggaacaacaaacactggggcctacttggtggggagagggaggagagtgaggtacagtttacctacttaacaaacctgtacacatacctctgaacctaaaataaaagttaaaatcataagagaaaata

SEQ ID NO: 375239 - DNA, 3060 bp, Homo sapiens
  misc_feature (3016)..(3017): n is a, c, g, or t
  misc_feature (3038)..(3038): n is a, c, g, or t
  misc_feature (3047)..(3047): n is a, c, g, or t
cgcgtcgtgaggcgcgcgcccgcccgccgcctgccgcggatcgcgtggtctgcttggctcgccgcgcctctcccccgtccgtccatattgctgcagcccccgagccgggaagcccgggccgccccgggggcgggggggagggagggacgggactagaagcctgccgggctcggggtgggggcgtcttgcgaggaacgggcggggggggacgcacgcctaggaggcctggactgcagagtggggggccttcctccccccccgccccgctagtgggcctcggatttacggcggctgcatctaactgggagggggccgcacctcgcgtgaaccccgacccttctctgcagggactggggcccagcgccccggaggaaggcgtcgcgggcgctctgctagccaagttcgaggcgggggaggcagcctcgggcgcgcccggcttctccgggggggcgggcgcgcagatggccactcaggtggagccgctgctgcctgggggcgccacgctcttgcaggccgaagagcacggggggctggtgaggaagaagccgccgccggcgcccgagggcaagggcgagcccgggccaaacgacgtccgcgggggggagccggacggcagcgctcggagaccccggccgccctgcgccaagccgcacaaggagggcaccgggcagcaggagcgcgagagcccgcggccgctgcagctgcccggcgccgaaggcccggccatcagcgacggggaggagggcggcggcgagccaggcgctggcggaggagctgccggagccgcgggcgcggggcgccgggacttcgtggaagcccccccgcccaaggtgaacccgtggactaagaacgcattgccgccggtcctgaccaccgtgaacggacagtcccccccagaacactctgctccagccaaggtggtgagggcagctgttcctaaacagcgcaaaggcagcaaggttggtgactttggagatgcaatcaattggcccacacctggagagatagcccacaagagtgttcagccacagtcccacaagcctcagcctacccgtaaactgccacccaagaaggacatgaaggaacaggagaaaggagaagggagtgatagtaaggagagtccaaaaaccaaatcagatgaatcaggggaggaaaagaatggagatgaggattgccagcgaggcgggcagaagaagaaaggaaacaaacacaagtgggttccattacaaatagacatgaagcctgaagtgcccagagagaaactggcttcacgccccactcgcccaccggagcctagacacatacctgccaatcgcggagagatcaaagggtctgagtctgccacctacgtgcccgtggccccccccaccccagcctggcaaccagagatcaaaccggagcctgcctggcacgaccaggatgagacatcgagtgtgaagagtgatggggctggtggggcgcgggcttccttccgtggccgtggacgggggcgtggtcgcggccggggacgcggccggggtggcactcgaacccattttgactaccagtttggctaccgaaagtttgatggtgtggaggggcctcgtacgcccaagtacatgaacaacatcacctactactttgacaatgtcagcagcaccgagctttacagtgtggatcaggaactgctcaaagactacatcaagcgccagattgaatactacttcagcgtggacaatttagagcgagacttcttcctgcgaaggaaaatggatgctgatggtttcctacccatcacccttattgcttccttccaccgagtgcaggcccttaccactgacatttcactcatctttgcggccctaaaggacagcaaggtggtggagatcgttgatgagaaagttcgtaggagggaggaaccagaaaagtggcctcttcccccaatagtggattattcacagactgatttctcccagcttctcaactgccctgaatttgttccccgtcagcactaccaaaaggagacagagtcggcacctggctctcctcgtgcagtcaccccagtgccaaccaaaacagaggaggtcagcaacctaaagacactacccaagggcctgtctgccagcctgcctgacctggattctgagaactggattgaagtgaagaagaggcctcggccatccccagcacggcccaagaagtcagaggagtccagattttcccacctgacctctctgcctcagcagctgccttcccagcagctgatgtccaaggatcaggatgagcaagaggaactggattttctgtttgacgaggagatggagcagatggatgggcggaagaacaccttcactgcctggtctgatgaggaatctgactatgagattgatgacagggatgtcaacaagatcctcattgtcacccagacaccacattacatgcgccggcacccagggggggaccgcacaggcaaccacacctcgcgtgccaagatgagcgccgaactggccaaggtcattaatgatggcctcttctactatgagcaggacctgtgggctgaaaagtttgaacctgagtattcccagatcaagcaagaagtcgagaacttcaaaaaggtcaatatgatcagccgggagcagtttgacacactgacccctgagccccctgtggatcccaaccaggaagttcctcctgggccacctcggttccagcaagttcctacggatgccctggccaacaagttgtttggtgctcctgagccctccaccatcgcccgctctctaccaaccactgtcccagagtcaccaaactaccgcaacaccaggacccctcgcactccccggacaccacagctcaaagactcaagccagacatcacggttttacccagtggtgaaagaaggacggacactggatgccaagatgcctcgaaaaagaaagacaagacacagttcaaacccacccttggagagccatgtgggctgggtgatggattcccgtgagcacaggccccgtactgcttccatcagaggtccagnnccttcagaaaggggccggctncaagtttgnaagttattggttg

SEQ ID NO: 375240 - DNA, 1856 bp, Homo sapiens
cgcgtcgtgaggcgcgcgcccgcccgccgcctgccgcggatcgcgtggtctgcttggctcgccgcgcctctcccccgtccgtccatattgctgcagcccccgagccgggaagcccgggccgccccgggggcgggggggagggagggacgggactagaagcctgccgggctcggggtgggggcgtcttgcgaggaacgggcggggggggacgcacgcctaggaggcctggactgcagagtggggggccttcctccccccccgccccgctagtgggcctcggatttacggcggctgcatctaactgggagggggccgcacctcgcgtgaaccccgacccttctctgcagggactggggcccagcgccccggaggaaggcgtcgcgggcgctctgctagccaagttcgaggcgggggaggcagcctcgggcgcgcccggcttctccgggggggcgggcgcgcagatggccactcaggtggagccgctgctgcctgggggcgccacgctcttgcaggccgaagagcacggggggctggtgaggaagaagccgccgccggcgcccgagggcaagggcgagcccgggccaaacgacgtccgcgggggggagccggacggcagcgctcggagaccccggccgccctgcgccaagccgcacaaggagggcaccgggcagcaggagcgcgagagcccgcggccgctgcagctgcccggcgccgaaggcccggccatcagcgacggggaggagggcggcggcgagccaggcgctggcggaggagctgccggagccgcgggcgcggggcgccgggacttcgtggaagcccccccgcccaaggtgaacccgtggactaagaacgcattgccgccggtcctgaccaccgtgaacggacagtcccccccagaacactctgctccagccaaggtggtgagggcagctgttcctaaacagcgcaaaggcagcaaggttggtgactttggagatgcaatcaattggcccacacctggagagatagcccacaagagtgttcagccacagtcccacaagcctcagcctacccgtaaactgccacccaagaaggacatgaaggaacaggagaaaggagaagggagtgatagtaaggagagtccaaaaaccaaatcagatgaatcaggggaggaaaagaatggagatgaggattgccagcgaggcgggcagaagaagaaaggaaacaaacacaagtgggttccattacaaatagacatgaagcctgaagtgcccagagagaaactggcttcacgccccactcgcccaccggagcctagacacatacctgccaatcgcggagagatcaaagggtctgagtctgccacctacgtgcccgtggccccccccaccccagcctggcaaccagagatcaaaccggagcctgcctggcacgaccaggatgagacatcgagtgtgaagagtgatggggctggtggggcgcgggcttccttccgtggccgtggacgggggcgtggtcgcggccggggacgcggccggggtggcactcgaacccattttgactaccagtttggctaccgaaagtttgatggtgtggaggggcctcgtacgcccaagtacatgaacaacatcacctactactttgacaatgtcagcagcaccgagctttacagtgtggatcaggaactgctcaaagactacatcaagcgccagattgaatactacttcagcgtggacaatttagagcgagacttcttcctgcgaaggaaaatggatgctgatggtttcctacccatcacccttattgcttccttccaccgagtgcaggcccttaccactgacatttcactcatctttgcggtatgtcttcctccctgg

SEQ ID NO: 375241 - DNA, 1105 bp, Homo sapiens
cgcgtcgtgaggcgcgcgcccgcccgccgcctgccgcggatcgcgtggtctgcttggctcgccgcgcctctcccccgtccgtccatattgctgcagcccccgagccgggaagcccgggccgccccgggggcgggggggagggagggacgggactagaagcctgccgggctcggggtgggggcgtcttgcgaggaacgggcggggggggacgcacgcctaggaggcctggactgcagagtggggggccttcctccccccccgccccgctagtgggcctcggatttacggcggctgcatctaactgggagggggccgcacctcgcgtgaaccccgacccttctctgcagggactggggcccagcgccccggaggaaggcgtcgcgggcgctctgctagccaagttcgaggcgggggaggcagcctcgggcgcgcccggcttctccgggggggcgggcgcgcagatggccactcaggtggagccgctgctgcctgggggcgccacgctcttgcaggccgaagagcacggggggctggtgaggaagaagccgccgccggcgcccgagggcaagggcgagcccgggccaaacgacgtccgcgggggggagccggacggcagcgctcggagaccccggccgccctgcgccaagccgcacaaggagggcaccgggcagcaggagcgcgagagcccgcggccgctgcagctgcccggcgccgaaggcccggccatcagcgacggggaggagggcggcggcgagccaggcgctggcggaggagctgccggagccgcgggcgcggggcgccgggacttcgtggaagcccccccgcccaaggtgaacccgtggactaagaacgcattgccgccggtcctgaccaccgtgaacggacagtcccccccagataccctttagggctggtttgccttagttgaggaagaagaccctcctagggactctgtctgccatccaccctgctacagtctgggcctcggagacctgtggacagataagctgctgggcccagtcatcagtaactgtttactcagaaaaacaagggaagtgctctaagattacactaagaaggcttttgacccattcctcgccagtag

SEQ ID NO: 375242 - DNA, 321 bp, Homo sapiens
ggtgacagtattttttgtggtttctgtagctccagcccctcagaagggacgcctacagttggcagctatggctgtacccctcagtcattgcccaagttccagcatccttcccatgaactgctcaaggaaaatggcttcacacaacacgtctaccataagtatcgtaggcgctgccttaatggtaagaagtgtggggggcaggagatgagcctctgggcccgttatttagacccagagtataagagttgggggatacggggataggtgactcttttctctgacttcagagcaaaaaaaagacatgacattatagcaagaaag

SEQ ID NO: 375243 - DNA, 3947 bp, Homo sapiens
caaaattgatgtcatgagtccgtgccggtgttattagtgacatgggtgaccccaggccctggtcactccatgcttgtggagggtgcttttgtcaaagaggcctcctttccctcacccagagctggatttccaagaggctcccatacctagctgccctggcagactcccagggaggaaaaacagcgtggccttggcagctgccccgaggaaggagcccacaggtgacagggagaagccattgccattccctgtcctggcccccttcagcaaccctgaacactctgctccagccaaggtggtgagggcagctgttcctaaacagcgcaaaggcagcaaggttggtgactttggagatgcaatcaattggcccacacctggagagatagcccacaagagtgttcagccacagtcccacaagcctcagcctacccgtaaactgccacccaagaaggacatgaaggaacaggagaaaggagaagggagtgatagtaaggagagtccaaaaaccaaatcagatgaatcaggggaggaaaagaatggagatgaggattgccagcgaggcgggcagaagaagaaaggaaacaaacacaagtgggttccattacaaatagacatgaagcctgaagtgcccagagagaaactggcttcacgccccactcgcccaccggagcctagacacatacctgccaatcgcggagagatcaaagggtctgagtctgccacctacgtgcccgtggccccccccaccccagcctggcaaccagagatcaaaccggagcctgcctggcacgaccaggatgagacatcgagtgtgaagagtgatggggctggtggggcgcgggcttccttccgtggccgtggacgggggcgtggtcgcggccggggacgcggccggggtggcactcgaacccattttgactaccagtttggctaccgaaagtttgatggtgtggaggggcctcgtacgcccaagtacatgaacaacatcacctactactttgacaatgtcagcagcaccgagctttacagtgtggatcaggaactgctcaaagactacatcaagcgccagattgaatactacttcagcgtggacaatttagagcgagacttcttcctgcgaaggaaaatggatgctgatggtttcctacccatcacccttattgcttccttccaccgagtgcaggcccttaccactgacatttcactcatctttgcggccctaaaggacagcaaggtggtggagatcgttgatgagaaagttcgtaggagggaggaaccagaaaagtggcctcttcccccaatagtggattattcacagactgatttctcccagcttctcaactgccctgaatttgttccccgtcagcactaccaaaaggagacagagtcggcacctggctctcctcgtgcagtcaccccagtgccaaccaaaacagaggaggtcagcaacctaaagacactacccaagggcctgtctgccagcctgcctgacctggattctgagaactggattgaagtgaagaagaggcctcggccatccccagcacggcccaagaagtcagaggagtccagattttcccacctgacctctctgcctcagcagctgccttcccagcagctgatgtccaaggatcaggatgagcaagaggaactggattttctgtttgacgaggagatggagcagatggatgggcggaagaacaccttcactgcctggtctgatgaggaatctgactatgagattgatgacagggatgtcaacaagatcctcattgtcacccagacaccacattacatgcgccggcacccagggggggaccgcacaggcaaccacacctcgcgtgccaagatgagcgccgaactggccaaggtcattaatgatggcctcttctactatgagcaggacctgtgggctgaaaagtttgaacctgagtattcccagatcaagcaagaagtcgagaacttcaaaaaggtcaatatgatcagccgggagcagtttgacacactgacccctgagccccctgtggatcccaaccaggaagttcctcctgggccacctcggttccagcaagttcctacggatgccctggccaacaagttgtttggtgctcctgagccctccaccatcgcccgctctctaccaaccactgtcccagagtcaccaaactaccgcaacaccaggacccctcgcactccccggacaccacagctcaaagactcaagccagacatcacggttttacccagtggtgaaagaaggacggacactggatgccaagatgcctcgaaaaagaaagacaagacacagttcaaacccacccttggagagccatgtgggctgggtgatggattcccgtgagcacaggccccgtactgcttccatcagctccagcccctcagaagggacgcctacagttggcagctatggctgtacccctcagtcattgcccaagttccagcatccttcccatgaactgctcaaggaaaatggcttcacacaacacgtctaccataagtatcgtaggcgctgccttaatgagcggaaacgcttgggcattggccagtctcaggagatgaacacactcttccgcttctggtccttcttcctccgagatcacttcaacaaaaagatgtatgaggagttcaagcagctggctctggaggacgccaaagaaggctacagatatggtttggagtgcctttttcgatactacagttatggcctggaaaagaagttccggctggacatattcaaggattttcaggaggaaacggtgaaggactatgaagctggccaactgtatgggctggagaagttctgggccttcttgaaatattccaaagccaaaaatttggacattgaccccaaactgcaagaatacctcggcaaattccgacgtcttgaagacttccgagtagatccccccatgggtgaggagggcaaccacaagcgacactcagtggtagcaggaggtggcggcggtgagggcaggaagcggtgcccctcccagtcttccagcaggcctgctgccatgatcagccaaccccctacaccacccaccggccagcctgtccgggaagatgccaaatggacaagccagcactcgaacacacagactttgggaaagtgaaaagctccttagccctggggcttgaggggggaaaggggtagggtgggtaagagtccatgggggtgcccagtcccaggagaggggacaatgaagggacaggcctggagttactaggacaggcctttgtgctgagtagcaatgtatacaccatttgggctatcagaggtacccctgggcaggagcctctacatccccttccccctcctctctccatgactcttgacatcctagcttcttctaaggggggagggaaaggggggagatttttatatatatatacatatatatatatcaagttttaaattattgatagttcatctggattaccaaaatcactctgcagccctgcccgaggctagtaggctgcaaccctggtccccacccctaacctcctgctccccctcaagccaactatgcagcccacaagaaggccctgcgggcccccccattgcccagcactgtctcatagaaggctctggtggtacctctgggccccaggagcatcagccccttgatcatctggggtttgtcatcaccatattttctccctgctgttcccaccatgcccttctgccatcttctgggagaaggaaaccaaaggatctaaaactggggtttgggggaaggtttcagcctctccccactccccttgccccacaccctttactccccagcccagagagacgctgcttttaccaggaaagactattgaaagatgttttattttatttttctctgacctttccatccttgaaaaaatggggaaaaaagaagaaaaaagacaaaatcgaccataaaagaccaaaaaaaaaaaaaa

SEQ ID NO: 375244 - DNA, 4569 bp, Homo sapiens
cgcgtcgtgaggcgcgcgcccgcccgccgcctgccgcggatcgcgtggtctgcttggctcgccgcgcctctcccccgtccgtccatattgctgcagcccccgagccgggaagcccgggccgccccgggggcgggggggagggagggacgggactagaagcctgccgggctcggggtgggggcgtcttgcgaggaacgggcggggggggacgcacgcctaggaggcctggactgcagagtggggggccttcctccccccccgccccgctagtgggcctcggatttacggcggctgcatctaactgggagggggccgcacctcgcgtgaaccccgacccttctctgcagggactggggcccagcgccccggaggaaggcgtcgcgggcgctctgctagccaagttcgaggcgggggaggcagcctcgggcgcgcccggcttctccgggggggcgggcgcgcagatggccactcaggtggagccgctgctgcctgggggcgccacgctcttgcaggccgaagagcacggggggctggtgaggaagaagccgccgccggcgcccgagggcaagggcgagcccgggccaaacgacgtccgcgggggggagccggacggcagcgctcggagaccccggccgccctgcgccaagccgcacaaggagggcaccgggcagcaggagcgcgagagcccgcggccgctgcagctgcccggcgccgaaggcccggccatcagcgacggggaggagggcggcggcgagccaggcgctggcggaggagctgccggagccgcgggcgcggggcgccgggacttcgtggaagcccccccgcccaaggtgaacccgtggactaagaacgcattgccgccggtcctgaccaccgtgaacggacagtcccccccagaacactctgctccagccaaggtggtgagggcagctgttcctaaacagcgcaaaggcagcaaggttggtgactttggagatgcaatcaattggcccacacctggagagatagcccacaagagtgttcagccacagtcccacaagcctcagcctacccgtaaactgccacccaagaaggacatgaaggaacaggagaaaggagaagggagtgatagtaaggagagtccaaaaaccaaatcagatgaatcaggggaggaaaagaatggagatgaggattgccagcgaggcgggcagaagaagaaaggaaacaaacacaagtgggttccattacaaatagacatgaagcctgaagtgcccagagagaaactggcttcacgccccactcgcccaccggagcctagacacatacctgccaatcgcggagagatcaaagggtctgagtctgccacctacgtgcccgtggccccccccaccccagcctggcaaccagagatcaaaccggagcctgcctggcacgaccaggatgagacatcgagtgtgaagagtgatggggctggtggggcgcgggcttccttccgtggccgtggacgggggcgtggtcgcggccggggacgcggccggggtggcactcgaacccattttgactaccagtttggctaccgaaagtttgatggtgtggaggggcctcgtacgcccaagtacatgaacaacatcacctactactttgacaatgtcagcagcaccgagctttacagtgtggatcaggaactgctcaaagactacatcaagcgccagattgaatactacttcagcgtggacaatttagagcgagacttcttcctgcgaaggaaaatggatgctgatggtttcctacccatcacccttattgcttccttccaccgagtgcaggcccttaccactgacatttcactcatctttgcggccctaaaggacagcaaggtggtggagatcgttgatgagaaagttcgtaggagggaggaaccagaaaagtggcctcttcccccaatagtggattattcacagactgatttctcccagcttctcaactgccctgaatttgttccccgtcagcactaccaaaaggagacagagtcggcacctggctctcctcgtgcagtcaccccagtgccaaccaaaacagaggaggtcagcaacctaaagacactacccaagggcctgtctgccagcctgcctgacctggattctgagaactggattgaagtgaagaagaggcctcggccatccccagcacggcccaagaagtcagaggagtccagattttcccacctgacctctctgcctcagcagctgccttcccagcagctgatgtccaaggatcaggatgagcaagaggaactggattttctgtttgacgaggagatggagcagatggatgggcggaagaacaccttcactgcctggtctgatgaggaatctgactatgagattgatgacagggatgtcaacaagatcctcattgtcacccagacaccacattacatgcgccggcacccagggggggaccgcacaggcaaccacacctcgcgtgccaagatgagcgccgaactggccaaggtcattaatgatggcctcttctactatgagcaggacctgtgggctgaaaagtttgaacctgagtattcccagatcaagcaagaagtcgagaacttcaaaaaggtcaatatgatcagccgggagcagtttgacacactgacccctgagccccctgtggatcccaaccaggaagttcctcctgggccacctcggttccagcaagttcctacggatgccctggccaacaagttgtttggtgctcctgagccctccaccatcgcccgctctctaccaaccactgtcccagagtcaccaaactaccgcaacaccaggacccctcgcactccccggacaccacagctcaaagactcaagccagacatcacggttttacccagtggtgaaagaaggacggacactggatgccaagatgcctcgaaaaagaaagacaagacacagttcaaacccacccttggagagccatgtgggctgggtgatggattcccgtgagcacaggccccgtactgcttccatcagctccagcccctcagaagggacgcctacagttggcagctatggctgtacccctcagtcattgcccaagttccagcatccttcccatgaactgctcaaggaaaatggcttcacacaacacgtctaccataagtatcgtaggcgctgccttaatgagcggaaacgcttgggcattggccagtctcaggagatgaacacactcttccgcttctggtccttcttcctccgagatcacttcaacaaaaagatgtatgaggagttcaagcagctggctctggaggacgccaaagaaggctacagatatggtttggagtgcctttttcgatactacagttatggcctggaaaagaagttccggctggacatattcaaggattttcaggaggaaacggtgaaggactatgaagctggccaactgtatgggctggagaagttctgggccttcttgaaatattccaaagccaaaaatttggacattgaccccaaactgcaagaatacctcggcaaattccgacgtcttgaagacttccgagtagatccccccatgggtgaggagggcaaccacaagcgacactcagtggtagcaggaggtggcggcggtgagggcaggaagcggtgcccctcccagtcttccagcaggcctgctgccatgatcagccaaccccctacaccacccaccggccagcctgtccgggaagatgccaaatggacaagccagcactcgaacacacagactttgggaaagtgaaaagctccttagccctggggcttgaggggggaaaggggtagggtgggtaagagtccatgggggtgcccagtcccaggagaggggacaatgaagggacaggcctggagttactaggacaggcctttgtgctgagtagcaatgtatacaccatttgggctatcagaggtacccctgggcaggagcctctacatccccttccccctcctctctccatgactcttgacatcctagcttcttctaaggggggagggaaaggggggagatttttatatatatatacatatatatatatcaagttttaaattattgatagttcatctggattaccaaaatcactctgcagccctgcccgaggctagtaggctgcaaccctggtccccacccctaacctcctgctccccctcaagccaactatgcagcccacaagaaggccctgcgggcccccccattgcccagcactgtctcatagaaggctctggtggtacctctgggccccaggagcatcagccccttgatcatctggggtttgtcatcaccatattttctccctgctgttcccaccatgcccttctgccatcttctgggagaaggaaaccaaaggatctaaaactggggtttgggggaaggtttcagcctctccccactccccttgccccacaccctttactccccagcccagagagacgctgcttttaccaggaaagactattgaaagatgttttattttatttttctctgacctttccatccttgaaaaaatggggaaaaaagaagaaaaaagacaaaatcgaccataaaagaccaaaaaaaaaaaaaa

SEQ ID NO: 375245 - DNA, 4368 bp, Homo sapiens
cgcgtcgtgaggcgcgcgcccgcccgccgcctgccgcggatcgcgtggtctgcttggctcgccgcgcctctcccccgtccgtccatattgctgcagcccccgagccgggaagcccgggccgccccgggggcgggggggagggagggacgggactagaagcctgccgggctcggggtgggggcgtcttgcgaggaacgggcggggggggacgcacgcctaggaggcctggactgcagagtggggggccttcctccccccccgccccgctagtgggcctcggatttacggcggctgcatctaactgggagggggccgcacctcgcgtgaaccccgacccttctctgcagggactggggcccagcgccccggaggaaggcgtcgcgggcgctctgctagccaagttcgaggcgggggaggcagcctcgggcgcgcccggcttctccgggggggcgggcgcgcagatggccactcaggtggagccgctgctgcctgggggcgccacgctcttgcaggccgaagagcacggggggctggtgaggaagaagccgccgccggcgcccgagggcaagggcgagcccgggccaaacgacgtccgcgggggggagccggacggcagcgctcggagaccccggccgccctgcgccaagccgcacaaggagggcaccgggcagcaggagcgcgagagcccgcggccgctgcagctgcccggcgccgaaggcccggccatcagcgacggggaggagggcggcggcgagccaggcgctggcggaggagctgccggagccgcgggcgcggggcgccgggacttcgtggaagcccccccgcccaaggtgaacccgtggactaagaacgcattgccgccggtcctgaccaccgtgaacggacagtcccccccagaacactctgctccagccaaggtggtgagggcagctgttcctaaacagcgcaaaggcagcaaggttggtgactttggagatgcaatcaattggcccacacctggagagatagcccacaagagtgttcagccacagtcccacaagcctcagcctacccgtaaactgccacccaagaaggacatgaaggaacaggagaaaggagaagggagtgatagtaaggagagtccaaaaaccaaatcagatgaatcaggggaggaaaagaatggagatgaggattgccagcgaggcgggcagaagaagaaaggaaacaaacacaagtgggttccattacaaatagacatgaagcctgaagtgcccagagagaaactggcttcacgccccactcgcccaccggagcctagacacatacctgccaatcgcggagagatcaaagcccattttgactaccagtttggctaccgaaagtttgatggtgtggaggggcctcgtacgcccaagtacatgaacaacatcacctactactttgacaatgtcagcagcaccgagctttacagtgtggatcaggaactgctcaaagactacatcaagcgccagattgaatactacttcagcgtggacaatttagagcgagacttcttcctgcgaaggaaaatggatgctgatggtttcctacccatcacccttattgcttccttccaccgagtgcaggcccttaccactgacatttcactcatctttgcggccctaaaggacagcaaggtggtggagatcgttgatgagaaagttcgtaggagggaggaaccagaaaagtggcctcttcccccaatagtggattattcacagactgatttctcccagcttctcaactgccctgaatttgttccccgtcagcactaccaaaaggagacagagtcggcacctggctctcctcgtgcagtcaccccagtgccaaccaaaacagaggaggtcagcaacctaaagacactacccaagggcctgtctgccagcctgcctgacctggattctgagaactggattgaagtgaagaagaggcctcggccatccccagcacggcccaagaagtcagaggagtccagattttcccacctgacctctctgcctcagcagctgccttcccagcagctgatgtccaaggatcaggatgagcaagaggaactggattttctgtttgacgaggagatggagcagatggatgggcggaagaacaccttcactgcctggtctgatgaggaatctgactatgagattgatgacagggatgtcaacaagatcctcattgtcacccagacaccacattacatgcgccggcacccagggggggaccgcacaggcaaccacacctcgcgtgccaagatgagcgccgaactggccaaggtcattaatgatggcctcttctactatgagcaggacctgtgggctgaaaagtttgaacctgagtattcccagatcaagcaagaagtcgagaacttcaaaaaggtcaatatgatcagccgggagcagtttgacacactgacccctgagccccctgtggatcccaaccaggaagttcctcctgggccacctcggttccagcaagttcctacggatgccctggccaacaagttgtttggtgctcctgagccctccaccatcgcccgctctctaccaaccactgtcccagagtcaccaaactaccgcaacaccaggacccctcgcactccccggacaccacagctcaaagactcaagccagacatcacggttttacccagtggtgaaagaaggacggacactggatgccaagatgcctcgaaaaagaaagacaagacacagttcaaacccacccttggagagccatgtgggctgggtgatggattcccgtgagcacaggccccgtactgcttccatcagctccagcccctcagaagggacgcctacagttggcagctatggctgtacccctcagtcattgcccaagttccagcatccttcccatgaactgctcaaggaaaatggcttcacacaacacgtctaccataagtatcgtaggcgctgccttaatgagcggaaacgcttgggcattggccagtctcaggagatgaacacactcttccgcttctggtccttcttcctccgagatcacttcaacaaaaagatgtatgaggagttcaagcagctggctctggaggacgccaaagaaggctacagatatggtttggagtgcctttttcgatactacagttatggcctggaaaagaagttccggctggacatattcaaggattttcaggaggaaacggtgaaggactatgaagctggccaactgtatgggctggagaagttctgggccttcttgaaatattccaaagccaaaaatttggacattgaccccaaactgcaagaatacctcggcaaattccgacgtcttgaagacttccgagtagatccccccatgggtgaggagggcaaccacaagcgacactcagtggtagcaggaggtggcggcggtgagggcaggaagcggtgcccctcccagtcttccagcaggcctgctgccatgatcagccaaccccctacaccacccaccggccagcctgtccgggaagatgccaaatggacaagccagcactcgaacacacagactttgggaaagtgaaaagctccttagccctggggcttgaggggggaaaggggtagggtgggtaagagtccatgggggtgcccagtcccaggagaggggacaatgaagggacaggcctggagttactaggacaggcctttgtgctgagtagcaatgtatacaccatttgggctatcagaggtacccctgggcaggagcctctacatccccttccccctcctctctccatgactcttgacatcctagcttcttctaaggggggagggaaaggggggagatttttatatatatatacatatatatatatcaagttttaaattattgatagttcatctggattaccaaaatcactctgcagccctgcccgaggctagtaggctgcaaccctggtccccacccctaacctcctgctccccctcaagccaactatgcagcccacaagaaggccctgcgggcccccccattgcccagcactgtctcatagaaggctctggtggtacctctgggccccaggagcatcagccccttgatcatctggggtttgtcatcaccatattttctccctgctgttcccaccatgcccttctgccatcttctgggagaaggaaaccaaaggatctaaaactggggtttgggggaaggtttcagcctctccccactccccttgccccacaccctttactccccagcccagagagacgctgcttttaccaggaaagactattgaaagatgttttattttatttttctctgacctttccatccttgaaaaaatggggaaaaaagaagaaaaaagacaaaatcgaccataaaagaccaaaaaaaaaaaaaa

SEQ ID NO: 375246 - DNA, 4503 bp, Homo sapiens
cgcgtcgtgaggcgcgcgcccgcccgccgcctgccgcggatcgcgtggtctgcttggctcgccgcgcctctcccccgtccgtccatattgctgcagcccccgagccgggaagcccgggccgccccgggggcgggggggagggagggacgggactagaagcctgccgggctcggggtgggggcgtcttgcgaggaacgggcggggggggacgcacgcctaggaggcctggactgcagagtggggggccttcctccccccccgccccgctagtgggcctcggatttacggcggctgcatctaactgggagggggccgcacctcgcgtgaaccccgacccttctctgcagggactggggcccagcgccccggaggaaggcgtcgcgggcgctctgctagccaagttcgaggcgggggaggcagcctcgggcgcgcccggcttctccgggggggcgggcgcgcagatggccactcaggtggagccgctgctgcctgggggcgccacgctcttgcaggccgaagagcacggggggctggtgaggaagaagccgccgccggcgcccgagggcaagggcgagcccgggccaaacgacgtccgcgggggggagccggacggcagcgctcggagaccccggccgccctgcgccaagccgcacaaggagggcaccgggcagcaggagcgcgagagcccgcggccgctgcagctgcccggcgccgaaggcccggccatcagcgacggggaggagggcggcggcgagccaggcgctggcggaggagctgccggagccgcgggcgcggggcgccgggacttcgtggaagcccccccgcccaaggtgaacccgtggactaagaacgcattgccgccggtcctgaccaccgtgaacggacagtcccccccagaacactctgctccagccaaggtggtgagggcagctgttcctaaacagcgcaaaggcagcaagccacagtcccacaagcctcagcctacccgtaaactgccacccaagaaggacatgaaggaacaggagaaaggagaagggagtgatagtaaggagagtccaaaaaccaaatcagatgaatcaggggaggaaaagaatggagatgaggattgccagcgaggcgggcagaagaagaaaggaaacaaacacaagtgggttccattacaaatagacatgaagcctgaagtgcccagagagaaactggcttcacgccccactcgcccaccggagcctagacacatacctgccaatcgcggagagatcaaagggtctgagtctgccacctacgtgcccgtggccccccccaccccagcctggcaaccagagatcaaaccggagcctgcctggcacgaccaggatgagacatcgagtgtgaagagtgatggggctggtggggcgcgggcttccttccgtggccgtggacgggggcgtggtcgcggccggggacgcggccggggtggcactcgaacccattttgactaccagtttggctaccgaaagtttgatggtgtggaggggcctcgtacgcccaagtacatgaacaacatcacctactactttgacaatgtcagcagcaccgagctttacagtgtggatcaggaactgctcaaagactacatcaagcgccagattgaatactacttcagcgtggacaatttagagcgagacttcttcctgcgaaggaaaatggatgctgatggtttcctacccatcacccttattgcttccttccaccgagtgcaggcccttaccactgacatttcactcatctttgcggccctaaaggacagcaaggtggtggagatcgttgatgagaaagttcgtaggagggaggaaccagaaaagtggcctcttcccccaatagtggattattcacagactgatttctcccagcttctcaactgccctgaatttgttccccgtcagcactaccaaaaggagacagagtcggcacctggctctcctcgtgcagtcaccccagtgccaaccaaaacagaggaggtcagcaacctaaagacactacccaagggcctgtctgccagcctgcctgacctggattctgagaactggattgaagtgaagaagaggcctcggccatccccagcacggcccaagaagtcagaggagtccagattttcccacctgacctctctgcctcagcagctgccttcccagcagctgatgtccaaggatcaggatgagcaagaggaactggattttctgtttgacgaggagatggagcagatggatgggcggaagaacaccttcactgcctggtctgatgaggaatctgactatgagattgatgacagggatgtcaacaagatcctcattgtcacccagacaccacattacatgcgccggcacccagggggggaccgcacaggcaaccacacctcgcgtgccaagatgagcgccgaactggccaaggtcattaatgatggcctcttctactatgagcaggacctgtgggctgaaaagtttgaacctgagtattcccagatcaagcaagaagtcgagaacttcaaaaaggtcaatatgatcagccgggagcagtttgacacactgacccctgagccccctgtggatcccaaccaggaagttcctcctgggccacctcggttccagcaagttcctacggatgccctggccaacaagttgtttggtgctcctgagccctccaccatcgcccgctctctaccaaccactgtcccagagtcaccaaactaccgcaacaccaggacccctcgcactccccggacaccacagctcaaagactcaagccagacatcacggttttacccagtggtgaaagaaggacggacactggatgccaagatgcctcgaaaaagaaagacaagacacagttcaaacccacccttggagagccatgtgggctgggtgatggattcccgtgagcacaggccccgtactgcttccatcagctccagcccctcagaagggacgcctacagttggcagctatggctgtacccctcagtcattgcccaagttccagcatccttcccatgaactgctcaaggaaaatggcttcacacaacacgtctaccataagtatcgtaggcgctgccttaatgagcggaaacgcttgggcattggccagtctcaggagatgaacacactcttccgcttctggtccttcttcctccgagatcacttcaacaaaaagatgtatgaggagttcaagcagctggctctggaggacgccaaagaaggctacagatatggtttggagtgcctttttcgatactacagttatggcctggaaaagaagttccggctggacatattcaaggattttcaggaggaaacggtgaaggactatgaagctggccaactgtatgggctggagaagttctgggccttcttgaaatattccaaagccaaaaatttggacattgaccccaaactgcaagaatacctcggcaaattccgacgtcttgaagacttccgagtagatccccccatgggtgaggagggcaaccacaagcgacactcagtggtagcaggaggtggcggcggtgagggcaggaagcggtgcccctcccagtcttccagcaggcctgctgccatgatcagccaaccccctacaccacccaccggccagcctgtccgggaagatgccaaatggacaagccagcactcgaacacacagactttgggaaagtgaaaagctccttagccctggggcttgaggggggaaaggggtagggtgggtaagagtccatgggggtgcccagtcccaggagaggggacaatgaagggacaggcctggagttactaggacaggcctttgtgctgagtagcaatgtatacaccatttgggctatcagaggtacccctgggcaggagcctctacatccccttccccctcctctctccatgactcttgacatcctagcttcttctaaggggggagggaaaggggggagatttttatatatatatacatatatatatatcaagttttaaattattgatagttcatctggattaccaaaatcactctgcagccctgcccgaggctagtaggctgcaaccctggtccccacccctaacctcctgctccccctcaagccaactatgcagcccacaagaaggccctgcgggcccccccattgcccagcactgtctcatagaaggctctggtggtacctctgggccccaggagcatcagccccttgatcatctggggtttgtcatcaccatattttctccctgctgttcccaccatgcccttctgccatcttctgggagaaggaaaccaaaggatctaaaactggggtttgggggaaggtttcagcctctccccactccccttgccccacaccctttactccccagcccagagagacgctgcttttaccaggaaagactattgaaagatgttttattttatttttctctgacctttccatccttgaaaaaatggggaaaaaagaagaaaaaagacaaaatcgaccataaaagaccaaaaaaaaaaaaaa

SEQ ID NO: 375247 - DNA, 3723 bp, Homo sapiens
agtcatcgctgctgcggcgctgccggccgtgctgggagagcaggcgagcagaacactctgctccagccaaggtggtgagggcagctgttcctaaacagcgcaaaggcagcaaggttggtgactttggagatgcaatcaattggcccacacctggagagatagcccacaagagtgttcagccacagtcccacaagcctcagcctacccgtaaactgccacccaagaaggacatgaaggaacaggagaaaggagaagggagtgatagtaaggagagtccaaaaaccaaatcagatgaatcaggggaggaaaagaatggagatgaggattgccagcgaggcgggcagaagaagaaaggaaacaaacacaagtgggttccattacaaatagacatgaagcctgaagtgcccagagagaaactggcttcacgccccactcgcccaccggagcctagacacatacctgccaatcgcggagagatcaaagggtctgagtctgccacctacgtgcccgtggccccccccaccccagcctggcaaccagagatcaaaccggagcctgcctggcacgaccaggatgagacatcgagtgtgaagagtgatggggctggtggggcgcgggcttccttccgtggccgtggacgggggcgtggtcgcggccggggacgcggccggggtggcactcgaacccattttgactaccagtttggctaccgaaagtttgatggtgtggaggggcctcgtacgcccaagtacatgaacaacatcacctactactttgacaatgtcagcagcaccgagctttacagtgtggatcaggaactgctcaaagactacatcaagcgccagattgaatactacttcagcgtggacaatttagagcgagacttcttcctgcgaaggaaaatggatgctgatggtttcctacccatcacccttattgcttccttccaccgagtgcaggcccttaccactgacatttcactcatctttgcggccctaaaggacagcaaggtggtggagatcgttgatgagaaagttcgtaggagggaggaaccagaaaagtggcctcttcccccaatagtggattattcacagactgatttctcccagcttctcaactgccctgaatttgttccccgtcagcactaccaaaaggagacagagtcggcacctggctctcctcgtgcagtcaccccagtgccaaccaaaacagaggaggtcagcaacctaaagacactacccaagggcctgtctgccagcctgcctgacctggattctgagaactggattgaagtgaagaagaggcctcggccatccccagcacggcccaagaagtcagaggagtccagattttcccacctgacctctctgcctcagcagctgccttcccagcagctgatgtccaaggatcaggatgagcaagaggaactggattttctgtttgacgaggagatggagcagatggatgggcggaagaacaccttcactgcctggtctgatgaggaatctgactatgagattgatgacagggatgtcaacaagatcctcattgtcacccagacaccacattacatgcgccggcacccagggggggaccgcacaggcaaccacacctcgcgtgccaagatgagcgccgaactggccaaggtcattaatgatggcctcttctactatgagcaggacctgtgggctgaaaagtttgaacctgagtattcccagatcaagcaagaagtcgagaacttcaaaaaggtcaatatgatcagccgggagcagtttgacacactgacccctgagccccctgtggatcccaaccaggaagttcctcctgggccacctcggttccagcaagttcctacggatgccctggccaacaagttgtttggtgctcctgagccctccaccatcgcccgctctctaccaaccactgtcccagagtcaccaaactaccgcaacaccaggacccctcgcactccccggacaccacagctcaaagactcaagccagacatcacggttttacccagtggtgaaagaaggacggacactggatgccaagatgcctcgaaaaagaaagacaagacacagttcaaacccacccttggagagccatgtgggctgggtgatggattcccgtgagcacaggccccgtactgcttccatcagctccagcccctcagaagggacgcctacagttggcagctatggctgtacccctcagtcattgcccaagttccagcatccttcccatgaactgctcaaggaaaatggcttcacacaacacgtctaccataagtatcgtaggcgctgccttaatgagcggaaacgcttgggcattggccagtctcaggagatgaacacactcttccgcttctggtccttcttcctccgagatcacttcaacaaaaagatgtatgaggagttcaagcagctggctctggaggacgccaaagaaggctacagatatggtttggagtgcctttttcgatactacagttatggcctggaaaagaagttccggctggacatattcaaggattttcaggaggaaacggtgaaggactatgaagctggccaactgtatgggctggagaagttctgggccttcttgaaatattccaaagccaaaaatttggacattgaccccaaactgcaagaatacctcggcaaattccgacgtcttgaagacttccgagtagatccccccatgggtgaggagggcaaccacaagcgacactcagtggtagcaggaggtggcggcggtgagggcaggaagcggtgcccctcccagtcttccagcaggcctgctgccatgatcagccaaccccctacaccacccaccggccagcctgtccgggaagatgccaaatggacaagccagcactcgaacacacagactttgggaaagtgaaaagctccttagccctggggcttgaggggggaaaggggtagggtgggtaagagtccatgggggtgcccagtcccaggagaggggacaatgaagggacaggcctggagttactaggacaggcctttgtgctgagtagcaatgtatacaccatttgggctatcagaggtacccctgggcaggagcctctacatccccttccccctcctctctccatgactcttgacatcctagcttcttctaaggggggagggaaaggggggagatttttatatatatatacatatatatatatcaagttttaaattattgatagttcatctggattaccaaaatcactctgcagccctgcccgaggctagtaggctgcaaccctggtccccacccctaacctcctgctccccctcaagccaactatgcagcccacaagaaggccctgcgggcccccccattgcccagcactgtctcatagaaggctctggtggtacctctgggccccaggagcatcagccccttgatcatctggggtttgtcatcaccatattttctccctgctgttcccaccatgcccttctgccatcttctgggagaaggaaaccaaaggatctaaaactggggtttgggggaaggtttcagcctctccccactccccttgccccacaccctttactccccagcccagagagacgctgcttttaccaggaaagactattgaaagatgttttattttatttttctctgacctttccatccttgaaaaaatggggaaaaaagaagaaaaaagacaaaatcgaccataaaagaccaaaaaaaaaaaaaa

SEQ ID NO: 375248 - DNA, 4515 bp, Homo sapiens
cgcgtcgtgaggcgcgcgcccgcccgccgcctgccgcggatcgcgtggtctgcttggctcgccgcgcctctcccccgtccgtccatattgctgcagcccccgagccgggaagcccgggccgccccgggggcgggggggagggagggacgggactagaagcctgccgggctcggggtgggggcgtcttgcgaggaacgggcggggggggacgcacgcctaggaggcctggactgcagagtggggggccttcctccccccccgccccgctagtgggcctcggatttacggcggctgcatctaactgggagggggccgcacctcgcgtgaaccccgacccttctctgcagggactggggcccagcgccccggaggaaggcgtcgcgggcgctctgctagccaagttcgaggcgggggaggcagcctcgggcgcgcccggcttctccgggggggcgggcgcgcagatggccactcaggtggagccgctgctgcctgggggcgccacgctcttgcaggccgaagagcacggggggctggtgaggaagaagccgccgccggcgcccgagggcaagggcgagcccgggccaaacgacgtccgcgggggggagccggacggcagcgctcggagaccccggccgccctgcgccaagccgcacaaggagggcaccgggcagcaggagcgcgagagcccgcggccgctgcagctgcccggcgccgaaggcccggccatcagcgacggggaggagggcggcggcgagccaggcgctggcggaggagctgccggagccgcgggcgcggggcgccgggacttcgtggaagcccccccgcccaaggtgaacccgtggactaagaacgcattgccgccggtcctgaccaccgtgaacggacagtcccccccagaacactctgctccagccaaggtggtgagggcagctgttcctaaacagcgcaaaggcagcaaggttggtgactttggagatgcaatcaattggcccacacctggagagatagcccacaagagtgttcagccacagtcccacaagcctcagcctacccgtaaactgccacccaagaaggacatgaaggaacaggagaaaggagaagggagtgatagtaaggagagtccaaaaaccaaatcagatgaatcaggggaggaaaagaatggagatgaggattgccagcgaggcgggcagaagaagaaaggaaacaaacacaagtgggttccattacaaatagacatgaagcctgaagtgcccagagagaaactggcttcacgccccactcgcccaccggagcctagacacatacctgccaatcgcggagagatcaaagggtctgagtctgccacctacgtgcccgtggccccccccaccccagcctggcaaccagagatcaaaccggagcctgcctggcacgaccaggatgagacatcgagtgtgaagagtgatggggctggtggggcgcgggcttccttccgtggccgtggacgggggcgtggtcgcggccggggacgcggccggggtggcactcgaacccattttgactaccagtttggctaccgaaagtttgatggtgtggaggggcctcgtacgcccaagtacatgaacaacatcacctactactttgacaatgtcagcagcaccgagctttacagtgtggatcaggaactgctcaaagactacatcaagcgccagattgaatactacttcagcgtggacaatttagagcgagacttcttcctgcgaaggaaaatggatgctgatggtttcctacccatcacccttattgcttccttccaccgagtgcaggcccttaccactgacatttcactcatctttgcggccctaaaggacagcaaggtggtggagatcgttgatgagaaagttcgtaggagggaggaaccagaaaagtggcctcttcccccaatagtggattattcacagactgatttctcccagcttctcaactgccctgaatttgttccccgtcagcactaccaaaaggagacagagtcggcacctggctctcctcgtgcagtcaccccagtgccaaccaaaacagaggaggtcagcaacctaaagacactacccaagggcctgtctgccagcctgcctgacctggattctgagaactggattgaagtgaagaagaggcctcggccatccccagcacggcccaagaagtcagaggagtccagattttcccacctgacctctctgcctcagcagctgccttcccagcagctgatgtccaaggatcaggatgagcaagaggaactggattttctgtttgacgaggagatggagcagatggatgggcggaagaacaccttcactgcctggtctgatgaggaatctgactatgagattgatgacagggatgtcaacaagatcctcattgtcacccagacaccacattacatgcgccggcacccagggggggaccgcacaggcaaccacacctcgcgtgccaagatgagcgccgaactggccaaggtcattaatgatggcctcttctactatgagcaggacctgtgggctgaaaagtttgaacctgagtattcccagatcaagcaagaagtcgagaacttcaaaaaggtcaatatgatcagccgggagcagtttgacacactgacccctgagccccctgtggatcccaaccaggaagttcctcctgggccacctcggttccagcaagttcctacggatgccctggccaacaagttgtttggtgctcctgagccctccaccatcgcccgctctctaccaaccactgtcccagagtcaccaaactaccgcaacaccaggacccctcgcactccccggacaccacagctcaaagactcaagccagacatcacggttttacccagtggtgaaagaaggacggacactggatgccaagatgcctcgaaaaagaaagacaagacacagttcaaacccacccttggagagccatgtgggctgggtgatggattcccgtgagcacaggccccgtactgcttccatcagctccagcccctcagaagggacgcctacagttggcagctatggctgtacccctcagtcattgcccaagttccagcatccttcccatgaactgctcaaggagcggaaacgcttgggcattggccagtctcaggagatgaacacactcttccgcttctggtccttcttcctccgagatcacttcaacaaaaagatgtatgaggagttcaagcagctggctctggaggacgccaaagaaggctacagatatggtttggagtgcctttttcgatactacagttatggcctggaaaagaagttccggctggacatattcaaggattttcaggaggaaacggtgaaggactatgaagctggccaactgtatgggctggagaagttctgggccttcttgaaatattccaaagccaaaaatttggacattgaccccaaactgcaagaatacctcggcaaattccgacgtcttgaagacttccgagtagatccccccatgggtgaggagggcaaccacaagcgacactcagtggtagcaggaggtggcggcggtgagggcaggaagcggtgcccctcccagtcttccagcaggcctgctgccatgatcagccaaccccctacaccacccaccggccagcctgtccgggaagatgccaaatggacaagccagcactcgaacacacagactttgggaaagtgaaaagctccttagccctggggcttgaggggggaaaggggtagggtgggtaagagtccatgggggtgcccagtcccaggagaggggacaatgaagggacaggcctggagttactaggacaggcctttgtgctgagtagcaatgtatacaccatttgggctatcagaggtacccctgggcaggagcctctacatccccttccccctcctctctccatgactcttgacatcctagcttcttctaaggggggagggaaaggggggagatttttatatatatatacatatatatatatcaagttttaaattattgatagttcatctggattaccaaaatcactctgcagccctgcccgaggctagtaggctgcaaccctggtccccacccctaacctcctgctccccctcaagccaactatgcagcccacaagaaggccctgcgggcccccccattgcccagcactgtctcatagaaggctctggtggtacctctgggccccaggagcatcagccccttgatcatctggggtttgtcatcaccatattttctccctgctgttcccaccatgcccttctgccatcttctgggagaaggaaaccaaaggatctaaaactggggtttgggggaaggtttcagcctctccccactccccttgccccacaccctttactccccagcccagagagacgctgcttttaccaggaaagactattgaaagatgttttattttatttttctctgacctttccatccttgaaaaaatggggaaaaaagaagaaaaaagacaaaatcgaccataaaagaccaaaaaaaaaaaaaa

SEQ ID NO: 375249 - DNA, 3918 bp, Homo sapiens
cgcgtcgtgaggcgcgcgcccgcccgccgcctgccgcggatcgcgtggtctgcttggctcgccgcgcctctcccccgtccgtccatattgctgcagcccccgagccgggaagcccgggccgccccgggggcgggggggagggagggacgggactagaagcctgccgggctcggggtgggggcgtcttgcgaggaacgggcggggggggacgcacgcctaggaggcctggactgcagagtggggggccttcctccccccccgccccgctagtgggcctcggatttacggcggctgcatctaactgggagggggccgcacctcgcgtgaaccccgacccttctctgcagggactggggcccagcgccccggaggaaggcgtcgcgggcgctctgctagccaagttcgaggcgggggaggcagcctcgggcgcgcccggcttctccgggggggcgggcgcgcagatggccactcaggtggagccgctgctgcctgggggcgccacgctcttgcaggccgaagagcacggggggctggtgaggaagaagccgccgccggcgcccgagggcaagggcgagcccgggccaaacgacgtccgcgggggggagccggacggcagcgctcggagaccccggccgccctgcgccaagccgcacaaggagggcaccgggcagcaggagcgcgagagcccgcggccgctgcagctgcccggcgccgaaggcccggccatcagcgacggggaggagggcggcggcgagccaggcgctggcggaggagctgccggagccgcgggcgcggggcgccgggacttcgtggaagcccccccgcccaaggtgaacccgtggactaagaacgcattgccgccggtcctgaccaccgtgaacggacagtcccccccagaacactctgctccagccaaggtggtgagggcagctgttcctaaacagcgcaaaggcagcaaggttggtgactttggagatgcaatcaattggcccacacctggagagatagcccacaagagtgttcagccacagtcccacaagcctcagcctacccgtaaactgccacccaagaaggacatgaaggaacaggagaaaggagaagggagtgatagtaaggagagtccaaaaaccaaatcagatgaatcaggggaggaaaagaatggagatgaggattgccagcgaggcgggcagaagaagaaaggaaacaaacacaagtgggttccattacaaatagacatgaagcctgaagtgcccagagagaaactggcttcacgccccactcgcccaccggagcctagacacatacctgccaatcgcggagagatcaaagggtctgagtctgccacctacgtgcccgtggccccccccaccccagcctggcaaccagagatcaaaccggagcctgcctggcacgaccaggatgagacatcgagtgtgaagagtgatggggctggtggggcgcgggcttccttccgtggccgtggacgggggcgtggtcgcggccggggacgcggccggggtggcactcgaacccattttgactaccagtttggctaccgaaagtttgatggtgtggaggggcctcgtacgcccaagtacatgaacaacatcacctactactttgacaatgtcagcagcaccgagctttacagtgtggatcaggaactgctcaaagactacatcaagcgccagattgaatactacttcagcgtggacaatttagagcgagacttcttcctgcgaaggaaaatggatgctgatggtttcctacccatcacccttattgcttccttccaccgagtgcaggcccttaccactgacatttcactcatctttgcggccctaaaggacagcaaggtggtggagatcgttgatgagaaagttcgtaggagggaggaaccagaaaagtggcctcttcccccaatagtggattattcacagactgatttctcccagcttctcaactgccctgaatttgttccccgtcagcactaccaaaaggagacagagtcggcacctggctctcctcgtgcagtcaccccagtgccaaccaaaacagaggaggtcagcaacctaaagacactacccaagggcctgtctgccagcctgcctgacctggattctgagaactggattgaagtgaagaagaggcctcggccatccccagcacggcccaagaagtcagaggagtccagattttcccacctgacctctctgcctcagcagctgccttcccagcagctgatgtccaaggatcaggatgagcaagaggaactggattttctgtttgacgaggagatggagcagatggatgggcggaagaacaccttcactgcctggtctgatgaggaatctgactatgagattgatgacagggatgtcaacaagatcctcattgtcacccagacaccacattacatgcgccggcacccagggggggaccgcacaggcaaccacacctcgcgtgccaagatgagcgccgaactggccaaggtcattaatgatggcctcttctactatgagcaggacctgtgggctgaaaagtttgaacctgagtattcccagatcaagcaagaagtcgagaacttcaaaaaggtcaatatgatcagccgggagcagtttgacacactgacccctgagccccctgtggatcccaaccaggaagttcctcctgggccacctcggttccagcaagttcctacggatgccctggccaacaagttgtttggtgctcctgagccctccaccatcgcccgctctctaccaaccactgtcccagagtcaccaaactaccgcaacaccaggacccctcgcactccccggacaccacagctcaaagactcaagccagacatcacggttttacccagtggtgaaagaaggacggacactggatgccaagatgcctcgaaaaagaaagacaagacacagttcaaacccacccttggagagccatgtgggctgggtgatggattcccgtgagcacaggccccgtactgcttccatcagctccagcccctcagaagggacgcctacagttggcagctatggctgtacccctcagtcattgcccaagttccagcatccttcccatgaactgctcaaggaaaatggcttcacacaacacgtctaccataagtatcgtaggcgctgccttaatgagcggaaacgcttgggcattggccagtctcaggagatgaacacactcttccgcttctggtccttcttcctccgagatcacttcaacaaaaagatgtatgaggagttcaagcagctggctctggaggacgccaaagaaggctacagatatggtttggagtgcctttttcgatactacagttatggcctggaaaagaagttccggctggacatattcaaggattttcaggaggaaacggtgaaggactatgaagctggccaactgtatgggctggagaagttctgggccttcttgaaatattccaaagccaaaaatttggacattgaccccaaactgcaagaatacctcggcaaattccgacgtcttgaagacttccgagtagatccccccattgcccagcactgtctcatagaaggctctggtggtacctctgggccccaggagcatcagccccttgatcatctggggtttgtcatcaccatattttctccctgctgttcccaccatgcccttctgccatcttctgggagaaggaaaccaaaggatctaaaactggggtttgggggaaggtttcagcctctccccactccccttgccccacaccctttactccccagcccagagagacgctgcttttaccaggaaagactattgaaagatgttttattttatttttctctgacctttccatccttgaaaaaatggggaaaaaagaagaaaaaagacaaaatcgaccataaaagaccaaaaaaaaaaaaaa

SEQ ID NO: 375250 - DNA, 1604 bp, Homo sapiens
agacgccattcttgcatacaggccccgtactgcttccatcagctccagcccctcagaagggacgcctacagttggcagctatggctgtacccctcagtcattgcccaagttccagcatccttcccatgaactgctcaaggaaaatggcttcacacaacacgtctaccataagtatcgtaggcgctgccttaatgagcggaaacgcttgggcattggccagtctcaggagatgaacacactcttccgcttctggtccttcttcctccgagatcacttcaacaaaaagatgtatgaggagttcaagcagctggctctggaggacgccaaagaaggctacagatatggtttggagtgcctttttcgatactacagttatggcctggaaaagaagttccggctggacatattcaaggattttcaggaggaaacggtgaaggactatgaagctggccaactgtatgggctggagaagttctgggccttcttgaaatattccaaagccaaaaatttggacattgaccccaaactgcaagaatacctcggcaaattccgacgtcttgaagacttccgagtagatccccccatgggtgaggagggcaaccacaagcgacactcagtggtagcaggaggtggcggcggtgagggcaggaagcggtgcccctcccagtcttccagcaggcctgctgccatgatcagccaaccccctacaccacccaccggccagcctgtccgggaagatgccaaatggacaagccagcactcgaacacacagactttgggaaagtgaaaagctccttagccctggggcttgaggggggaaaggggtagggtgggtaagagtccatgggggtgcccagtcccaggagaggggacaatgaagggacaggcctggagttactaggacaggcctttgtgctgagtagcaatgtatacaccatttgggctatcagaggtacccctgggcaggagcctctacatccccttccccctcctctctccatgactcttgacatcctagcttcttctaaggggggagggaaaggggggagatttttatatatatatacatatatatatatcaagttttaaattattgatagttcatctggattaccaaaatcactctgcagccctgcccgaggctagtaggctgcaaccctggtccccacccctaacctcctgctccccctcaagccaactatgcagcccacaagaaggccctgcgggcccccccattgcccagcactgtctcatagaaggctctggtggtacctctgggccccaggagcatcagccccttgatcatctggggtttgtcatcaccatattttctccctgctgttcccaccatgcccttctgccatcttctgggagaaggaaaccaaaggatctaaaactggggtttgggggaaggtttcagcctctccccactccccttgccccacaccctttactccccagcccagagagacgctgcttttaccaggaaagactattgaaagatgttttattttatttttctctgacctttccatccttgaaaaaatggggaaaaaagaagaaaaaagacaaaatcgaccataaaagaccaaaaaaaaaaaaaa

SEQ ID NO: 375251 - DNA, 1127 bp, Homo sapiens
tgaggagtctcgctctgttgccaggctggagtgcagtggcacaatctcagctcactgcaacctccgcctcccggtttcaagtgtctcctgcctcagcctcccaagtagctgggactacaggtgcgcgctgccacgcccggctaatttttgtatttttagtagagacggggtttcaccatgttggccaggatggtctcgatctcttgacctcatgatccacccaccccctacaccacccaccggccagcctgtccgggaagatgccaaatggacaagccagcactcgaacacacagactttgggaaagtgaaaagctccttagccctggggcttgaggggggaaaggggtagggtgggtaagagtccatgggggtgcccagtcccaggagaggggacaatgaagggacaggcctggagttactaggacaggcctttgtgctgagtagcaatgtatacaccatttgggctatcagaggtacccctgggcaggagcctctacatccccttccccctcctctctccatgactcttgacatcctagcttcttctaaggggggagggaaaggggggagatttttatatatatatacatatatatatatcaagttttaaattattgatagttcatctggattaccaaaatcactctgcagccctgcccgaggctagtaggctgcaaccctggtccccacccctaacctcctgctccccctcaagccaactatgcagcccacaagaaggccctgcgggcccccccattgcccagcactgtctcatagaaggctctggtggtacctctgggccccaggagcatcagccccttgatcatctggggtttgtcatcaccatattttctccctgctgttcccaccatgcccttctgccatcttctgggagaaggaaaccaaaggatctaaaactggggtttgggggaaggtttcagcctctccccactccccttgccccacaccctttactccccagcccagagagacgctgcttttaccaggaaagactattgaaagatgttttattttatttttctctgacctttccatccttgaaaaaatggggaaaaaagaagaaaaaagacaaaatcgaccataaaagaccaaaaaaaaaaaaaa

SEQ ID NO: 375252 - DNA, 3394 bp, Homo sapiens
cgcgtcgtgaggcgcgcgcccgcccgccgcctgccgcggatcgcgtggtctgcttggctcgccgcgcctctcccccgtccgtccatattgctgcagcccccgagccgggaagcccgggccgccccgggggcgggggggagggagggacgggactagaagcctgccgggctcggggtgggggcgtcttgcgaggaacgggcggggggggacgcacgcctaggaggcctggactgcagagtggggggccttcctccccccccgccccgctagtgggcctcggatttacggcggctgcatctaactgggagggggccgcacctcgcgtgaaccccgacccttctctgcagggactggggcccagcgccccggaggaaggcgtcgcgggcgctctgctagccaagttcgaggcgggggaggcagcctcgggcgcgcccggcttctccgggggggcgggcgcgcagatggccactcaggtggagccgctgctgcctgggggcgccacgctcttgcaggccgaagagcacggggggctggtgaggaagaagccgccgccggcgcccgagggcaagggcgagcccgggccaaacgacgtccgcgggggggagccggacggcagcgctcggagaccccggccgccctgcgccaagccgcacaaggagggcaccgggcagcaggagcgcgagagcccgcggccgctgcagctgcccggcgccgaaggcccggccatcagcgacggggaggagggcggcggcgagccaggcgctggcggaggagctgccggagccgcgggcgcggggcgccgggacttcgtggaagcccccccgcccaaggtgaacccgtggactaagaacgcattgccgccggtcctgaccaccgtgaacggacagtcccccccagaacactctgctccagccaaggtggtgagggcagctgttcctaaacagcgcaaaggcagcaaggttggtgactttggagatgcaatcaattggcccacacctggagagatagcccacaagagtgttcagccacagtcccacaagcctcagcctacccgtaaactgccacccaagaaggacatgaaggaacaggagaaaggagaagggagtgatagtaaggagagtccaaaaaccaaatcagatgaatcaggggaggaaaagaatggagatgaggattgccagcgaggcgggcagaagaagaaaggaaacaaacacaagtgggttccattacaaatagacatgaagcctgaagtgcccagagagaaactggcttcacgccccactcgcccaccggagcctagacacatacctgccaatcgcggagagatcaaagggtctgagtctgccacctacgtgcccgtggccccccccaccccagcctggcaaccagagatcaaaccggagcctgcctggcacgaccaggatgagacatcgagtgtgaagagtgatggggctggtggggcgcgggcttccttccgtggccgtggacgggggcgtggtcgcggccggggacgcggccggggtggcactcgaacccattttgactaccagtttggctaccgaaagtttgatggtgtggaggggcctcgtacgcccaagtacatgaacaacatcacctactactttgacaatgtcagcagcaccgagctttacagtgtggatcaggaactgctcaaagactacatcaagcgccagattgaatactacttcagcgtggacaatttagagcgagacttcttcctgcgaaggaaaatggatgctgatggtttcctacccatcacccttattgcttccttccaccgagtgcaggcccttaccactgacatttcactcatctttgcggccctaaaggacagcaaggtggtggagatcgttgatgagaaagttcgtaggagggaggaaccagaaaagtggcctcttcccccaatagtggattattcacagactgatttctcccagcttctcaactgccctgaatttgttccccgtcagcactaccaaaaggagacagagtcggcacctggctctcctcgtgcagtcaccccagtgccaaccaaaacagaggaggtcagcaacctaaagacactacccaagggcctgtctgccagcctgcctgacctggattctgagaactggattgaagtgaagaagaggcctcggccatccccagcacggcccaagaagtcagaggagtccagattttcccacctgacctctctgcctcagcagctgccttcccagcagctgatgtccaaggatcaggatgagcaagaggaactggattttctgtttgacgaggagatggagcagatggatgggcggaagaacaccttcactgcctggtctgatgaggaatctgactatgagattgatgacagggatgtcaacaagatcctcattgtcacccagacaccacattacatgcgccggcacccagggggggaccgcacaggcaaccacacctcgcgtgccaagatgagcgccgaactggccaaggtcattaatgatggcctcttctactatgagcaggacctgtgggctgaaaagtttgaacctgagtattcccagatcaagcaagaagtcgagaacttcaaaaaggtcaatatgatcagccgggagcagtttgacacactgacccctgagccccctgtggatcccaaccaggaagttcctcctgggccacctcggttccagcaagttcctacggatgccctggccaacaagttgtttggtgctcctgagccctccaccatcgcccgctctctaccaaccactgtcccagagtcaccaaactaccgcaacaccaggacccctcgcactccccggacaccacagctcaaagactcaagccagacatcacggttttacccagtggtgaaagaaggacggacactggatgccaagatgcctcgaaaaagaaagacaagacacagttcaaacccacccttggagagccatgtgggctgggtgatggattcccgtgagcacaggccccgtactgcttccatcagagatggcacagactgcaaataggcatgcttttgaagaaaatatacaattgatctttgaacaacgaagggcgtggggtgcccagctgcacacagttgaaaatccgtgtataacttttgactctccaaaagcctactgttaaccagaagccttaccaataacatatagtcaattagcacatgttttgcatattatatgtattacatactgtattcttacaataagctaaataaaaaatattactaagaaaatcacaaagaagggaacaacaaacactggggcctacttggtggggagagggaggagagtgaggtacagtttacctacttaacaaacctgtacacatacctctgaacctaaaataaaagttaaaatcataagagaaaata

SEQ ID NO: 375253 - DNA, 2862 bp, Homo sapiens
cgcgtcgtgaggcgcgcgcccgcccgccgcctgccgcggatcgcgtggtctgcttggctcgccgcgcctctcccccgtccgtccatattgctgcagcccccgagccgggaagcccgggccgccccgggggcgggggggagggagggacgggactagaagcctgccgggctcggggtgggggcgtcttgcgaggaacgggcggggggggacgcacgcctaggaggcctggactgcagagtggggggccttcctccccccccgccccgctagtgggcctcggatttacggcggctgcatctaactgggagggggccgcacctcgcgtgaaccccgacccttctctgcagggactggggcccagcgccccggaggaaggcgtcgcgggcgctctgctagccaagttcgaggcgggggaggcagcctcgggcgcgcccggcttctccgggggggcgggcgcgcagatggccactcaggtggagccgctgctgcctgggggcgccacgctcttgcaggccgaagagcacggggggctggtgaggaagaagccgccgccggcgcccgagggcaagggcgagcccgggccaaacgacgtccgcgggggggagccggacggcagcgctcggagaccccggccgccctgcgccaagccgcacaaggagggcaccgggcagcaggagcgcgagagcccgcggccgctgcagctgcccggcgccgaaggcccggccatcagcgacggggaggagggcggcggcgagccaggcgctggcggaggagctgccggagccgcgggcgcggggcgccgggacttcgtggaagcccccccgcccaaggtgaacccgtggactaagaacgcattgccgccggtcctgaccaccgtgaacggacagtcccccccagaacactctgctccagccaaggtggtgagggcagctgttcctaaacagcgcaaaggcagcaaggttggtgactttggagatgcaatcaattggcccacacctggagagatagcccacaagagtgttcagccacagtcccacaagcctcagcctacccgtaaactgccacccaagaaggacatgaaggaacaggagaaaggagaagggagtgatagtaaggagagtccaaaaaccaaatcagatgaatcaggggaggaaaagaatggagatgaggattgccagcgaggcgggcagaagaagaaaggaaacaaacacaagtgggttccattacaaatagacatgaagcctgaagtgcccagagagaaactggcttcacgccccactcgcccaccggagcctagacacatacctgccaatcgcggagagatcaaagggtctgagtctgccacctacgtgcccgtggccccccccaccccagcctggcaaccagagatcaaaccggagcctgcctggcacgaccaggatgagacatcgagtgtgaagagtgatggggctggtggggcgcgggcttccttccgtggccgtggacgggggcgtggtcgcggccggggacgcggccggggtggcactcgaacccattttgactaccagtttggctaccgaaagtttgatggtgtggaggggcctcgtacgcccaagtacatgaacaacatcacctactactttgacaatgtcagcagcaccgagctttacagtgtggatcaggaactgctcaaagactacatcaagcgccagattgaatactacttcagcgtggacaatttagagcgagacttcttcctgcgaaggaaaatggatgctgatggtttcctacccatcacccttattgcttccttccaccgagtgcaggcccttaccactgacatttcactcatctttgcggccctaaaggacagcaaggtggtggagatcgttgatgagaaagttcgtaggagggaggaaccagaaaagtggcctcttcccccaatagtggattattcacagactgatttctcccagcttctcaactgccctgaatttgttccccgtcagcactaccaaaaggagacagagtcggcacctggctctcctcgtgcagtcaccccagtgccaaccaaaacagaggaggtcagcaacctaaagacactacccaagggcctgtctgccagcctgcctgacctggattctgagaactggattgaagtgaagaagaggcctcggccatccccagcacggcccaagaagtcagaggagtccagattttcccacctgacctctctgcctcagcagctgccttcccagcagctgatgtccaaggatcaggatgagcaagaggaactggattttctgtttgacgaggagatggagcagatggatgggcggaagaacaccttcactgcctggtctgatgaggaatctgactatgagattgatgacagggatgtcaacaagatcctcattgtcacccagacaccacattacatgcgccggcacccagggggggaccgcacaggcaaccacacctcgcgtgccaagatgagcgccgaactggccaaggtcattaatgatggcctcttctactatgagcaggacctgtgggctgaaaagtttgaacctgagtattcccagatcaagcaagaagtcgagaacttcaaaaaggtcaatatgatcagccgggagcagtttgacacactgacccctgagccccctgtggatcccaaccaggaagttcctcctgggccacctcggttccagcaagttctacggatgctggcaaagttgtttgtgtctgagcctcacatcgcgttctacaacatgtccagagtacaaatacgaaacagacctggatccgaacacgttcagatagcgactcgttccgtgggaaagcgccggtgagatttgaaaaaagacggtaccccttgagctg

SEQ ID NO: 375254 - DNA, 370 bp, Homo sapiens
caagaagtcgagaacttcaaaaaggtcaatatgatcagccgggagcagtttgacacactgacccctgagccccctgtggatcccaaccaggaagttcctcctgggccacctcggttccagcaaggtgagaagcagacacctgagatcctgacatgggtgagaggatctagggcccttggactgggggctatcctggggtggatgccacaggcctttccctgcttcctgactcctctctctgcctctgcagttcctacggatgccctggccaacaagttgtttggtgctcctgagccctccaccatcgcccgctctctaccaaccactgtcccagagtcaccaaactaccgcaacaccaggacccctcgca

SEQ ID NO: 375255 - DNA, 467 bp, Homo sapiens
catcgtccaccaagctctgcacctcactctgcaacctctctcccttcccaattagattcaacccattaataacacattaataaccctttgcttagcccactgttcatccttcaggcttcctctcagttgacattttcttctggagcctgtttgggccctcaaatctaggttaggttaccctcctgagggctttccatcaccctgtgttttgcatctgtcactgcacttaccaccagtcttgtaggtgttgataggcttgtctctgttccacctttcagtagactgttagtgccatgaggaagaccctgggcgtgccagccttgtgcacacactctgagcatctaatagacacaaaaagaagtgggataaggaggatggtatatgggcattctctgtattatctctgcaaattttttgaaatcctaaaactattccaaaatgaaaagttcatttaaataaaaaaatgt

SEQ ID NO: 375256 - DNA, 220 bp, Homo sapiens
ttcagttcaggtacaaaacaatggctccaaaaaccaaattattaaaaaataaatgtgtcaaataccccagtattctacatactgaggcaattttgaccctaggatgcctgcctagcgcagtacagaactgagggctgtggtttaaggaaactaatatcatgacctaaattttcaacattatcaggccaccagtaaaactgtcctcatctagaaaaaaaga

SEQ ID NO: 375257 - DNA, 334 bp, Homo sapiens
tttgagacagtctccctctgttgccaggctggagtgcagcagcgcgatctcagctcactggaacctccgcctcccgggttcaagtgattcccttgcctcagcctcccgagtagctgggactacaggcgcgccttcttgtattttagtggagatgatgtttcaccatgttggccaggatggtctcgatctcctgacctcgtgatccacctgccttggcctcccaaagtgcggggattacaggagtgagccactgcgcctggcctaattttctacctccatatggaacttaaaactcagatgagctgacagaccacctaatatatgtctaactttt

SEQ ID NO: 375258 - DNA, 192 bp, Homo sapiens
caagctttgtcttgaagaaacaaagcttatctaggcctgaataagctacgctcaagcgtactcagagaagcgatttgcagattttctgaaggggcctcctggggttaagtgattaggctgaccaaggaggttatgcaagggcattatgtatcagcaaaagccaggtgggcaatgagtgaaagtaagctgtgg

SEQ ID NO: 375259 - DNA, 1933 bp, Homo sapiens
ttgaatgagtttctctctgtgttctgctacattgctggaaatagaaaccaattcacgtagctaggaaatagtctagtggttaagaacttgagcttgggagtctttaatccctcctcttcatttaccagccctgtgacctggaacaagttttttaactcttcgtttgttcctcaattgttaagagggaaatagttcctacctcacagcattactgtgagatttaagtgagatatttacaaagcacttggtacagtccctgcaatattgtaagcattccatcagaataatagctgttactaatactgccatagacacacctttactagcaaacatgaaactcacttgtggtttctaaaatcgttcattacggaatggcatttgttgactaactcttcatccacacaccgccttgtttctgtattccacagccacaggactgtgggacctggtgctttcccaaatcaggaggtgccacccccaaacctcaccagttgttccacacacggagttatccttgaaataatttcagcatcattagaatacataaaagctgtctacgtgcatactttctgatgctcttaaaacagtttcaccactctcagatcggctttggttgtttctcaacaggacagtctgtggctgtgtgagaagacctgtgagacaggaatgctgtcttctcctcagtattctccgtgggaactgacggaactgtggaaactgaaggaacggtgcggtgatccttgtcgatgtcaagcaagataacagggacttgaattagcagagtctaaaatcagggcaggcaaacgataatctgagtgcaagtctgaggagtcccagggtttagcagtagactgtatggtctttcaagagagttccagactggcactttcacccagaaccaatgcggtgtttcttaatgtttgcacaaatttccttaaaaatcaacttgtactgtagcataagaaaagtttttatttatctattggaagattatcagaaaaataccaagttattttataaaagaaaaaatatttctaaatcctgatgcattgtggctaattagtaattcaccattacctatagtttttggttaaaacttggcctagttcagaaatctgtagtagtaactgagagtttgaatttcaacctggattgcaggatagctctgtagagctaattaggataattatcagacaaaaaggaactcacaggaatgctgtgtgatcatgtgatcacatatttgagcagtggtcacttataccaaagtttggggtttctggaaataatgtcagattttgtggatctctgaagtgggcaacttgaactaacttgaagaggaaccaatatgattctcagttctgaaccttggttttaaagaagttcatttatatggtagactaatacccaaattttctttctgccatctaacataaatcctgaaggtcacagtttagtactcatagtttttaaatgctaaagttgtgtgagtatgaataaaagcaaatacctctcagggttttagtgccatcgggaaggatatttctaaattttgttgacattttgaaagaattagttttgctttcctcctatcattgcctaatgtttacctaatatgagtacatttcaatcaaagctggttatcacagaagaagatatactcagcttaggtataattgtagggaaaagcatgtgattaatttaagtactcttagaaatagtgcaactgagaagacagataatagcatattgttatacatagtagaggatgtctccccaagtttaagggacatttcccaaaatgaccaaccaaatcatttctagtaaccctttaaaatagtagtttcaatagagaattccattaaaactagtcttatgacagatattaactgtgttcagattttattaggctagctagtttctttctatttaatat

SEQ ID NO: 375260 - DNA, 1363 bp, Homo sapiens
ggtgaagatgtaagcatgggcatctggatggctgccataggacctaaaagataccaggacagtctgtggctgtgtgagaagacctgtgagacaggaatgctgtcttctcctcagtattctccgtgggaactgacggaactgtggaaactgaaggaacggtgcggtgatccttgtcgatgtcaagcaagataacagggacttgaattagcagagtctaaaatcagggcaggcaaacgataatctgagtgcaagtctgaggagtcccagggtttagcagtagactgtatggtctttcaagagagttccagactggcactttcacccagaaccaatgcggtgtttcttaatgtttgcacaaatttccttaaaaatcaacttgtactgtagcataagaaaagtttttatttatctattggaagattatcagaaaaataccaagttattttataaaagaaaaaatatttctaaatcctgatgcattgtggctaattagtaattcaccattacctatagtttttggttaaaacttggcctagttcagaaatctgtagtagtaactgagagtttgaatttcaacctggattgcaggatagctctgtagagctaattaggataattatcagacaaaaaggaactcacaggaatgctgtgtgatcatgtgatcacatatttgagcagtggtcacttataccaaagtttggggtttctggaaataatgtcagattttgtggatctctgaagtgggcaacttgaactaacttgaagaggaaccaatatgattctcagttctgaaccttggttttaaagaagttcatttatatggtagactaatacccaaattttctttctgccatctaacataaatcctgaaggtcacagtttagtactcatagtttttaaatgctaaagttgtgtgagtatgaataaaagcaaatacctctcagggttttagtgccatcgggaaggatatttctaaattttgttgacattttgaaagaattagttttgctttcctcctatcattgcctaatgtttacctaatatgagtacatttcaatcaaagctggttatcacagaagaagatatactcagcttaggtataattgtagggaaaagcatgtgattaatttaagtactcttagaaatagtgcaactgagaagacagataatagcatattgttatacatagtagaggatgtctccccaagtttaagggacatttcccaaaatgaccaaccaaatcatttctagtaaccctttaaaatagtagtttcaatagagaattccattaaaactagtcttatgacagatattaactgtgttcagattttattaggctagctagtttctttctatttaatat

SEQ ID NO: 375261 - DNA, 681 bp, Homo sapiens
gtataaaccaagttgctagaattttattttcatccatttcagtccaaccaccttccccttctccaccaagtttcagagtatacagctcctcaaattcaatttctctggagactaaaccactggtcttctgtgggtttggggactgggaaaaggaactttggtggggttggtctaagtgctacatacagtgtttctaccttctgtttttagtacagtaacttatccctgcctaccttggtactactgtacacttctaatttatgaccatctccaggattcttatggaataaaacttgtttctataaccctctctgctgccactccatttatagcttctttcattctgctaaatttaattagcatcatccagaaatgtgttaaaatctctcttcccctgttgtcttctctcttttgtatttttcgtattttattgtcattttaatgagtcagggtggagaagaaatagacacagtgtgctatagttaatcagaagcctcatggttctttttgagatggggtcttgccctgttggctaagcttgtcttggactcctgggctcaagggatcctcacaccttaacatcccaagtagctgggactacaggcacacaccaccaccaccaccacacctgagtcttgtggggttttttttagtcaatgtatttctaatttcaaaagccaa

SEQ ID NO: 375262 - DNA, 1176 bp, Homo sapiens
agactgaactgcaccttgttggtattcagctgtgatggacatagagaattggaggcaccttgttttcacaactaggataaaaataggtgttgattcttgcagggtcctttccattcctattgagagggagccctggctcaatgaccccctcccaaagtggactgtccaaagggataggctcacacgagaaacagcgagactgaaaagtggagaccgtggaatagcagtagggagtccacggagaaaacacagtgaatgttcgtaggcattcacgtgtttttgttactgctttttcgaggctgtgtcccaatgagttcactcctttcaccagacatggtcgaggttcccctctctggccagctgcagtgaatggccagcgggtttcttttctcctgggccaaggcactttgagggttgggggatagcgccggcactgcgcttggctgactgcagcgctgacacggtgtttccccaaatccctgttgcctgtgtgtttgtgtttatctgttcctagtacaggcaacataatgagatactgtgcttcccacctccccttcaattcatagccaaaatgggtctagaatctggcactttactcatttcccttgataaatgaaattgtactgtgcagagctgtcaggaccttcagatgatcgtataggactgtagctgtctaggtctgaggctgcatcttggggacacacttggttgttccccatgtgcagggttcagcacttacctgggagtggtagtggttaggcttttgagcttgaacgcccgcgtgtgaacagatgaaaaatccttcagtacccaaatccccagtcttccctttggggagcagttggggggtggctggcagcaagggcctaggaaagagaccttgcagggtgatggcagggcagcctggggcgcccagtgtagtgtgcttagtaattggtcaccagctgtcatccttggcttctcctactgtatctttgttacaagccctccgcaatccacagaactctctctccttccttccacctgtcagcttctctgcttctgagataagaaccatttctgtaacaccaatacttaagaaagacatgcattatgtggtgtaatcaaacctgatgctttcagatcatctacttacatcttcaacatggataagataaacaaaacaaatgcatctaa

SEQ ID NO: 375263 - DNA, 369 bp, Homo sapiens
gctgccgcatactactactaaattaaaaacccgtcgttaaatccaatcctgttctaaaaactaatactaaaaattacatatgatgagctcataacaaaatgatttataatgatttctccagtaagatattttggctcatatagccactccaaaatccatacatagaaaattatatcaaacaaaggatatacagctcaagatttcaaatgaatttcttacacattcttcacaagttaaattcacattccatcaggagtaagaaaaagaaggaaaacattattttctaggactctacccttagcaataacattatcttctaccttctcaagatatcaggtatgttcatagattttgtaatcaaaccaccct

SEQ ID NO: 375264 - DNA, 554 bp, Homo sapiens
tgatttacattatcattatacagtgtggattagttaatagtttttttttgttttgtttttaagagatggggtctcactgtgttgctcaggctgaacttgaactcctgagctcaagtgatcatcccacctcagcttctcatgtagctaagactataggcatgtgccactgggcccagcctggattaaagatttccacatagaccagaactagtttgaagattaggaattacttttttaggcttcattttgtgtgtttaaaaatatgtttaaaatggccaggcacggtggctcacacctgtaatcccagcacttagggaggccaaggcagacagatcactaggtcaggagatcgagaccatcctggccaacatggtgaaaccccgtctctactaaaatacaaaaaaattagccgggtgtggtggtgcgtgcctgtagtaccagctactcaggaggctgaggcaggggaatcacttgaacccgggaggcagaggttgcagtgagccgagatcacacgactgcaatccagcctggtggcagagcaagactccatctca

SEQ ID NO: 375265 - DNA, 539 bp, Homo sapiens
gcgtgccgctactactactactaaattcgcggccgcgtcgacttccttcctcacaaagttgactcatgaaagcacttaaaaaagttaaaaatgttacatactatgttctttaatcagcactaataacattaatattgatcgggcagaaggtacagcgatcatgcgggtggggaccagaattgggaattgggaattgggaaatctaggttctcagcccaacatttgcacctgctagttcgtgatgcaaggcacctcacttatccaggtccccattaaactaggtttaataaagtgagtttgcctaaacctcttcctagctccaaggctaattttaagctattaatttgaatccaaggcctaaaatatttgagctctcatttaacagtcggccactgcaaagggtaaagacagcaatcttgtatgaacaaagttaaacataacgtgctagacacaggtctttgcaaaaccatgcagtagccaataggtccaccataccacccttcatttggaaattgatgctaaggtgccataggtacatt

SEQ ID NO: 375266 - DNA, 1182 bp, Homo sapiens
agagctttccaagtttgggaaggtgtccgggttttctgcgattacttctctgagcatgaacggaagtcaccctttgtgccttatgcggtgattttaatgataggtgtcatatataggacggagtaatctgtttacattctgttcttctcgatgcactcacaagcgggtaactaggtgacaagaaaacaaagatcttattcaaaagaggtcttacagcaacccaacgtctcatcttcccatagtaaagatgacggcgccttgaggtaagctacaggcaacaccacttccgcgtttctcttgcgccctggtccaagatggcggatgaagccacgcgacgtgttgtgtctgagatcccggtgctgaagactaacgccggaccccgagatcgtgagttgtgggtgcagcgactgaaggaggaatatcagtcccttatccggtatgtggagaacaacaagaatgctgacaacgattggttccgactggagtccaacaaggaaggaactcggtggtttggaaaatgctggtatatccatgacctcctgaaatatgagtttgacatcgagtttgacattcctatcacatatcctactactgccccagaaattgcagttcctgagctggatggaaagacagcaaagatgtacaggggtggcaaaatatgcctgacggatcatttcaaacctttgtgggccaggaatgtgcccaaatttggactagctcatctcatggctctggggctgggtccatggctggcagtggaaatccctgatctgattcagaagggcgtcatccaacacaaagagaaatgcaaccaatgaagaatcaagccactgaggcagggcagagggacctttgataggctacgatactattttcctgtgcatcacacttaactcatctaactgcttccccggacaccctccacctctagttgttactaagtagctgcagtaggcattgctggggaagaaacaaacacacaccaaacagtactgctacttagtttctaaggctgcacagggaagggaaagactgggctttggacaatctagaggtaatttatatccgcccccaggtggagcaacatgcgattctggaggcacgggggtaactgaaagtgagtacatatagtctttctggtttctggagataacccatcaataaaagctgcttcctctggta

SEQ ID NO: 375267 - DNA, 255 bp, Homo sapiens
  misc_feature (238)..(238): n is a, c, g, or t
ttgtcgctctagcggatctcctcagacagcggacccctccacctctagttgttactaagtagctgcagtaggcattgctggggaagaaacaaacacacaccaaacagtactgctacttagtttctaaggctgcacagggaagggaaagactgggctttggacaatctagaggtaatttatatccgcccccaggtggagcaacatgcgattctggaggcacggggtccgctgtctgagngatcctcgagacaccca

SEQ ID NO: 375268 - DNA, 1111 bp, Homo sapiens
acccacgcgtcggacccacgcgtcgatgataggtgtcatatataggacggagtaatctgtttacattctgttcttctcgatgcactcacaagcgggtaactaggtgacaagaaaacaaagatcttattcaaaagaggtcttacagcaacccaacgtctcatcttcccatagtaaagatgacggcgccttgaggtaagctacaggcaacaccacttccgcgtttctcttgcgccctggtccaagatggcggatgaagccacgcgacgtgttgtgtctgagatcccggtgctgaagactaacgccggaccccgagatcgtgagttgtgggtgcagcgactgaaggaggaatatcagtcccttatccggtatgtggagaacaacaagaatgctgacaacgattggttccgactggagtccaacaaggaaggaactcggtggtttggaaaatgctggtatatccatgacctcctgaaatatgagtttgacatcgagtttgacattcctatcacatatcctactactgccccagaaattgcagttcctgagctggatggaaagacagcaaagatgtacaggggtggcaaaatatgcctgacggatcatttcaaacctttgtgggccaggaatgtgcccaaatttggactagctcatctcatggctctggggctgggtccatggctggcagtggaaatccctgatctgattcagaagggcgtcatccaacacaaagagaaatgcaaccaatgaagaatcaagccactgaggcagggcagagggacctttgataggctacgatactattttcctgtgcatcacacttaactcatctaactgcttccccggacaccctccacctctagttgttactaagtagctgcagtaggcattgctggggaagaaacaaacacacaccaaacagtactgctacttagtttctaaggctgcacagggaagggaaagactgggctttggacaatctagaggtaatttatatccgcccccaggtggagcaacatgcgattctggaggcacgggggtaactgaaagtgagtacatatagtctttctggtttctggagataacccatcaataaaagctgcttcctctggta

SEQ ID NO: 375269 - DNA, 1132 bp, Homo sapiens
agagctttccaagtttgggaaggtgtccgggttttctgcgattacttctctgagcatgaacggaagtcaccctttgtgccttatgcggtgattttaatgataggtgtcatatataggacggagtaatctgtttacattctgttcttctcgatgcactcacaagcgggtaactaggtgacaagaaaacaaagatcttattcaaaagaggtcttacagcaacccaacgtctcatcttcccatagtaaagatgacggcgccttgaggtaagctacaggcaacaccacttccgcgtttctcttgcgccctggtccaagatggcggatgaagccacgcgacgtgttgtgtctgagatcccggtgctgaagactaacgccggaccccgagatctatgtggagaacaacaagaatgctgacaacgattggttccgactggagtccaacaaggaaggaactcggtggtttggaaaatgctggtatatccatgacctcctgaaatatgagtttgacatcgagtttgacattcctatcacatatcctactactgccccagaaattgcagttcctgagctggatggaaagacagcaaagatgtacaggggtggcaaaatatgcctgacggatcatttcaaacctttgtgggccaggaatgtgcccaaatttggactagctcatctcatggctctggggctgggtccatggctggcagtggaaatccctgatctgattcagaagggcgtcatccaacacaaagagaaatgcaaccaatgaagaatcaagccactgaggcagggcagagggacctttgataggctacgatactattttcctgtgcatcacacttaactcatctaactgcttccccggacaccctccacctctagttgttactaagtagctgcagtaggcattgctggggaagaaacaaacacacaccaaacagtactgctacttagtttctaaggctgcacagggaagggaaagactgggctttggacaatctagaggtaatttatatccgcccccaggtggagcaacatgcgattctggaggcacgggggtaactgaaagtgagtacatatagtctttctggtttctggagataacccatcaataaaagctgcttcctctggta

SEQ ID NO: 375270 - DNA, 771 bp, Homo sapiens
tcaaagacctcattctctgctttcagtatgtggagaacaacaagaatgctgacaacgattggttccgactggagtccaacaaggaaggaactcggtggtttggaaaatgctggtatatccatgacctcctgaaatatgagtttgacatcgagtttgacattcctatcacatatcctactactgccccagaaattgcagttcctgagctggatggaaagacagcaaagatgtacaggggtggcaaaatatgcctgacggatcatttcaaacctttgtgggccaggaatgtgcccaaatttggactagctcatctcatggctctggggctgggtccatggctggcagtggaaatccctgatctgattcagaagggcgtcatccaacacaaagagaaatgcaaccaatgaagaatcaagccactgaggcagggcagagggacctttgataggctacgatactattttcctgtgcatcacacttaactcatctaactgcttccccggacaccctccacctctagttgttactaagtagctgcagtaggcattgctggggaagaaacaaacacacaccaaacagtactgctacttagtttctaaggctgcacagggaagggaaagactgggctttggacaatctagaggtaatttatatccgcccccaggtggagcaacatgcgattctggaggcacgggggtaactgaaagtgagtacatatagtctttctggtttctggagataacccatcaataaaagctgcttcctctggta

SEQ ID NO: 375271 - DNA, 719 bp, Homo sapiens
aattcggaacgaggcgactggatccaacaaggaaggaactcggtggtttggaaaatgctggtatatccatgacctcctgaaatatgagtttgacatcgagtttgacattcctatcacatatcctactactgccccagaaattgcagttcctgagctggatggaaagacagcaaagatgtacaggggtggcaaaatatgcctgacggatcatttcaaacctttgtgggccaggaatgtgcccaaatttggactagctcatctcatggctctggggctgggtccatggctggcagtggaaatccctgatctgattcagaagggcgtcatccaacacaaagagaaatgcaaccaatgaagaatcaagccactgaggcagggcagagggacctttgataggctacgatactattttcctgtgcatcacacttaactcatctaactgcttccccggacaccctccacctctagttgttactaagtagctgcagtaggcattgctggggaagaaacaaacacacaccaaacagtactgctacttagtttctaaggctgcacagggaagggaaagactgggctttggacaatctagaggtaatttatatccgcccccaggtggagcaacatgcgattctggaggcacgggggtaactgaaagtgagtacatatagtctttctggtttctggagataacccatcaataaaagctgcttcctctggta

SEQ ID NO: 375272 - DNA, 1385 bp, Homo sapiens
  misc_feature (1385)..(1385): n is a, c, g, or t
agagctttccaagtttgggaaggtgtccgggttttctgcgattacttctctgagcatgaacggaagtcaccctttgtgccttatgcggtgattttaatgataggtgtcatatataggacggagtaatctgtttacattctgttcttctcgatgcactcacaagcgggtaactaggtgacaagaaaacaaagatcttattcaaaagaggtcttacagcaacccaacgtctcatcttcccatagtaaagatgacggcgccttgaggtaagctacaggcaacaccacttccgcgtttctcttgcgccctggtccaagatggcggatgaagccacgcgacgtgttgtgtctgagatcccggtgctgaagactaacgccggaccccgagatcgtgagttgtgggtgcagcgactgaaggaggaatatcagtcccttatccggtatgtggagaacaacaagaatgctgacaacgattggttccgactggagtccaacaaggaaggaactcggtggtttggaaaatgctggtatatccatgacctcctgaaatatgagtttgacatcgagtttgacattcctatcacatatcctactactgccccagaaattgcagttcctgagctggatggaaagacagcaaagatgtacaggggtggcaaaatatgcctgacggatcatttcaaacctttgtgggccaggaatgtgcccaaatttggactagctcatctcatggctctggggctgggtccatggctggcagtggaaatccctgatctgattcagaagggcgtcatccaacacaaagagaaatgcaaccaatgaagaatcaagccactgaggcagggcagagggacctttgataggctacgatactattttcctgtgcatcacacttaactcatctaactgcttccccggacaccctccacctctagttgttactaagtagctgcagtaggcattgctggggaagaaacaaacacacaccaaacagtactgctacttagtttctaaggctgcacagggaagggaaagactgggctttggacaatctagaggtaatttatatccgcccccaggtggagcaacatgcgattctggaggcacgggggtaactgaaagtgagtacatatagtctttctggtttctggagataacccatcaataaaagctgcttcctctggtaaggcttggttctctcatgacacaagaagtcgacaacaaagaaaacacaaaagagaaacaaacatgtctggtggcagcgggccactaggcggccctgaagaagaaggccttaagaacaccaacacgagtaatgggcacgcgaggcccccacactacagaacaggcgagacgaggggaacaaagcgcgtacacccgagagagaan

SEQ ID NO: 375273 - DNA, 1138 bp, Homo sapiens
  misc_feature (1121)..(1121): n is a, c, g, or t
agagctttccaagtttgggaaggtgtccgggttttctgcgattacttctctgagcatgaacggaagtcaccctttgtgccttatgcggtgattttaatgataggtgtcatatataggacggagtaatctgtttacattctgttcttctcgatgcactcacaagcgggtaactaggtgacaagaaaacaaagatcttattcaaaagaggtcttacagcaacccaacgtctcatcttcccatagtaaagatgacggcgccttgaggtaagctacaggcaacaccacttccgcgtttctcttgcgccctggtccaagatggcggatgaagccacgcgacgtgttgtgtctgagatcccggtgctgaagactaacgccggaccccgagatcgtgagttgtgggtgcagcgactgaaggaggaatatcagtcccttatccggtatgtggagaacaacaagaatgctgacaacgattggttccgactggagtccaacaaggaaggaactcggtggtttggaaaatgctggtatatccatgacctcctgaaatatgagtttgacatcgagtttgacattcctatcacatatcctactactgccccagaaattgcagttcctgagctggatggaaagacagcaaagatgtacaggggtggcaaaatatgcctgacggatcatttcaaacctttgtgggccaggaatgtgcccaaatttggactagctcatctcatggctctggggctgggtccatggctggcagtggaaatccctgatctgattcagaagggcgtcatccaacacaaagagaaatgcaaccaatgaagaatcaagccactgaggcagggcagagggacctttgataggctacgatactattttcctgtgcatcacacttaactcatctaactgcttccccggacaccctccacctctagttgttactaagtagctgcagtaggcattgctggggaagaaacaaacacacaccaaacagtactgctacttagtttctaaggctgcacagggaagggaaagactgggctttggacaatctagaggtaatttatatccgcccccaggtggagcaacatgcgattctggaggcacggggtccgctgtctgagngatcctcgagacaccca

SEQ ID NO: 375274 - DNA, 579 bp, Homo sapiens
gagcatctgtagttaggatcgcgatgagagagcaaagatgtcagggtggcaaaatatgcctgacggatcatttcaaacctttgtgggccaggaatgtgcccaaatttggactagctcatctcatggctctggggctgggtccatggctggcagtggaaatccctgatctgattcagaagggcgtcatccaacacaaagagaaatgcaaccaatgaagaatcaagccactgaggcagggcagagggacctttgataggctacgatactattttcctgtgcatcacacttaactcatctaactgcttccccggacaccctccacctctagttgttactaagtagctgcagtaggcattgctggggaagaaacaaacacacaccaaacagtactgctacttagtttctaaggctgcacagggaagggaaagactgggctttggacaatctagaggtaatttatatccgcccccaggtggagcaacatgcgattctggaggcacgggggtaactgaaagtgagtacatatagtctttctggtttctggagataacccatcaataaaagctgcttcctctggta

SEQ ID NO: 375275 - DNA, 1218 bp, Homo sapiens
  misc_feature (1052)..(1052): n is a, c, g, or t
agagctttccaagtttgggaaggtgtccgggttttctgcgattacttctctgagcatgaacggaagtcaccctttgtgccttatgcggtgattttaatgataggtgtcatatataggacggagtaatctgtttacattctgttcttctcgatgcactcacaagcgggtaactaggtgacaagaaaacaaagatcttattcaaaagaggtcttacagcaacccaacgtctcatcttcccatagtaaagatgacggcgccttgaggtaagctacaggcaacaccacttccgcgtttctcttgcgccctggtccaagatggcggatgaagccacgcgacgtgttgtgtctgagatcccggtgctgaagactaacgccggaccccgagatcgtgagttgtgggtgcagcgactgaaggaggaatatcagtcccttatccggtatgtggagaacaacaagaatgctgacaacgattggttccgactggagtccaacaaggaaggaactcggtggtttggaaaatgctggtatatccatgacctcctgaaatatgagtttgacatcgagtttgacattcctatcacatatcctactactgccccagaaattgcagttcctgagctggatggaaagacagcaaagatgtacaggggtggcaaaatatgcctgacggatcatttcaaacctttgtgggccaggaatgtgcccaaatttggactagctcatctcatggctctggggctgggtccatggctggcagtggaaatccctgatctgattcagaagggcgtcatccaacacaaagagaaatgcaaccaatgaagaatcaagccactgaggcagggcagagggacctttgataggctacgatactattttcctgtgcatcacacttaactcatctaactgcttccccggacaccctccacctctagttgttactaagtagctgcagtaggcattgctggggaagaaacaaacacacaccaaacagtactgctacttagtttctaaggtgccgggaggaagacgggttggcaactaaggtatttttcngccagggagcatggattggggggggatgaaggacataattggtgggaacaaaaagggctgggaaaaaaaagcaattggggcgccaacgatacacggcggcgagagagcggacgaggctgccaagggaccaaggcgacgcgacggcaatgcaaaacacagtcacgcg

SEQ ID NO: 375276 - DNA, 1382 bp, Homo sapiens
agagctttccaagtttgggaaggtgtccgggttttctgcgattacttctctgagcatgaacggaagtcaccctttgtgccttatgcggtgattttaatgataggtgtcatatataggacggagtaatctgtttacattctgttcttctcgatgcactcacaagcgggtaactaggtgacaagaaaacaaagatcttattcaaaagaggtcttacagcaacccaacgtctcatcttcccatagtaaagatgacggcgccttgaggtaagctacaggcaacaccacttccgcgtttctcttgcgccctggtccaagatggcggatgaagccacgcgacgtgttgtgtctgagatcccggtgctgaagactaacgccggaccccgagatcgtgagttgtgggtgcagcgactgaaggaggaatatcagtcccttatccggtatgtggagaacaacaagaatgctgacaacgattggttccgactggagtccaacaaggaaggaactcggtggtttggaaaatgctggtatatccatgacctcctgaaatatgagtttgacatcgagtttgacattcctatcacatatcctactactgccccagaaattgcagttcctgagctggatggaaagacagcaaagatgtacaggggtggcaaaatatgcctgacggatcatttcaaacctttgtgggccaggaatgtgcccaaatttggactagctcatctcatggctctgggggtaagttttgtgtatttggcataaaaggagaaagagggacttaggccctgagcagtacaagaaaagcagctaagaataaaaggaataacagtgatgtcccttaagcatgttcccccagaatctgtctccaggaaggagcttctaatggaacaagaagcattgactggtagtaatctcacaggattttccttgtattgcagctgggtccatggctggcagtggaaatccctgatctgattcagaagggcgtcatccaacacaaagagaaatgcaaccaatgaagaatcaagccactgaggcagggcagagggacctttgataggctacgatactattttcctgtgcatcacacttaactcatctaactgcttccccggacaccctccacctctagttgttactaagtagctgcagtaggcattgctggggaagaaacaaacacacaccaaacagtactgctacttagtttctaaggctgcacagggaagggaaagactgggctttggacaatctagaggtaatttatatccgcccccaggtggagcaacatgcgattctggaggcacgggggtaactgaaagtgagtacatatagtctttctggtttctggagataacccatcaataaaagctgcttcctctggta

SEQ ID NO: 375277 - DNA, 1091 bp, Homo sapiens
agagctttccaagtttgggaaggtgtccgggttttctgcgattacttctctgagcatgaacggaagtcaccctttgtgccttatgcggtgattttaatgataggtgtcatatataggacggagtaatctgtttacattctgttcttctcgatgcactcacaagcgggtaactaggtgacaagaaaacaaagatcttattcaaaagaggtcttacagcaacccaacgtctcatcttcccatagtaaagatgacggcgccttgaggtaagctacaggcaacaccacttccgcgtttctcttgcgccctggtccaagatggcggatgaagccacgcgacgtgttgtgtctgagatcccggtgctgaagactaacgccggaccccgagatcgtgagttgtgggtgcagcgactgaaggaggaatatcagtcccttatccggtatgtggagaacaacaagaatgctgacaacgattggttccgactggagtccaacaaggaaggaactcggtggtttggaaaatgctggtatatccatgacctcctgaaatatgagtttgacatcgagtttgacattcctatcacatatcctactactgccccagaaattgcagttcctgagctggatggaaagacagcaaagatgtacagctgggtccatggctggcagtggaaatccctgatctgattcagaagggcgtcatccaacacaaagagaaatgcaaccaatgaagaatcaagccactgaggcagggcagagggacctttgataggctacgatactattttcctgtgcatcacacttaactcatctaactgcttccccggacaccctccacctctagttgttactaagtagctgcagtaggcattgctggggaagaaacaaacacacaccaaacagtactgctacttagtttctaaggctgcacagggaagggaaagactgggctttggacaatctagaggtaatttatatccgcccccaggtggagcaacatgcgattctggaggcacgggggtaactgaaagtgagtacatatagtctttctggtttctggagataacccatcaataaaagctgcttcctctggta

SEQ ID NO: 375278 - DNA, 299 bp, Homo sapiens
ttgtcgctctagcggatctcctcagacagcggacccctccacctctagttgttactaagtagctgcagtaggcattgctggggaagaaacaaacacacaccaaacagtactgctacttagtttctaaggctgcacagggaagggaaagactgggctttggacaatctagaggtaatttatatccgcccccaggtggagcaacatgcgattctggaggcacgggggtaactgaaagtgagtacatatagtctttctggtttctggagataacccatcaataaaagctgcttcctctggta

SEQ ID NO: 375279 - DNA, 893 bp, Homo sapiens
agagctttccaagtttgggaaggtgtccgggttttctgcgattacttctctgagcatgaacggaagtcaccctttgtgccttatgcggtgattttaatgataggtgtcatatataggacggagtaatctgtttacattctgttcttctcgatgcactcacaagcgggtaactaggtgacaagaaaacaaagatcttattcaaaagaggtcttacagcaacccaacgtctcatcttcccatagtaaagatgacggcgccttgaggtaagctacaggcaacaccacttccgcgtttctcttgcgccctggtccaagatggcggatgaagccacgcgacgtgttgtgtctgagatcccggtgctgaagactaacgccggaccccgagatcgtgagttgtgggtgcagcgactgaaggaggaatatcagtcccttatccggtatgtggagaacaacaagaatgctgacaacgattggttccgactggagtccaacaaggaaggaactcggtggtttggaaaatgctggtatatccatgacctcctgaaatatgagtttgacatcgagtttgacattcctatcacatatcctactactgccccttgctccgtaaaagtatcaaatactttctccttggtatctcaaggaggtttctgagataggtagaagtcttgagacggaggctggccatccattcagccctgagcgtgctgagttctgtgtttctctgaatagaggtgtggaacctgaggggccagcaggcctctctgaaggcctccatggagcaaacggagccacctcgggaaagagtttaatggaatatttttgtacccgatgtttacagatgctgttgggaagttatcaataaaaagacaccattactaaaaagggaaaagt

SEQ ID NO: 375280 - DNA, 455 bp, Homo sapiens
agagctttccaagtttgggaaggtgtccgggttttctgcgattacttctctgagcatgaacggaagtcaccctttgtgccttatgcggtgattttaatgataggtgtcatatataggacggagtaatctgtttacattctgttcttctcgatgcactcacaagcgggtaactaggtgacaagaaaacaaagatcttattcaaaagaggtcttacagcaacccaacgtctcatcttcccatagtaaagatgacggcgccttgaggtaagctacaggcaacaccacttccgcgtttctcttgcgccctggtccaagatggcggatgaagccacgcgacgtgttgtgtctgagatcccggtgctgaagactaacgccggaccccgagatcgtgagttgtgggtgcagcgactcagggacttgctttggagtcatggattaaagacctctctgggcagc

SEQ ID NO: 375281 - DNA, 1269 bp, Homo sapiens
ccaaaatggccggcgcgggctgacgcctgtaatcccagcaccttgggaggctgaggcaggtggatcacctgaggtcaggagttcaagaccaacctggcaacatggcgaaacccggtctctactaaaaatacaaaatcagccgggcgtggtagacatgcctgtaatcccagctactcaggacgctgaggcaggagaatcaattgaacccgggaggcggaggttgcggagttaaacatccttctacaggataactgcatctagaggcaggactatatataagcaaaggaaaagttcttcgaagaggaaacacgaatcgctcgttttaggaataaagatgacggcgccttgaggtaagctacaggcaacaccacttccgcgtttctcttgcgccctggtccaagatggcggatgaagccacgcgacgtgttgtgtctgagatcccggtgctgaagactaacgccggaccccgagatcgtgagttgtgggtgcagcgactgaaggaggaatatcagtcccttatccggtatgtggagaacaacaagaatgctgacaacgattggttccgactggagtccaacaaggaaggaactcggtggtttggaaaatgctggtatatccatgacctcctgaaatatgagtttgacatcgagtttgacattcctatcacatatcctactactgccccagaaattgcagttcctgagctggatggaaagacagcaaagatgtacaggggtggcaaaatatgcctgacggatcatttcaaacctttgtgggccaggaatgtgcccaaatttggactagctcatctcatggctctggggctgggtccatggctggcagtggaaatccctgatctgattcagaagggcgtcatccaacacaaagagaaatgcaaccaatgaagaatcaagccactgaggcagggcagagggacctttgataggctacgatactattttcctgtgcatcacacttaactcatctaactgcttccccggacaccctccacctctagttgttactaagtagctgcagtaggcattgctggggaagaaacaaacacacaccaaacagtactgctacttagtttctaaggctgcacagggaagggaaagactgggctttggacaatctagaggtaatttatatccgcccccaggtggagcaacatgcgattctggaggcacgggggtaactgaaagtgagtacatatagtctttctggtttctggagataacccatcaataaaagctgcttcctctggta

SEQ ID NO: 375282 - DNA, 1365 bp, Homo sapiens
agagctttccaagtttgggaaggtgtccgggttttctgcgattacttctctgagcatgaacggaagtcaccctttgtgccttatgcggtgattttaatgataggtgtcatatataggacggagtaatctgtttacattctgttcttctcgatgcactcacaagcgggtaactaggtgacaagaaaacaaagatcttattcaaaagaggtcttacagcaacccaacgtctcatcttcccatagtaaagatgacggcgccttgaggtaagctacaggcaacaccacttccgcgtttctcttgcgccctggtccaagatggcggatgaagccacgcgacgtgttgtgtctgagatcccggtgctgaagactaacgccggaccccgagatcgtgagttgtgggtgcagcgactgaaggaggaatatcagtcccttatccggtatgtggagaacaacaagaatgctgacaacgattggttccgactggagtccaacaaggaaggaactcggtggtttggaaaatgctggtatatccatgacctcctgaaatatgagtttgacatcgagtttgacattcctatcacatatcctactactgccccagaaattgcagttcctgagctggatggaaagacagcaaagatgtacaggggtggcaaaatatgcctgacggatcatttcaaacctttgtgggccaggaatgtgcccaaatttggactagctcatctcatggctctggggctgggtccatggctggcagtggaaatccctgatctgattcagaagggcgtcatccaacacaaagagaaatgcaaccaatgaagaatcaagccactgaggcagggcagagggacctttgataggctacgatactattttcctgtgcatcacacttaactcatctaactgcttccccggacaccctccacctctagttgttactaagtagctgcagtaggcattgctggggaagaaacaaacacacaccaaacagtactgctacttagtttctaaggctgcacagggaagggaaagactgggctttggacaatctagaggtaatttatatccgcccccaggtggagcaacatgcgattctggaggcacgggggtaactgaaagtgagtacatatagtctttctggtttctggagataacccatcaataaaagctgcttcctctggtaggtccctggtgaaaaaacaaaaaaagtaaaagaataacaaagtatacaaaaaaaaaaggggggctatattcggggcagaaccatttttaagacattatatataaagacggcagacgaaagtattagacttggggacacacacataatgttctgttgatagaaaaagtagatgacgggaggaag

SEQ ID NO: 375283 - DNA, 1500 bp, Homo sapiens
  misc_feature (1184)..(1185): n is a, c, g, or t
agagctttccaagtttgggaaggtgtccgggttttctgcgattacttctctgagcatgaacggaagtcaccctttgtgccttatgcggtgattttaatgataggtgtcatatataggacggagtaatctgtttacattctgttcttctcgatgcactcacaagcgggtaactaggtgacaagaaaacaaagatcttattcaaaagaggtcttacagcaacccaacgtctcatcttcccatagtaaagatgacggcgccttgaggtaagctacaggcaacaccacttccgcgtttctcttgcgccctggtccaagatggcggatgaagccacgcgacgtgttgtgtctgagatcccggtgctgaagactaacgccggaccccgagatcgtgagttgtgggtgcagcgactgaaggaggaatatcagtcccttatccggtatgtggagaacaacaagaatgctgacaacgattggttccgactggagtccaacaaggaaggaactcggtggtttggaaaatgctggtatatccatgacctcctgaaatatgagtttgacatcgagtttgacattcctatcacatatcctactactgccccagaaattgcagttcctgagctggatggaaagacagcaaagatgtacaggggtggcaaaatatgcctgacggatcatttcaaacctttgtgggccaggaatgtgcccaaatttggactagctcatctcatggctctggggctgggtccatggctggcagtggaaatccctgatctgattcagaagggcgtcatccaacacaaagagaaatgcaaccaatgaagaatcaagccactgaggcagggcagagggacctttgataggctacgatactattttcctgtgcatcacacttaactcatctaactgcttccccggacaccctccacctctagttgttactaagtagctgcagtaggcattgctggggaagaaacaaacacacaccaaacagtactgctacttagtttctaaggctgcacagggaagggaaagactgggctttggacaatctagaggtaatttatatccgcccccaggtggagcaacatgcgattctggaggcacgggggtaactgaaagtgagtacatatagtctttctggtttctggagataacccatcaataaaagctgcttcctctggtaannaaaaaaaaaaaaaaaaaaaaaaaaaaaaaattaattatttataaataaaaaaaaaaaaaaaaaaaaaaaaaaaaaaaataaaaaaaaaaaaaataaaaaaaaaaaaataaaaaacaaatttataaaaaaaaaaaaaaatttatgtctcctttcgcaccaactttttcataattaacaatatcttcttcttcgcccgcaatcttctctaattgccaaaattcttcttaatccggggctaataaaatatcttgtgcgcgtcattataacccctttaaccttgaaaaacctcggtttttcaacctttaattcctttgt

SEQ ID NO: 375284 - DNA, 1121 bp, Homo sapiens
agagctttccaagtttgggaaggtgtccgggttttctgcgattacttctctgagcatgaacggaagtcaccctttgtgccttatgcggtgattttaatgataggtgtcatatataggacggagtaatctgtttacattctgttcttctcgatgcactcacaagcgggtaactaggtgacaagaaaacaaagatcttattcaaaagaggtcttacagcaacccaacgtctcatcttcccatagtaaagatgacggcgccttgaggtaagctacaggcaacaccacttccgcgtttctcttgcgccctggtccaagatggcggatgaagccacgcgacgtgttgtgtctgagatcccggtgctgaagactaacgccggaccccgagatcgtgagttgtgggtgcagcgactgaaggaggaatatcagtcccttatccggtatgtggagaacaacaagaatgctgacaacgattggttccgactggagtccaacaaggaaggaactcggtggtttggaaaatgctggtatatccatgacctcctgaaatatgagtttgacatcgagtttgacattcctatcacatatcctactactgccccagaaattgcagttcctgagctggatggaaagacagcaaagatgtacagtttggactagctcatctcatggctctggggctgggtccatggctggcagtggaaatccctgatctgattcagaagggcgtcatccaacacaaagagaaatgcaaccaatgaagaatcaagccactgaggcagggcagagggacctttgataggctacgatactattttcctgtgcatcacacttaactcatctaactgcttccccggacaccctccacctctagttgttactaagtagctgcagtaggcattgctggggaagaaacaaacacacaccaaacagtactgctacttagtttctaaggctgcacagggaagggaaagactgggctttggacaatctagaggtaatttatatccgcccccaggtggagcaacatgcgattctggaggcacgggggtaactgaaagtgagtacatatagtctttctggtttctggagataacccatcaataaaagctgcttcctctggta

SEQ ID NO: 375285 - DNA, 1755 bp, Homo sapiens
agagctttccaagtttgggaaggtgtccgggttttctgcgattacttctctgagcatgaacggaagtcaccctttgtgccttatgcggtgattttaatgataggtgtcatatataggacggagtaatctgtttacattctgttcttctcgatgcactcacaagcgggtaactaggtgacaagaaaacaaagatcttattcaaaagaggtcttacagcaacccaacgtctcatcttcccatagtaaagatgacggcgccttgaggtaagctacaggcaacaccacttccgcgtttctcttgcgccctggtccaagatggcggatgaagccacgcgacgtgttgtgtctgagatcccggtgctgaagactaacgccggaccccgagatcgtgagttgtgggtgcagcgactgaaggaggaatatcagtcccttatccggtatgtggagaacaacaagaatgctgacaacgattggttccgactggagtccaacaaggaaggaactcggtggtttggaaaatgctggtatatccatgacctcctgaaatatgagtttgacatcgagtttgacattcctatcacatatcctactactgccccagaaattgcagttcctgagctggatggaaagacagcaaagatgtacaggtaggactgaataggagatggcaaagagtcaaagaaagccttaaggaagaacttcgtggcgggagggagagcatcaggaagaatagctaatggatgcttggcttgatgtctgggtgatgggatgatctatgtgtaaatcaccatggcacgtttacctatgtaacaaacctatacatcctgcatgtgtacctctgaacttaaaagatgtaaggaaaaaaaaaaaaaggaagaactttggaggcagagattttcccagggtctgctggcctagtggggtgccaggccctcctttgctgagcctaagcaaagtacttagctgaacttgttctcaattctgatcactagtagtcttcctatgcccccaagaggctgctgtgctttatggtaaactttgcatgtcaacaccttcttcatgtccctctcataggggtggcaaaatatgcctgacggatcatttcaaacctttgtgggccaggaatgtgcccaaatttggactagctcatctcatggctctgggggtaagttttgtgtatttggcataaaaggagaaagagggacttaggccctgagcagtacaagaaaagcagctaagaatgaaggagcttctaatggaacaagaagcattgactggtagtaatctcacaggattttccttgtattgcagctgggtccatggctggcagtggaaatccctgatctgattcagaagggcgtcatccaacacaaagagaaatgcaaccaatgaagaatcaagccactgaggcagggcagagggacctttgataggctacgatactattttcctgtgcatcacacttaactcatctaactgcttccccggacaccctccacctctagttgttactaagtagctgcagtaggcattgctggggaagaaacaaacacacaccaaacagtactgctacttagtttctaaggctgcacagggaagggaaagactgggctttggacaatctagaggtaatttatatccgcccccaggtggagcaacatgcgattctggaggcacgggggtaactgaaagtgagtacatatagtctttctggtttctggagataacccatcaataaaagctgcttcctctggta

SEQ ID NO: 375286 - DNA, 650 bp, Homo sapiens
  misc_feature (612)..(613): n is a, c, g, or t
agagctttccaagtttgggaaggtgtccgggttttctgcgattacttctctgagcatgaacggaagtcaccctttgtgccttatgcggtgattttaatgataggtgtcatatataggacggagtaatctgtttacattctgttcttctcgatgcactcacaagcgggtaactaggtgacaagaaaacaaagatcttattcaaaagaggtcttacagcaacccaacgtctcatcttcccatagtaaagatgacggcgccttgaggtaagctacaggcaacaccacttccgcgtttctcttgcgccctggtccaagatggcggatgaagccacgcgacgtgttgtgtctgagatcccggtgctgaagactaacgccggaccccgagatcgtgagttgtgggtgcagcgactgaaggaggaatatcagtcccttatccggtatgtggagaacaacaagaatgctgacaacgattggttccgactggagtccaacaaggaaggaactcggtggtttggaaaatgctggtatatccatgacctcctgaaatatgagtttgacatcgagtttgactgcttcctgcttggtgtgccagccacattccaagtccctgccnntacccagaatgacgcaccggcagcggcaaagatcgtt

SEQ ID NO: 375287 - DNA, 712 bp, Homo sapiens
agagctttccaagtttgggaaggtgtccgggttttctgcgattacttctctgagcatgaacggaagtcaccctttgtgccttatgcggtgattttaatgataggtgtcatatataggacggagtaatctgtttacattctgttcttctcgatgcactcacaagcgggtaactaggtgacaagaaaacaaagatcttattcaaaagaggtcttacagcaacccaacgtctcatcttcccatagtaaagatgacggcgccttgaggtaagctacaggcaacaccacttccgcgtttctcttgcgccctggtccaagatggcggatgaagccacgcgacgtgttgtgtctgagatcccggtgctgaagactaacgccggaccccgagatcgtgagttgtgggtgcagcgactgaaggaggaatatcagtcccttatccggtatgtggagaacaacaagaatgctgacaacgattggttccgactggagtccaacaaggaaggaactcggtggtttggaaaatgctggtatatccatgacctcctgaaatatgagtttgacatcgagtttgacgtgagtgtgatagagtgggaaatatgaaggttagtagaaggggagggattagatgatgggtaacaagctatcctttcttgaagggaccaaagaaaactttaaaaatgggagagaaaagctgaggtttgaggcaagcataagtt

SEQ ID NO: 375288 - DNA, 1682 bp, Homo sapiens
tgcccaggctggagtgcagtggcacaatcttggctcactacaacctccaccacccaggttcaagtgattctcctgcctcagcctcctgagtagctgggattacaggcttgcacctctacgcctgactaatttttgtattattagtagagacagggtttcaccatgttggccaggctggtctcaaactcatgacctcaggttatccgcccgcctcggccccccaaagtgctgggattacagacatgagccaccatgcccagcctctactagctgattttaaatcagagtaagataagtgatgcttatttatatgtaccttttctccaattccttctcactaacactgagaggaacagagaattgtcagaatagtaactattgtgataatggtatgcagcactcattcagcacttactgttacctggcactgtgtcagggactagacattattttatttatccttctagtatttcccccattttcagaagggaaccagaggcttaagattacacagctagtaggcaatagagctggaattgagcccctatctgactctagctagtgcccttaattactattgtaaatggctaggaatcgtatttgtgaggatttggtaggtttggaaaaggactttcttaatcctgatattcagaattgtcctaaaacttacataaaagcctaacctagcttttactgtattgttaggcttcagggatactatgtgacctgaaatatatacacatttttaacaagtggtccatgttttaacaggtttggccagcccttcttacaagcttcctttgtgccaaattttcattgttttttgaaatcaccaaaccatgttactaatgttgtgttttggtttgttttacagtgatccttttctgtatggctgccctaatatttccaataggattttacatcaatgaagtcggaggtcaaccttataaattacccaacaacacagtagttgggtcatcatatgtactttttgtcttatcaattttctttacaatagtaggacttctatttgctggcaaagtttgtttaccaggctgatgaatgtctaaattgcttgactcttattattttttattttattttatttttttatttttggagggtggagaggacaaaggcgaggcatctgagcaggcctctcatgggaagatgctcagatgaaactgatgctgagaaggaaaaaaaaatgctttggtttgttctcactatgcactttggatttaaaaaaaaaaaaaaaaaggagagccttttccataaccaaatacagacaatattgactaaatctcctgagcatattcaggcagtcaggtctgcactgtgatagcaacctagagaaggagaatgctttataccgaaaagcatgtggccctttgtgactctgttattccgtttttaatgtctaatgattcattagaggaaaaaaaaaagtctaagtatttatgtgtcatggtggaccagagggatgcaagagaagttcatgtggggctggcctcacctcctaagaaattagtgttcacaacttccttgtaatagtatgagcctttggcaccagaatggattgccgttgcattactgcaccaagaagccaatagatcaaaacttgtttgctaaaatgtatgtaaaaattctgaaattccctctctctgtgtacaaaaaaaaaa

SEQ ID NO: 375289 - DNA, 735 bp, Homo sapiens
cgcggggactccgggccccggcggcggcccatggggcgggaggcgtgaggccgctgcctgtccggggctcggggggtggggggagcggggcggggagatggataaactgaccatcatctcaggatgtctctttctggccgccgatatcttcgccatcgccagcatcgccaacccggactggatcaacaccggggagtctgcggtctcaccttaatccagctcagttctgtgtacaaaccatggaggttattcattcaggtgaaataaatgggttacttctgccagattaatctgggaagaaacacactcactgtgggcctcgtgcgacagtgtcaaacaatccatggacgagaccggacgtgcatccctccccggcttcccccggagtgggtcaccacactgttttttatcatcatgggaatcatttcattgactgtcacatgtggtttgctggtggcttcccactggcgaagagaagctacaaaatatgctcgatggatagcattcactggaaagtgtgtgcattcttctcatacctaagaatatcactgtaaaatctgctgaaaactatttttaggttttatttgcacaagactgaattagtttgacatttttggaagctcctattgaacatacccaaacatctgtaaacatgaaaaatcttcaatttattaaaagcaaacatttcagtatgattctttccaaagtttgctgctgattcttccttgtgtggcc

SEQ ID NO: 375290 - DNA, 1397 bp, Homo sapiens
cgcggggactccgggccccggcggcggcccatggggcgggaggcgtgaggccgctgcctgtccggggctcggggggtggggggagcggggcggggagatggataaactgaccatcatctcaggatgtctctttctggccgccgatatcttcgccatcgccagcatcgccaacccggactggatcaacaccggggagtctgcggcactcactgtgggcctcgtgcgacagtgtcaaacaatccatggacgagaccggacgtgcatccctccccggcttcccccggagtgggtcaccacactgttttttatcatcatgggaatcatttcattgactgtcacatgtggtttgctggtggcttcccactggcgaagagaagctacaaaatatgctcgatggatagcattcactggaaagtgtgtgcattcttctcatacctaagaatatcactgtaaaatctgctgaaaactatttttaggttttatttgcacaagactgaattagtttgacatttttggaagctcctattgaacatacccaaacatctgtaaacatgaaaaatcttcaatttattaaaagcaaacatttcagtatgattctttccaaaggtaatccatgttctatgttgttaatgtgtgtatgtaatttttctgactcttccacctcttataaacctattttctgtttcatttgttttgtttttgaaggatggctcttttttctttttaatgttctagatgaccaaaacactattggtttttacccttttgcctaaagctttgatatccccacttgatgttctgtgaattcactgtttaatctattaagtgaaataataaatagtcctggtgacaaacaatctgttgatttagaggaaaggccctgaaaaatacagtattggaaactaactttgcatatgctgttagctattattttgcatcatgggcttcatgggaagaacatgttgcatttattttgtctttattaaaagactactagccacaagttactctgattatagtaactgttttatcaacccacttcatctttaaaaaattaaatttacattcacaattcaaaacagtaagctgtctttcagaaaatttttgaaggataaaaacatgaaggaaaaaagtggcccgtgtaggtaggattccctacacaggacttttagttgtatcacctcaagagattttgaagtttgtgatcaaggtctgtatattatcccaaactttattaagaattgttttctaattggttataacatttttcaattaatagtttcaaaacaaattgttaatacaactgtataaaatgaacataattttcctcacttgtatttttgttattgagcaagtttatcaaaataaattgtctactaaagaaactaaaaaaaaaa

SEQ ID NO: 375291 - DNA, 259 bp, Homo sapiens
aaaaacaccaagactagaggactctgggttccttttatgcaaagtcaactcttctgggtcacagttacccagcaacaaaaataaaggtagttatttataaatggtattaaagatagaaagcacaatgtatattttttaagagttttggttcttttcccaggagaagaaaacactgtgggttggtattttcaagcacattcaagggttttacaaatcagccccagttccagtcacacacaatctaagaccacccaagata

SEQ ID NO: 375292 - DNA, 1007 bp, Homo sapiens
cgcggggactccgggccccggcggcggcccatggggcgggaggcgtgaggccgctgcctgtccggggctcggggggtggggggagcggggcggggagatggataaactgaccatcatctcaggatgtctctttctggccgccgatatcttcgccatcgccagcatcgccaacccggactggatcaacaccggggagtctgcggcactcactgtgggcctcgtgcgacagtgtcaaacaatccatggacgagaccggacgtgcatccctccccggcttcccccggagtgggtcaccacactgttttttatcatcatgggaatcatttcattgactgtcacatgtggtttgctggtggcttcccactggcgaagagaagctacaaaatatgctcgatggatagcattcactggaaccactatgagaagattataggaaaaacaccaagactagaggactctgggttccttttatgcaaagtcaactcttctgggtcacagttacccagcaacaaaaataaagaatttccccatggactccagatcctttactactgaactcacagggctgtaacactgttactgtacagagaggaccaggacgatgccagcaccccgtttatcctgagtgaactctccggaggcctcttcaagcttgtgggttctctgctgtcttgaagccatccatccatttgataggttttgcaaagacttggtcctgccaagatggttttaatcatttctgctaaaaggaatggactcgaggatttgatctcattttagatgcagttgtcctcacttggccattttacagcactttagtaaatatggccagtgtatttggtcactattaaatcaatccccattcattatctgtcagggcaactcagtgaactaaatactatgttctgacctctggcactctttctcatgttgtttaaatatttaatattgtctaaggcaattcaagtattttcttaaataaaaaatatgaaaactcaaaaaaacca

SEQ ID NO: 375293 - DNA, 1221 bp, Homo sapiens
cgcggggactccgggccccggcggcggcccatggggcgggaggcgtgaggccgctgcctgtccggggctcggggggtggggggagcggggcggggagatggataaactgaccatcatctcaggatgtctctttctggccgccgatatcttcgccatcgccagcatcgccaacccggactggatcaacaccggggagtctgcggcactcactgtgggcctcgtgcgacagtgtcaaacaatccatggacgagaccggacgtgcatccctccccggcttcccccggagtgggtcaccacactgttttttatcatcatgggaatcatttcattgactgtcacatgtggtttgctggtggcttcccactggcgaagagaagctacaaaatatgctcgatggatagcattcactggaatgatccttttctgtatggctgccctaatatttccaataggattttacatcaatgaagtcggaggtcaaccttataaattacccaacaacacagtagttgggtcatcatatgtactttttgtcttatcaattttctttacaatagtaggacttctatttgctggcaaagtttgtttaccaggctgatgaatgtctaaattgcttgactcttattattttttattttattttatttttttatttttggagggtggagaggacaaaggcgaggcatctgagcaggcctctcatgggaagatgctcagatgaaactgatgctgagaaggaaaaaaaaatgctttggtttgttctcactatgcactttggatttaaaaaaaaaaaaaaaaaggagagccttttccataaccaaatacagacaatattgactaaatctcctgagcatattcaggcagtcaggtctgcactgtgatagcaacctagagaaggagaatgctttataccgaaaagcatgtggccctttgtgactctgttattccgtttttaatgtctaatgattcattagaggaaaaaaaaaagtctaagtatttatgtgtcatggtggaccagagggatgcaagagaagttcatgtggggctggcctcacctcctaagaaattagtgttcacaacttccttgtaatagtatgagcctttggcaccagaatggattgccgttgcattactgcaccaagaagccaatagatcaaaacttgtttgctaaaatgtatgtaaaaattctgaaattccctctctctgtgtacaaaaaaaaaa

SEQ ID NO: 375294 - DNA, 654 bp, Homo sapiens
gcctggagcccgaccgtggttagactgacgggatctgggatcatgcaggagctgtgagctcagggcgctcctccagcggtggaggaatacagtgaccatcataaggtgtcacctattactgcgtccggcacggtgctaaggcatcgcatgccagatctcagtctttgtagctctaggagagctgctgcccaaagggagcaaggaggaacagcgggattacgtcttctacctggccgtggggaactaccggctcaaggaatacgagaaggccttaaagtacgtccgcgggttgctgcagacagagccccagaacaaccaggccaaggaactggagcggctcattgacaaggccatgaagaaagatggactcgtgggcatggccatcgtgggaggcatggccctgggtgtggcgggactggccggactcatcggacttgctgtgtccaagtccaaatcctgaaggagacgcgggagcccacggagaacgctccaggagggcctgtccatcctcgctgtcctttccctgttctccccctgccccccgtctctatcctctgtggccttcagctaatttctgctcccctgagattcgtccttcagccccatcatgtgctttgggatgagtgtaaataaaacggggctgtggcttgggaa

SEQ ID NO: 375295 - DNA, 548 bp, Homo sapiens
tgttaaagtacgcctggaactggttcagaaaccaaaaccattacaacccttgaaggaatcgaagtgctcaagaagctgctgcccaaagggagcaaggaggaacagcgggattacgtcttctacctggccgtggggaactaccggctcaaggaatacgagaaggccttaaagtacgtccgcgggttgctgcagacagagccccagaacaaccaggccaaggaactggagcggctcattgacaaggccatgaagaaagatggactcgtgggcatggccatcgtgggaggcatggccctgggtgtggcgggactggccggactcatcggacttgctgtgtccaagtccaaatcctgaaggagacgcgggagcccacggagaacgctccaggagggcctgtccatcctcgctgtcctttccctgttctccccctgccccccgtctctatcctctgtggccttcagctaatttctgctcccctgagattcgtccttcagccccatcatgtgctttgggatgagtgtaaataaaacggggctgtggcttgggaa

SEQ ID NO: 375296 - DNA, 772 bp, Homo sapiens
gcatccgccggacgccggaagtggttctccgcccctgccactgggccatggagactgtggcacagtagactgtagtgtgaggctcgcgggggcagtggccatggaggccgtgctgaacgagctggtgtctgtggaggacctgctgagctgctgcccaaagggagcaaggaggaacagcgggattacgtcttctacctggccgtggggaactaccggctcaaggaatacgagaaggccttaaagtacgtccgcgggttgctgcagacagagccccagaacaaccaggccaaggaactggagcggctcattgacaaggccatgaagaaagatggactcgtgggcatggccatcgtgggaggcatggccctgggtgtggcgggactggccggactcatcggacttgctgtgtccaagtccaaatcctgaaggagacgcgggagcccacggagaacgctccaggagggcctgtccatcctcgctgtcctttccctgttctccccctgccccccgtctctatcctctgtggccttcagctaatttctgctcccctgagattcgtccttcagccccatcatgtgctttgggatgagtgtaaataaaacggggctgtggcttgggaacccccgtgtctgcgttgaggggaggggtgggttctgaaccgctgggcacagggggcggagacgtcactcctggtcctctcctgcccctgccctccaggttggcacggggttctttgtccaccccgcagcccagagcccacacccttccttcc

SEQ ID NO: 375297 - DNA, 828 bp, Homo sapiens
gtcgcccggaggttctgagcgttctgttcggacctcctaccgttactctttcattcactcaagaaatgatttcttgagttcccggcctttgtcagagagatgaacgaggcacggtccgtgtccagctaaaggacagtaggactggaagagcgttgttttccaaggtacaggatgccgcgcctcctaggagccgaagggacgggaggccgcgtagaggaggggaccgtccccgagcctcgccgagcctgcggtgtagacacctctggtgtctagtggttgaggatctgttgaccgggcatggtgggtagaaggaacgctccgagcagaagaaaagtggctgtcgtgaagacatctgcgtgtgcggggtgcgtgggtgcctggagatgaagctggaaagagctgctgcccaaagggagcaaggaggaacagcgggattacgtcttctacctggccgtggggaactaccggctcaaggaatacgagaaggccttaaagtacgtccgcgggttgctgcagacagagccccagaacaaccaggccaaggaactggagcggctcattgacaaggccatgaagaaagatggactcgtgggcatggccatcgtgggaggcatggccctgggtgtggcgggactggccggactcatcggacttgctgtgtccaagtccaaatcctgaaggactcgctgtcctttccctgttctccccctgccccccgtctctatcctctgtggccttcagctaatttctgctcccctgagattcgtccttcagccccatcatgtgctttgggatgagtgtaaataaaacggggctgtggcttgggaa

SEQ ID NO: 375298 - DNA, 1005 bp, Homo sapiens
gtcgcccggaggttctgagcgttctgttcggacctcctaccgttactctttcattcactcaagaaatgatttcttgagttcccggcctttgtcagagagatgaacgaggcacggtccgtgtccagctaaaggacagtaggactggaagagcgttgttttccaaggtacaggatgccgcgcctcctaggagccgaagggacgggaggccgcgtagaggaggggaccgtccccgagcctcgccgagcctgcggtgtagacacctctggtgtctagtggttgaggatctgttgaccgggcatggtgggtagaaggaacgctccgagcagaagaaaagtggctgtcgtgaagacatctgcgtgtgcggggtgcgtgggtgcctggagatgaagctggaaagaagtttgaaaagaaatttcagtctgagaaggcagcaggctcggtgtccaagagcacgcagtttgagtacgcctggtgcctggtgcggagcaagtacaatgatgacatccgtaaaggcatcgtgctgctcgaggagctgctgcccaaagggagcaaggaggaacagcgggattacgtcttctacctggccgtggggaactaccggctcaaggaatacgagaaggccttaaagtacgtccgcgggttgctgcagacagagccccagaacaaccaggccaaggaactggagcggctcattgacaaggccatgaagaaagatggactcgtgggcatggccatcgtgggaggcatggccctgggtgtggcgggactggccggactcatcggacttgctgtgtccaagtccaaatcctgaaggagacgcgggagcccacggagaacgctccaggagggcctgtccatcctcgctgtcctttccctgttctccccctgccccccgtctctatcctctgtggccttcagctaatttctgctcccctgagattcgtccttcagccccatcatgtgctttgggatgagtgtaaataaaacggggctgtggcttgggaa

SEQ ID NO: 375299 - DNA, 617 bp, Homo sapiens
gcatccgccggacgccggaagtggttctccgcccctgccactgggccatggagactgtggcacagtagactgtagtgtgaggctcgcgggggcagtggccatggaggccgtgctgaacgagctggtgtctgtggaggacctgctgaagtttgaaaagaaatttcagtctgagaaggcagcaggctcggtgtccaagagcacgcagtttgagtacgcctggtgcctggtgcggagcaagtacaatgatgacatccgtaaaggcatcgtgctgctcgaggagctgctgcccaaagggagcaaggaggaacagcgggattacgtcttctacctggccgtggggaactaccggctcaaggaatacgagaaggccttaaagtacgtccgcgggttgctgcagacagagccccagaacaaccaggccaaggaactggagcggctcattgacaaggccatgaagaaagatggactcgtgggcatggccatcgtgggaggcatggccctgggtgtggcgggactggccggactcatcggacttgctgtgtccaagtccaaatcctgaaggacgcaactggtacggcgggcgcatctggtacggcgggcgcaactggtacgtcggg

SEQ ID NO: 375300 - DNA, 492 bp, Homo sapiens
gcatccgccggacgccggaagtggttctccgcccctgccactgggccatggagactgtggcacagtagactgtagtgtgaggctcgcgggggcagtggccatggaggccgtgctgaacgagctggtgtctgtggaggacctgctgaagtttgaaaagaaatttcagtctgagaaggcagcaggctcggtgtccaagagcacgcagtttgagtacgcctggtgcctggtgcggagcaagtacaatgatgacatccgtaaaggcatcgtgctgctcgaggagctgctgcccaaagggagcaaggaggaacagcgggattacgtcttctacctggccgtggggaactaccggctcaaggaatacgagaaggccttaaagtacgtccgcgggttgctgcagacagagccccagaacaaccaggccaaggaactggagcggctcattgacaaggccatgaagaaagatgacagcctcggcccctttgttcagccccg

SEQ ID NO: 375301 - DNA, 581 bp, Homo sapiens
ctcctccagcggtggaggaatacagtgaccatcataaggtgtcacctattactgcgtccggcacggtgctaaggcatcgcatgccagatctcagtctttgtagctctaggaggtaggcactacttctattcctggacaataaaaggtccaggcccggcagggtggggcaggatggggccagcagcctcaaatgaggaccgcgtgggctgttgagcagttctgacagcgtgtttactgttcggccgccggggtcagctgctccgggagcggtgcctggagctgccaccaggtggcatctccgctcggtaccgccgcggggaggggagaccgggggcctctgtcccaagagctggcccgcaggcccggaggagccgaaagcctgggtcccgggcatggagatagcagaagctggggtgccagataccgagacctgcgagggaaaggggcagagccagggagatggcatgtccagatagagaatggttgacgccctacatttctaaatgattcctttcctcccctgtggcagaagtttgaaaagaaatttcagtctgagaaggcagcaggctcggtgtccaaga

SEQ ID NO: 375302 - DNA, 753 bp, Homo sapiens
gcatccgccggacgccggaagtggttctccgcccctgccactgggccatggagactgtggcacagtagactgtagtgtgaggctcgcgggggcagtggccatggaggccgtgctgaacgagctggtgtctgtggaggacctgctgaagtttgaaaagaaatttcagtctgagaaggcagcaggctcggtgtccaagagcacgcagtttgagtacgcctggtgcctggtgcggagcaagtacaatgatgacatccgtaaaggcatcgtgctgctcgaggagctgctgcccaaagggagcaaggaggaacagcgggattacgtcttctacctggccgtggggaactaccggctcaaggaatacgagaaggccttaaagtacgtccgcgggttgctgcagacagagccccagaacaaccaggccaaggaactggagcggctcattgacaaggccatgaagaaagatggactcgtgggcatggccatcgtgggaggcatggccctgggtgtggcgggactggccggactcatcggacttgctgtgtccaagtccaaatcctgaaggagacgcgggagcccacggagaacgctccaggagggcctgtccatcctcgctgtcctttccctgttctccccctgccccccgtctctatcctctgtggccttcagctaatttctgctcccctgagattcgtccttcagccccatcatgtgctttgggatgagtgtaaataaaacggggctgtggcttgggaa

SEQ ID NO: 375303 - DNA, 905 bp, Homo sapiens
gcatccgccggacgccggaagtggttctccgcccctgccactgggccatggagactgtggcacagtagactgtagtgtgaggctcgcgggggcagtggccatggaggccgtgctgaacgagctggtgtctgtggaggacctgctgaagtttgaaaagaaatttcagtctgagaaggcagcaggctcggtgtccaagagcacgcagtttgagtacgcctggtgcctggtgcggagcaagtacaatgatgacatccgtaaaggcatcgtgctgctcgaggagctgctgcccaaagggagcaaggaggaacagcgggattacgtcttctacctggccgtggggaactaccggctcaaggaatacgagaaggccttaaagtacgtccgcgggttgctgcagacagagccccagaacaaccaggccaaggaactggagcggctcattgacaaggccatgaagaaagatggactcgtgggcatggccatcgtgggaggcatggccctgggtgtggcgggactggccggactcatcggacttgctgtgtccaagtccaaatcctgaaggagacgcgggagcccacggagaacgctccaggagggcctgtccatcctcgctgtcctttccctgttctccccctgccccccgtctctatcctctgtggccttcagctaatttctgctcccctgagattcgtccttcagccccatcatgtgctttgggatgagtgtaaataaaacggggctgtggcttgggaacccccgtgtctgcgttgaggggaggggtgggttctgaaccgctgggcacagggggcggagacgtcactcctggtcctctcctgcccctgccctccaggttggcacggggttctttgtccaccccgcagcccagagcccacacccttccttcc

SEQ ID NO: 375304 - DNA, 1065 bp, Homo sapiens
gcatccgccggacgccggaagtggttctccgcccctgccactgggccatggagactgtggcacagtagactgtagtgtgaggctcgcgggggcagtggccatggaggccgtgctgaacgagctggtgtctgtggaggacctgctgaagtttgaaaagaaatttcagtctgagaaggcagcaggctcggtgtccaagagcacgcagtttgagtacgcctggtgcctggtgcggagcaagtacaatgatgacatccgtaaaggcatcgtgctgctcgaggagctgctgcccaaagggagcaaggaggaacagcgggattacgtcttctacctggccgtggggaactaccggctcaaggaatacgagaaggccttaaagtacgtccgcgggttgctgcagacagagccccagaacaaccaggccaaggaactggagcggctcattgacaaggccatgaagaaagatggactcgtgggcatggccatcgtgggaggcatggccctgggtgtggcgggactggccggactcatcggacttgctgtgtccaagtccaaatcctgaaggagacgcgggagcccacggagaacgctccaggagggcctgtccatcctcgctgtcctttccctgttctccccctgccccccgtctctatcctctgtggccttcagctaatttctgctcccctgagattcgtccttcagccccatcatgtgctttgggatgagtgtaaataaaacggggctgtggcttgggaaaaaaaaaaaaaaacacaaagagcgcgcgaccgcagaacaacacggcacgcacaagcaaccccgagggggggcccggacccatacggccaacaggggtcgtatgcacccacggacggggatacaactcacgagggaccaccgggggtgcccaacaacgactgaacacaccgcttgcagcgcgcgaaagccaacggaggctccaagggccccgaaggagcacgaggaaacgggaccgcagatggcaccccgcttacggcgaggacctaaccgcgggcggcatgagccaacgcgcccggcgggcgcacatggggc

SEQ ID NO: 375305 - DNA, 701 bp, Homo sapiens
gcatccgccggacgccggaagtggttctccgcccctgccactgggccatggagactgtggcacagtagactgtagtgtgaggctcgcgggggcagtggccatggaggccgtgctgaacgagctggtgtctgtggaggacctgctggcacgcagtttgagtacgcctggtgcctggtgcggagcaagtacaatgatgacatccgtaaaggcatcgtgctgctcgaggagctgctgcccaaagggagcaaggaggaacagcgggattacgtcttctacctggccgtggggaactaccggctcaaggaatacgagaaggccttaaagtacgtccgcgggttgctgcagacagagccccagaacaaccaggccaaggaactggagcggctcattgacaaggccatgaagaaagatggactcgtgggcatggccatcgtgggaggcatggccctgggtgtggcgggactggccggactcatcggacttgctgtgtccaagtccaaatcctgaaggagacgcgggagcccacggagaacgctccaggagggcctgtccatcctcgctgtcctttccctgttctccccctgccccccgtctctatcctctgtggccttcagctaatttctgctcccctgagattcgtccttcagccccatcatgtgctttgggatgagtgtaaataaaacggggctgtggcttgggaa

SEQ ID NO: 375306 - DNA, 682 bp, Homo sapiens
gcatccgccggacgccggaagtggttctccgcccctgccactgggccatggagactgtggcacagtagactgtagtgtgaggctcgcgggggcagtggccatggaggccgtgctgaacgagctggtgtctgtggaggacctgctggtgaggcctggcccggacagagggaaagggaaggtcggagggcgggtcctgaggagagtcagagctgctgcccaaagggagcaaggaggaacagcgggattacgtcttctacctggccgtggggaactaccggctcaaggaatacgagaaggccttaaagtacgtccgcgggttgctgcagacagagccccagaacaaccaggccaaggaactggagcggctcattgacaaggccatgaagaaagatggactcgtgggcatggccatcgtgggaggcatggccctgggtgtggcgggactggccggactcatcggacttgctgtgtccaagtccaaatcctgaaggagacgcgggagcccacggagaacgctccaggagggcctgtccatcctcgctgtcctttccctgttctccccctgccccccgtctctatcctctgtggccttcagctaatttctgctcccctgagattcgtccttcagccccatcatgtgctttgggatgagtgtaaataaaacggggctgtggcttgggaa

SEQ ID NO: 375307 - DNA, 620 bp, Homo sapiens
gcatccgccggacgccggaagtggttctccgcccctgccactgggccatggagactgtggcacagtagactgtagtgtgaggctcgcgggggcagtggccatggaggccgtgctgaacgagctggtgtctgtggaggacctgctgagctgctgcccaaagggagcaaggaggaacagcgggattacgtcttctacctggccgtggggaactaccggctcaaggaatacgagaaggccttaaagtacgtccgcgggttgctgcagacagagccccagaacaaccaggccaaggaactggagcggctcattgacaaggccatgaagaaagatggactcgtgggcatggccatcgtgggaggcatggccctgggtgtggcgggactggccggactcatcggacttgctgtgtccaagtccaaatcctgaaggagacgcgggagcccacggagaacgctccaggagggcctgtccatcctcgctgtcctttccctgttctccccctgccccccgtctctatcctctgtggccttcagctaatttctgctcccctgagattcgtccttcagccccatcatgtgctttgggatgagtgtaaataaaacggggctgtggcttgggaa

SEQ ID NO: 375308 - DNA, 1833 bp, Homo sapiens
ggccggagctccaagctggtttgaacaagccctgggcatgtttggcgggaagttggcttagctcggctacctgtggccccgcagttttgtagtccccgccttgtttctccccagaggcctctcaatcctccctccatgatcttcgcatagagcacagtaccccttcacacggaggacgcgatggctcccaagaaacgcccagaaacccagaagacctccgagattgtattacgccccaggaacaagaggagcaggagtcccctggagctggagcccgaggccaagaagctctgtgcgaagggctccggtcctagcagaagatgtgactcagactgcctctgggtggggctggctggcccacagatcctgccaccatgccgcagcatcgtcaggaccctccaccagcataagctgggcagagcttcctggccatctgtccagcaggggctccagcagtcctttttgcacactctggattcttaccggatattacaaaaggctgccccctttgacaggagggctacatccttggcgtggcacccaactcaccccagcaccgtggctgtgggttccaaagggggagatatcatgctctggaattttggcatcaaggacaaacccaccttcatcaaagggattggagctggagggagcatcactgggctgaagtttaaccctctcaataccaaccagttttacgcctcctcaatggagggaacaactaggctgcaagactttaaaggcaacattctacgagtttttgccagctcagacaccatcaacatctggttttgtagcctggatgtgtctgctagtagccgaatggtggtcacaggagacaacgtggggaacgtgatcctgctgaacatggacggcaaagagctttggaatctcagaatgcacaaaaagaaagtgacgcatgtggccctgaacccatgctgtgattggttcctggccacagcctccgtagatcaaacagtgaaaatttgggacctgcgccaggttagagggaaagccagcttcctctactcgctgccgcacaggcatcctgtcaacgcagcttgtttcagtcccgatggagcccggctcctgaccacggaccagaagagcgagatccgagtttactctgcttcccagtgggactgccccctgggcctgatcccgcaccctcaccgtcacttccagcacctcacacccatcaaggcagcctggcatcctcgctacaacctcattgttgtgggccgatacccagatcctaatttcaaaagttgtaccccttatgaattgaggacgatcgacgtgttcgatggaaactcagggaagatgatgtgtcagctctatgacccagaatcttctggcatcagttcgcttaatgaattcaatcccatgggggacacgctggcctctgcaatgggttaccacattctcatctggagccaggaggaagccaggacacggaagtgagagacactaaagaaggtgtgggccagacaaggccttggagcccacacatgggatcaagtcctgcaagcagaggtggcgatttgttaaagggccaaaagtatccaaggttagggttggagcaggggtgctgggacctggggcactgtgggactgggacacttttatgttaatgctctggacttgcctccagagactgctccagagttggtgacacagctgtcccaagggcccctctgtatctagcctggaaccaaggttatcttggaactaaatgacttttctcctctcagtgggtggtagcagagggatcaagcagttatttgatttgtgctcacttttgatatggccaataaaaccataccgactgag

SEQ ID NO: 375309 - DNA, 2225 bp, Homo sapiens
attaactgagcacttgctgctatttctagacatgaaatgtcaccttgctgaggcccagcccagcccagcatagcccgagggctggaaaaacgctttcatctctaaaactgagaaatcatcataattgtgctttcacttcccaggctccatgtgtcttggagccgtcaccccgaggctccctctttaggtcggagattggccttgcctgtcgaggcaagaggctgcagaggcggggacacacctgtgtcctccgggagaggccccctcctctccccagaccacagggggcctctctgcctccagccccaccttccccgggagaagctttccccaatccccaggtctctagatcattctgttctcgagtatcctgtggaggaggcaaaaatgcctggcgccccttctctccaagctcaattctctaagcccctcagggtcgggaagttggcttagctcggctacctgtggccccgcagttttgtagtccccgccttgtttctccccagaggcctctcaatcctccctccatgatcttcgcatagagcacagtaccccttcacacggaggacgcgatggctcccaagaaacgcccagaaacccagaagacctccgagattgtattacgccccaggaacaagaggagcaggagtcccctggagctggagcccgaggccaagaagctctgtgcgaagggctccggtcctagcagaagatgtgactcagactgcctctgggtggggctggctggcccacagatcctgccaccatgccgcagcatcgtcaggaccctccaccagcataagctgggcagagcttcctggccatctgtccagcaggggctccagcagtcctttttgcacactctggattcttaccggatattacaaaaggctgccccctttgacaggagggctacatccttggcgtggcacccaactcaccccagcaccgtggctgtgggttccaaagggggagatatcatgctctggaattttggcatcaaggacaaacccaccttcatcaaagggattggagctggagggagcatcactgggctgaagtttaaccctctcaataccaaccagttttacgcctcctcaatggagggaacaactaggctgcaagactttaaaggcaacattctacgagtttttgccagctcagacaccatcaacatctggttttgtagcctggatgtgtctgctagtagccgaatggtggtcacaggagacaacgtggggaacgtgatcctgctgaacatggacggcaaagagctttggaatctcagaatgcacaaaaagaaagtgacgcatgtggccctgaacccatgctgtgattggttcctggccacagcctccgtagatcaaacagtgaaaatttgggacctgcgccaggttagagggaaagccagcttcctctactcgctgccgcacaggcatcctgtcaacgcagcttgtttcagtcccgatggagcccggctcctgaccacggaccagaagagcgagatccgagtttactctgcttcccagtgggactgccccctgggcctgatcccgcaccctcaccgtcacttccagcacctcacacccatcaaggcagcctggcatcctcgctacaacctcattgttgtgggccgatacccagatcctaatttcaaaagttgtaccccttatgaattgaggacgatcgacgtgttcgatggaaactcagggaagatgatgtgtcagctctatgacccagaatcttctggcatcagttcgcttaatgaattcaatcccatgggggacacgctggcctctgcaatgggttaccacattctcatctggagccaggaggaagccaggacacggaagtgagagacactaaagaaggtgtgggccagacaaggccttggagcccacacatgggatcaagtcctgcaagcagaggtggcgatttgttaaagggccaaaagtatccaaggttagggttggagcaggggtgctgggacctggggcactgtgggactgggacacttttatgttaatgctctggacttgcctccagagactgctccagagttggtgacacagctgtcccaagggcccctctgtatctagcctggaaccaaggttatcttggaactaaatgacttttctcctctcagtgggtggtagcagagggatcaagcagttatttgatttgtgctcacttttgatatggccaataaaaccataccgactgag

SEQ ID NO: 375310 - DNA, 624 bp, Homo sapiens
ctgagtttccagaatttttttgttgttgttcacagcccagattcacctcttcctttccgctcctgtctagagaggagtgggagggagagtacccctgcaggagaaggcctgcaaggccaggaccacagagggcttgtggttccttcagctcaggggcttttcactttgccagcttgtttcagtcccgatggagcccggctcctgaccacggaccagaagagcgagatccgagtttactctgcttcccagtgggactgccccctgggcctgatcccgcaccctcaccgtcacttccagcacctcacacccatcaaggtgagtggcggtgggaaggagctcgcagaaggaggctgtgatcatgaggccggagcaggtctgcccacagtggggaagggctgatgtggtaagcctgccaccccagatcgctcctggcccgagcacagagcatctcttacccattggctctctctcttccttttatcccacttctgccatcccatatggttgagttttctgtctcgctgataagatatttttctgagttttttcagcccagctctgatctcactgtgagaattttctaagatcctgaccctctgttctgtcttctcagcttcagttacc

SEQ ID NO: 375311 - DNA, 582 bp, Homo sapiens
ggccggagctccaagctggtttgaacaagccctgggcatgtttggcgggaagttggcttagctcggctacctgtggccccgcagttttgtagtccccgccttgtttctccccagaggcctctcaatcctccctccatgatcttcgcatagagcacagtaccccttcacacggaggacgcgatggctcccaagaaacgcccagaaacccagaagacctccgagattgtattacgccccaggaacaagaggagcaggagtcccctggagctggagcccgaggccaagaagctctgtgcgaagggctccggtactgcctgtgcctgctgcttgaatatttccgccttttagggtgctcgcgcaggaggctgcagcgggggatgggtgctccgaggctcccgaggcccgcgcaggtcacgggtgcctccggctgtgcattctacctgcaggtcctttgacaccagagtgtttaggtttcaacacctctcccgctaggtaacaggaagcagatgagctccgtaacaacagacacacggacttgtcagattccttgttcgtatcagggttcttgcacagttaggacgg

SEQ ID NO: 375312 - DNA, 400 bp, Homo sapiens
agagagaaagaccctatttcaaaggtggccccaagcgctgctcgaggggtgcttctgtgacggcgcagcatgtgtgcccaggcctggttcctcacggccaggcccatcatcactcactggctttttccttcctcgtgttagattggagctggagggagcatcactgggctgaagtttaaccctctcaataccaaccagttttacgcctcctcaatggagggaacaactaggctgcaagactttaaaggcaacattctacgagtttttgccagctcagacaccatcaagtgagtagtttaactagcaggggaaagggcttctaagcttaggtgtagttccggcaagagcatccagatcccatttccttaacccaacctggcccagggaagaaaggaaagat

SEQ ID NO: 375313 - DNA, 511 bp, Homo sapiens
cccctcctatcatgcacatcataatcatatttaaagcgagcagaagaaaaattacatagtacaggaacataaggatagtagcagacttctcatcaggatgtctcgttttgttttgtttttacttgagacaggatcttgctctgtcacccaggtttgcctagctcactgaagccttgtccccctgggctcaagcgattctcccacctcagcctcctgagtagctggcactacatgcacaggccaccatacctggctaattttaaaattttgttatagagacagaggtctcactgtgttgcacaggctggtttcaaactcctggcctcaagctatcctcctgccttagcctcccaaagtgccgggattataggcgtgagcccctgcacccagccacattgtactgatatgatacagtttattcatttacctgttcaaggacatttgaatttttttctagtttttgaatgcaacatataaagcgactgtgaacattcacgtacaagtatttgtg

SEQ ID NO: 375314 - DNA, 2051 bp, Homo sapiens
ggccggagctccaagctggtttgaacaagccctgggcatgtttggcgggaagttggcttagctcggctacctgtggccccgcagttttgtagtccccgccttgtttctccccagaggcctctcaatcctccctccatgatcttcgcatagagcacagtaccccttcacacggaggacgcgatggctcccaagaaacgcccagaaacccagaagacctccgagattgtattacgccccaggaacaagaggagcaggagtcccctggagctggagcccgaggccaagaagctctgtgcgaagggctccggtcctagcagaagatgtgactcagactgcctctgggtggggctggctggcccacagatcctgccaccatgccgcagcatcgtcaggaccctccaccagcataagctgggcagagcttcctggccatctgtccagcaggggctccagcagtcctttttgcacactctggattcttaccggatattacaaaaggctgccccctttgacaggagggctacatccttggcgtggcacccaactcaccccagcaccgtggctgtgggttccaaagggggagatatcatgctctggaattttggcatcaaggacaaacccaccttcatcaaagggattggagctggagggagcatcactgggctgaagtttaaccctctcaataccaaccagttttacgcctcctcaatggagggaacaactaggctgcaagactttaaaggcaacattctacgagtttttgccagctcagacaccatcaacatctggttttgtagcctggatgtgtctgctagtagccgaatggtggtcacaggagacaacgtggggaacgtgatcctgctgaacatggacggcaaagagctttggaatctcagaatgcacaaaaagaaagtgacgcatgtggccctgaacccatgctgtgattggttcctggccacagcctccgtagatcaaacagtgaaaatttgggacctgcgccaggttagagggaaagccagcttcctctactcgctgccgcacaggcatcctgtcaacgcagcttgtttcagtcccgatggagcccggctcctgaccacggaccagaagagcgagatccgagtttactctgcttcccagtgggactgccccctgggcctgatcccgcaccctcaccgtcacttccagcacctcacacccatcaagtagggacggggtttcaccatgttagccaggatggtctcgatctcctgacctcgtgatccgcctgcctcagcctcccaaagtgttgagattacaggtgtgagccactgcactcagcccaaagaatacttttgatgttcctctttgttcatatttgtttttgatgtcccccttgatcatgttctgtgtttaccctcatggccggcctctccatctcctaggcagcctggcatcctcgctacaacctcattgttgtgggccgatacccagatcctaatttcaaaagttgtaccccttatgaattgaggacgatcgacgtgttcgatggaaactcagggaagatgatgtgtcagctctatgacccagaatcttctggcatcagttcgcttaatgaattcaatcccatgggggacacgctggcctctgcaatgggttaccacattctcatctggagccaggaggaagccaggacacggaagtgagagacactaaagaaggtgtgggccagacaaggccttggagcccacacatgggatcaagtcctgcaagcagaggtggcgatttgttaaagggccaaaagtatccaaggttagggttggagcaggggtgctgggacctggggcactgtgggactgggacacttttatgttaatgctctggacttgcctccagagactgctccagagttggtgacacagctgtcccaagggcccctctgtatctagcctggaaccaaggttatcttggaactaaatgacttttctcctctcagtgggtggtagcagagggatcaagcagttatttgatttgtgctcacttttgatatggccaataaaaccataccgactgag

SEQ ID NO: 375315 - DNA, 1841 bp, Homo sapiens
ggccggagctccaagctggtttgaacaagccctgggcatgtttggcgggaagttggcttagctcggctacctgtggccccgcagttttgtagtccccgccttgtttctccccagaggcctctcaatcctccctccatgatcttcgcatagagcacagtaccccttcacacggaggacgcgatggctcccaagaaacgcccagaaacccagaagacctccgagattgtattacgccccaggaacaagaggagcaggagtcccctggagctggagcccgaggccaagaagctctgtgcgaagggctccggtcctagcagaagatgtgactcagactgcctctgggtggggctggctggcccacagatcctgccaccatgccgcagcatcgtcaggaccctccaccagcataagctgggcagagcttcctggccatctgtccagcaggggctccagcagtcctttttgcacactctggattcttaccggatattacaaaaggctgccccctttgacaggagggctacatccttggcgtggcacccaactcaccccagcaccgtggctgtgggttccaaagggggagatatcatgctctggaattttggcatcaaggacaaacccaccttcatcaaagggattggagctggagggagcatcactgggctgaagtttaaccctctcaataccaaccagttttacgcctcctcaatggagggaacaactaggctgcaagactttaaaggcaacattctacgagtttttgccagctcagacaccatcaacatctggttttgtagcctggatgtgtctgctagtagccgaatggtggtcacaggagacaacgtggggaacgtgatcctgctgaacatggacggcaaagagctttggaatctcagaatgcacaaaaagaaagtgacgcatgtggccctgaacccatgctgtgattggttcctggccacagcctccgtagatcaaacagtgaaaatttgggacctgcgccaggttagagggaaagccagcttcctctactcgctgccgcacaggcatcctgtcaacgcagcttgtttcagtcccgatggagcccggctcctgaccacggaccagaagagcgagatccgagtttactctgcttcccagtgggactgccccctgggcctgatcccgcaccctcaccgtcacttccagcacctcacacccatcaaggcagcctggcatcctcgctacaacctcattgttgtgggccgatacccagatcctaatttcaaaagttgtaccccttatgaattgaggacgatcgacgtgttcgatggaaactcagggaagatgatgtgtcagctctatgacccagaatcttctggcatcagttcgcttaatgaattcaatcccatgggggacacgctggcctctgcaatgggttaccacattctcatctggagccaggaggaagccaggacacggaagtgagagacactaaagaaggtgtgggccagacaaggccttggagcccacacatgggatcaagtcctgcaagcagaggtggcgatttgttaaagggccaaaagtatccaaggttagggttggagcaggggtgctgggacctggggcactgtgggactgggacacttttatgttaatgctctggacttgcctccagagactgctccagagttggtgacacagctgtcccaagggcccctctgtatctagcctggaaccaaggttatcttggaactaaatgacttttctcctctcagtgggtggtacatgctcactcacccagttacaccctttgtcacgatttacgatcccctccatacacctatcccaatcgacacaatcac

SEQ ID NO: 375316 - DNA, 2368 bp, Homo sapiens
attaactgagcacttgctgctatttctagacatgaaatgtcaccttgctgaggcccagcccagcccagcatagcccgagggctggaaaaacgctttcatctctaaaactgagaaatcatcataattgtgctttcacttcccaggctccatgtgtcttggagccgtcaccccgaggctccctctttaggtcggagattggccttgcctgtcgaggcaagaggctgcagaggcggggacacacctgtgtcctccgggagaggccccctcctctccccagaccacagggggcctctctgcctccagccccaccttccccgggagaagctttccccaatccccaggtctctagatcattctgttctcgagtatcctgtggaggaggcaaaaatgcctggcgccccttctctccaagctcaattctctaagcccctcagggtcgggaagttggcttagctcggctacctgtggccccgcagttttgtagtccccgccttgtttctccccagaggcctctcaatcctccctccatgatcttcgcatagagcacagtaccccttcacacggaggacgcgatggctcccaagaaacgcccagaaacccagaagacctccgagattgtattacgccccaggaacaagaggagcaggagtcccctggagctggagcccgaggccaagaagctctgtgcgaagggctccgaccacacagacatggaaaggccgcaggaggttgatgagacagagattaaccgtgccgaatgaaacaaggcttcctttcggggaattcagcagaaaaacctttcgtgagattggagaggaaaatatgtctgttctgcttggcaggtcctagcagaagatgtgactcagactgcctctgggtggggctggctggcccacagatcctgccaccatgccgcagcatcgtcaggaccctccaccagcataagctgggcagagcttcctggccatctgtccagcaggggctccagcagtcctttttgcacactctggattcttaccggatattacaaaaggctgccccctttgacaggagggctacatccttggcgtggcacccaactcaccccagcaccgtggctgtgggttccaaagggggagatatcatgctctggaattttggcatcaaggacaaacccaccttcatcaaagggattggagctggagggagcatcactgggctgaagtttaaccctctcaataccaaccagttttacgcctcctcaatggagggaacaactaggctgcaagactttaaaggcaacattctacgagtttttgccagctcagacaccatcaacatctggttttgtagcctggatgtgtctgctagtagccgaatggtggtcacaggagacaacgtggggaacgtgatcctgctgaacatggacggcaaagagctttggaatctcagaatgcacaaaaagaaagtgacgcatgtggccctgaacccatgctgtgattggttcctggccacagcctccgtagatcaaacagtgaaaatttgggacctgcgccaggttagagggaaagccagcttcctctactcgctgccgcacaggcatcctgtcaacgcagcttgtttcagtcccgatggagcccggctcctgaccacggaccagaagagcgagatccgagtttactctgcttcccagtgggactgccccctgggcctgatcccgcaccctcaccgtcacttccagcacctcacacccatcaaggcagcctggcatcctcgctacaacctcattgttgtgggccgatacccagatcctaatttcaaaagttgtaccccttatgaattgaggacgatcgacgtgttcgatggaaactcagggaagatgatgtgtcagctctatgacccagaatcttctggcatcagttcgcttaatgaattcaatcccatgggggacacgctggcctctgcaatgggttaccacattctcatctggagccaggaggaagccaggacacggaagtgagagacactaaagaaggtgtgggccagacaaggccttggagcccacacatgggatcaagtcctgcaagcagaggtggcgatttgttaaagggccaaaagtatccaaggttagggttggagcaggggtgctgggacctggggcactgtgggactgggacacttttatgttaatgctctggacttgcctccagagactgctccagagttggtgacacagctgtcccaagggcccctctgtatctagcctggaaccaaggttatcttggaactaaatgacttttctcctctcagtgggtggtagcagagggatcaagcagttatttgatttgtgctcacttttgatatggccaataaaaccataccgactgag

SEQ ID NO: 375317 - DNA, 2172 bp, Homo sapiens
attaactgagcacttgctgctatttctagacatgaaatgtcaccttgctgaggcccagcccagcccagcatagcccgagggctggaaaaacgctttcatctctaaaactgagaaatcatcataattgtgctttcacttcccaggctccatgtgtcttggagccgtcaccccgaggctccctctttaggtcggagattggccttgcctgtcgaggcaagaggctgcagaggcggggacacacctgtgtcctccgggagaggccccctcctctccccagaccacagggggcctctctgcctccagccccaccttccccgggagaagctttccccaatccccaggtctctagatcattctgttctcgagtatcctgtggaggaggcaaaaatgcctggcgccccttctctccaagctcaattctctaagcccctcagggtcgggaagttggcttagctcggctacctgtggccccgcagttttgtagtccccgccttgtttctccccagaggcctctcaatcctccctccatgatcttcgcatagagcacagtaccccttcacacggaggacgcgatggctcccaagaaacgcccagaaacccagaagacctccgagattgtattacgccccaggaacaagaggagcaggagtcccctggagctggagcccgaggccaagaagctctgtgcgaagggctccggtcctagcagaagatgtgactcagactgcctctgggtggggctggctggcccacagatcctgccaccatgccgcagcatcgtcaggaccctccaccagcataagctgggcagagcttcctggccatctgtccagcaggggctccagcagtcctttttgcacactctggattcttaccggatattatcaccccagcaccgtggctgtgggttccaaagggggagatatcatgctctggaattttggcatcaaggacaaacccaccttcatcaaagggattggagctggagggagcatcactgggctgaagtttaaccctctcaataccaaccagttttacgcctcctcaatggagggaacaactaggctgcaagactttaaaggcaacattctacgagtttttgccagctcagacaccatcaacatctggttttgtagcctggatgtgtctgctagtagccgaatggtggtcacaggagacaacgtggggaacgtgatcctgctgaacatggacggcaaagagctttggaatctcagaatgcacaaaaagaaagtgacgcatgtggccctgaacccatgctgtgattggttcctggccacagcctccgtagatcaaacagtgaaaatttgggacctgcgccaggttagagggaaagccagcttcctctactcgctgccgcacaggcatcctgtcaacgcagcttgtttcagtcccgatggagcccggctcctgaccacggaccagaagagcgagatccgagtttactctgcttcccagtgggactgccccctgggcctgatcccgcaccctcaccgtcacttccagcacctcacacccatcaaggcagcctggcatcctcgctacaacctcattgttgtgggccgatacccagatcctaatttcaaaagttgtaccccttatgaattgaggacgatcgacgtgttcgatggaaactcagggaagatgatgtgtcagctctatgacccagaatcttctggcatcagttcgcttaatgaattcaatcccatgggggacacgctggcctctgcaatgggttaccacattctcatctggagccaggaggaagccaggacacggaagtgagagacactaaagaaggtgtgggccagacaaggccttggagcccacacatgggatcaagtcctgcaagcagaggtggcgatttgttaaagggccaaaagtatccaaggttagggttggagcaggggtgctgggacctggggcactgtgggactgggacacttttatgttaatgctctggacttgcctccagagactgctccagagttggtgacacagctgtcccaagggcccctctgtatctagcctggaaccaaggttatcttggaactaaatgacttttctcctctcagtgggtggtagcagagggatcaagcagttatttgatttgtgctcacttttgatatggccaataaaaccataccgactgag

SEQ ID NO: 375318 - DNA, 1512 bp, Homo sapiens
ggccggagctccaagctggtttgaacaagccctgggcatgtttggcgggaagttggcttagctcggctacctgtggccccgcagttttgtagtccccgccttgtttctccccagaggcctctcaatcctccctccatgatcttcgcatagagcacagtaccccttcacacggaggacgcgatggctcccaagaaacgcccagaaacccagaagacctccgagattgtattacgccccaggaacaagaggagcaggagtcccctggagctggagcccgaggccaagaagctctgtgcgaagggctccggtcctagcagaagatgtgactcagactgcctctgggtggggctggctggcccacagatcctgccaccatgccgcagcatcgtcaggaccctccaccagcataagctgggcagagcttcctggccatctgtccagcaggggctccagcagtcctttttgcacactctggattcttaccggatattacaaaaggctgccccctttgacaggagggctacatccttggcgtggcacccaactcaccccagcaccgtggctgtgggttccaaagggggagatatcatgctctggaattttggcatcaaggacaaacccaccttcatcaaagggattggagctggagggagcatcactgggctgaagtttaaccctctcaataccaaccagttttacgcctcctcaatggagggaacaactaggctgcaagactttaaaggcaacattctacgagtttttgccagctcagacaccatcaacatctggttttgtagcctggatgtgtctgctagtagccgaatggtggtcacaggagacaacgtggggaacgtgatcctgctgaacatggacggcaaagagctttggaatctcagaatgcacaaaaagaaagtgacgcatgtggccctgaacccatgctgtgattggttcctggccacagcctccgtagatcaaacagtgaaaatttgggacctgcgccaggttagagggaaagccagcttcctctactcgctgccgcacaggcatcctgtcaacgcagcttgtttcagtcccgatggagcccggctcctgaccacggaccagaagagcgagatccgagtttactctgcttcccagtgggactgccccctgggcctgatcccgcaccctcaccgtcacttccagcacctcacacccatcaaggtgagtggcggtgggaaggagctcgcagaaggaggctgtgatcatgaggccggagcaggtctgcccacagtggggaagggctgatgtggtaagcctgccaccccagatcgctcctggcccgagcacagagcatctcttacccattggctctctctcttccttttatcccacttctgccatcccatatggttgagttttctgtctcgctgataagatatttttctgagttttttcagcccagctctgatctcactgtgagaattttctaagatcctgaccctctgttctgtcttctcagcttcagttacc

SEQ ID NO: 375319 - DNA, 2495 bp, Homo sapiens
aatttacgaagtacagatcgagtgaacaatgcacaaaatgaaacagggaaaaagacaaaaatgaacagtgcatcaaccacctgcaggaccatatgtaatcgcagtcccaagaaaaaaagaactgttctttttcttcattttgaactctttgaaagaaatgaaggggccagacaaagcggctcatgcctgtaatcttagcactttgggaagccgtggcagggggatcgcttgagcttaggagttcaagaccagcttgggcaactttgccttcttagtttgtcttgcaggtttcagtgcttctaataataaaaataagtcttttattttcccaccttttctcaggctcttgttaatagcttctctatcattagtccccaacactaatagctttcaagtcctttgatgcctttttgcctaagcccccatgcagactgagctctgctagttctgcattcttttccaaaactacagatcctcttcagatcttcaggttttatgcctatacttctctggtcagttcagaatagtggtggggagcgccagtttccagcagccagaccccccgggttagaatccttgggcaaattacttatattttggatctgtttcctcatctgcaaaaagggaatactagtctctaactgatagggttgttgtgaagatgagtcagtatacttaaagcacttggccccatgcccagcacctggtaagtactggtaagtattcaataaatgatgattgaatattgagtggcccccacgtacctcaatcacatccaagctcttaataaataatgtcaagaatccttccccagttggtgttcctgttaatccatcagtgttcccgataatccatctgtctgcatgtcccagtttgtatctagccaggtgtcgtaagtcattacagcttcctgtgtgtgatttgtgacttatttctaagccttcgcatgtactatttcttccttcctgctaaccatgtctttcttccttcaaaacttccttgagaagtttaggaaaatcccatccaattctgccattttaataactgccagatttgtttttagtggggtgatctggggaatgtgggtttccttctcttttttagccattagcaattttacactcagctcttagttattcgtgttgatggagacaggatgacagtggggctcctccagaactcaagtcctgttagggtttggtcaccagaggctttttctgctttgttgtaggcctcttaggtcagtatctgggtcaggctgatgttaaaatgtttaccagttggtatgatcttaggaaatgcaaatgagggagaaggcctgaaggtgccctaagggccagggaggccagctagggattaaaaatgtgcaatggcagaggcacacacaacctaaaaccattcttgtagttttctgtaagacttatctccattattaggttggcttgttacctggccaatactacttttttttttttttttttgagagtcttgctctgtcacctaggctggagtgcagtgacatgatcttcactcactgcaacctccgcctcccgggttcaagtgattcccctgcctcagcctcccaagtagctgggactacaggcatgtaccaccacgcccagctaattttttttttggtatttttagtagggacggggtttcaccatgttagccaggatggtctcgatctcctgacctcgtgatccgcctgcctcagcctcccaaagtgttgagattacaggtgtgagccactgcactcagcccaaagaatacttttgatgttcctctttgttcatatttgtttttgatgtcccccttgatcatgttctgtgtttaccctcatggccggcctctccatctcctaggcagcctggcatcctcgctacaacctcattgttgtgggccgatacccagatcctaatttcaaaagttgtaccccttatgaattgaggacgatcgacgtgttcgatggaaactcagggaagatgatgtgtcagctctatgacccagaatcttctggcatcagttcgcttaatgaattcaatcccatgggggacacgctggcctctgcaatgggttaccacattctcatctggagccaggaggaagccaggacacggaagtgagagacactaaagaaggtgtgggccagacaaggccttggagcccacacatgggatcaagtcctgcaagcagaggtggcgatttgttaaagggccaaaagtatccaaggttagggttggagcaggggtgctgggacctggggcactgtgggactgggacacttttatgttaatgctctggacttgcctccagagactgctccagagttggtgacacagctgtcccaagggcccctctgtatctagcctggaaccaaggttatcttggaactaaatgacttttctcctctcagtgggtggtagcagagggatcaagcagttatttgatttgtgctcacttttgatatggccaataaaaccataccgactgag

SEQ ID NO: 375320 - DNA, 2355 bp, Homo sapiens
tatagagatggggttttgccatgttgcccaagctggtcttgaactcctaggttgaagccatcccccaaccttggcctcccaaagtgctaggattacaggcatgagccactgcgcctggcaactttgccttcttagtttgtcttgcaggtttcagtgcttctaataataaaaataagtcttttattttcccaccttttctcaggctcttgttaatagcttctctatcattagtccccaacactaatagctttcaagtcctttgatgcctttttgcctaagcccccatgcagactgagctctgctagttctgcattcttttccaaaactacagatcctcttcagatcttcaggttttatgcctatacttctctggtcagttcagaatagtggtggggagcgccagtttccagcagccagaccccccgggttagaatccttgggcaaattacttatattttggatctgtttcctcatctgcaaaaagggaatactagtctctaactgatagggttgttgtgaagatgagtcagtatacttaaagcacttggccccatgcccagcacctggtaagtactggtaagtattcaataaatgatgattgaatattgagtggcccccacgtacctcaatcacatccaagctcttaataaataatgtcaagaatccttccccagttggtgttcctgttaatccatcagtgttcccgataatccatctgtctgcatgtcccagtttgtatctagccaggtgtcgtaagtcattacagcttcctgtgtgtgatttgtgacttatttctaagccttcgcatgtactatttcttccttcctgctaaccatgtctttcttccttcaaaacttccttgagaagtttaggaaaatcccatccaattctgccattttaataactgccagatttgtttttagtggggtgatctggggaatgtgggtttccttctcttttttagccattagcaattttacactcagctcttagttattcgtgttgatggagacaggatgacagtggggctcctccagaactcaagtcctgttagggtttggtcaccagaggctttttctgctttgttgtaggcctcttaggtcagtatctgggtcaggctgatgttaaaatgtttaccagttggtatgatcttaggaaatgcaaatgagggagaaggcctgaaggtgccctaagggccagggaggccagctagggattaaaaatgtgcaatggcagaggcacacacaacctaaaaccattcttgtagttttctgtaagacttatctccattattaggttggcttgttacctggccaatactacttttttttttttttttttgagagtcttgctctgtcacctaggctggagtgcagtgacatgatcttcactcactgcaacctccgcctcccgggttcaagtgattcccctgcctcagcctcccaagtagctgggactacaggcatgtaccaccacgcccagctaattttttttttggtatttttagtagggacggggtttcaccatgttagccaggatggtctcgatctcctgacctcgtgatccgcctgcctcagcctcccaaagtgttgagattacaggtgtgagccactgcactcagcccaaagaatacttttgatgttcctctttgttcatatttgtttttgatgtcccccttgatcatgttctgtgtttaccctcatggccggcctctccatctcctaggcagcctggcatcctcgctacaacctcattgttgtgggccgatacccagatcctaatttcaaaagttgtaccccttatgaattgaggacgatcgacgtgttcgatggaaactcagggaagatgatgtgtcagctctatgacccagaatcttctggcatcagttcgcttaatgaattcaatcccatgggggacacgctggcctctgcaatgggttaccacattctcatctggagccaggaggaagccaggacacggaagtgagagacactaaagaaggtgtgggccagacaaggccttggagcccacacatgggatcaagtcctgcaagcagaggtggcgatttgttaaagggccaaaagtatccaaggttagggttggagcaggggtgctgggacctggggcactgtgggactgggacacttttatgttaatgctctggacttgcctccagagactgctccagagttggtgacacagctgtcccaagggcccctctgtatctagcctggaaccaaggttatcttggaactaaatgacttttctcctctcagtgggtggtagcagagggatcaagcagttatttgatttgtgctcacttttgatatggccaataaaaccataccgactgag

SEQ ID NO: 375321 - DNA, 1088 bp, Homo sapiens
  misc_feature (26)..(26): n is a, c, g, or t
ccaggctggtacagcccgcggggtancgatatcgtcgacccacgcgctccgaggcaacattctacgacgttttgccagctcagacaccagtggagcatctggttttgtagcctggatgtgtctgctagtagccgaatggtggtcacaggagacaacgtggggaacgtgatcctgctgaacatggacggcaaagagctttggaatctcagaatgcacaaaaagaaagtgacgcatgtggccctgaacccatgctgtgattggttcctggccacagcctccgtagatcaaacagtgaaaatttgggacctgcgccagcttgtttcagtcccgatggagcccggctcctgaccacggaccagaagagcgagatccgagtttactctgcttcccagtgggactgccccctgggcctgatcccgcaccctcaccgtcacttccagcacctcacacccatcaaggcagcctggcatcctcgctacaacctcattgttgtgggccgatacccagatcctaatttcaaaagttgtaccccttatgaattgaggacgatcgacgtgttcgatggaaactcagggaagatgatgtgtcagctctatgacccagaatcttctggcatcagttcgcttaatgaattcaatcccatgggggacacgctggcctctgcaatgggttaccacattctcatctggagccaggaggaagccaggacacggaagtgagagacactaaagaaggtgtgggccagacaaggccttggagcccacacatgggatcaagtcctgcaagcagaggtggcgatttgttaaagggccaaaagtatccaaggttagggttggagcaggggtgctgggacctggggcactgtgggactgggacacttttatgttaatgctctggacttgcctccagagactgctccagagttggtgacacagctgtcccaagggcccctctgtatctagcctggaaccaaggttatcttggaactaaatgacttttctcctctcagtgggtggtagcagagggatcaagcagttatttgatttgtgctcacttttgatatggccaataaaaccataccgactgag

SEQ ID NO: 375322 - DNA, 1376 bp, Homo sapiens
attaactgagcacttgctgctatttctagacatgaaatgtcaccttgctgaggcccagcccagcccagcatagcccgagggctggaaaaacgctttcatctctaaaactgagaaatcatcataattgtgctttcacttcccaggctccatgtgtcttggagccgtcaccccgaggctccctctttaggtcggagattggccttgcctgtcgaggcaagaggctgcagaggcggggacacacctgtgtcctccgggagaggccccctcctctccccagaccacagggggcctctctgcctccagccccaccttccccgggagaagctttccccaatccccaggtctctagatcattctgttctcgagtatcctgtggaggaggcaaaaatgcctggcgccccttctctccaagctcaattctctaagcccctcagggtcgggaagttggcttagctcggctacctgtggccccgcagttttgtagtccccgccttgtttctccccagaggcctctcaatcctccctccatgatcttcgcatagagcacagtaccccttcacacggaggacgcgatggctcccaagaaacgcccagaaacccagaagacctccgagattgtattacgccccaggaacaagaggagcaggagtcccctggagctggagcccgaggccaagaagctctgtgcgaagggctccggtcctagcagaagatgtgactcagactgcctctgggtggggctggctggcccacagatcctgccaccatgccgcagcatcgtcaggaccctccaccagcataagctgggcagagcttcctggccatctgtccagcaggggctccagcagtcctttttgcacactctggattcttaccggatattacaaaaggctgccccctttgacaggagggctacatccttggcgtggcacccaactcaccccagcaccgtggctgtgggttccaaagggggagatatcatgctctggaattttggcatcaaggacaaacccaccttcatcaaaggggcagcctggcatcctcgctacaacctcattgttgtgggccgatacccagatcctaatttcaaaagttgtaccccttatgaattgaggacgatcgacgtgttcgatggaaactcagggaagatgatgtgtcagctctatgacccagaatcttctggcatcagttcgcttaatgaattcaatccatgggaaaggtggctctggatgggtacaatttcattgcggcaggggagcggaagaggggagaactagaggggggaaggctgggccaagggtagcctcgaggggtgttagggcccaccaggggggaggcggaggcggggggaattggggcaagaaggggaggtttga

SEQ ID NO: 375323 - DNA, 1414 bp, Homo sapiens
attaactgagcacttgctgctatttctagacatgaaatgtcaccttgctgaggcccagcccagcccagcatagcccgagggctggaaaaacgctttcatctctaaaactgagaaatcatcataattgtgctttcacttcccaggctccatgtgtcttggagccgtcaccccgaggctccctctttaggtcggagattggccttgcctgtcgaggcaagaggctgcagaggcggggacacacctgtgtcctccgggagaggccccctcctctccccagaccacagggggcctctctgcctccagccccaccttccccgggagaagctttccccaatccccaggtctctagatcattctgttctcgagtatcctgtggaggaggcaaaaatgcctggcgccccttctctccaagctcaattctctaagcccctcagggtcgggaagttggcttagctcggctacctgtggccccgcagttttgtagtccccgccttgtttctccccagaggcctctcaatcctccctccatgatcttcgcatagagcacagtaccccttcacacggaggacgcgatggctcccaagaaacgcccagaaacccagaagacctccgagattgtattacgccccaggaacaagaggagcaggagtcccctggagctggagcccgaggccaagaagctctgtgcgaagggctccggtcctagcagaagatgtgactcagactgcctctgggtggggctggctggcccacagatcctgccaccatgccgcagcatcgtcaggaccctccaccagcataagctgggcagagcttcctggccatctgtccagcaggggctccagcagtcctttttgcacactctggattcttaccggatattacaaaaggctgccccctttgacaggagggctacatccttggcgtggcacccaactcaccccagcaccgtggctgtgggttccaaagggggagatatcatgctctggaattttggcatcaaggacaaacccaccttcatcaaagggacagggtcttgctgtgtcacccagggatgatcatggttcagcatagcctcaacctcctcagctcaagcgattctcccacctcagcctcctgagtagctggcactacatgcacaggccaccatacctggctaattttaaaattttgttatagagacagaggtctcactgtgttgcacaggctggtttcaaactcctggcctcaagctatcctcctgccttagcctcccaaagtgccgggattataggcgtgagcccctgcacccagccacattgtactgatatgatacagtttattcatttacctgttcaaggacatttgaatttttttctagtttttgaatgcaacatataaagcgactgtgaacattcacgtacaagtatttgtg

SEQ ID NO: 375324 - DNA, 339 bp, Homo sapiens
cctagtatttctttaccaaattgtaggtttgcgggccagccccaggctctgagagattggtaacagaaagtgtaagtcagactggtctcactcttcctaggttaccacattctcatctggagccaggaggaagccaggacacggaagtgagagacactaaagaaggtgtgggccagacaaggccttggagcccacacatgggatcaagtcctgcaagcagaggtggcgatttgttaaagggccaaaagtatccaaggttagggttggagcaggggtgctgggacctggggcactgtgggactgggacacttttatgttaatgctctggacttgcctcca

SEQ ID NO: 375325 - DNA, 538 bp, Homo sapiens
tcattcaacaaatatttattgaatgcccgctgtgggttagtcaccggagcggcaacagtgagtaaataggactatctctgtccccaagaatcttacaacacagtctctccctccagcatctggttttgtagcctggatgtgtctgctagtagccgaatggtggtcacaggagacaacgtggggaacgtgatcctgctgaacatggacggcaaagagtgcgttctccgaggtcctgcctttccctccctcacccccacctcggttctgtgtccccacctgaaccgagctcttctctgcagctttggaatctcagaatgcacaaaaagaaagtgacgcatgtggccctgaacccatgctgtgattggttcctggccacagcctccgtagatcaaacagtgaaaatttgggacctgcgccaggttagagggaaagccagcttcctctactcgctgccgcacaggcatcctgtcaacgcaggtgtgatatcccagacctcatctctcctgcagaccctgcctgtctgaccactgctggggtt

SEQ ID NO: 375326 - DNA, 1655 bp, Homo sapiens
ggccggagctccaagctggtttgaacaagccctgggcatgtttggcgggaagttggcttagctcggctacctgtggccccgcagttttgtagtccccgccttgtttctccccagaggcctctcaatcctccctccatgatcttcgcatagagcacagtaccccttcacacggaggacgcgatggctcccaagaaacgcccagaaacccagaagacctccgagattgtattacgccccaggaacaagaggagcaggagtcccctggagctggagcccgaggccaagaagctctgtgcgaagggctccggtcctagcagaagatgtgactcagactgcctctgggtggggctggctggcccacagatcctgccaccatgccgcagcatcgtcaggaccctccaccagcataagctgggcagagcttcctggccatctgtccagcaggggctccagcagtcctttttgcacactctggattcttaccggatattacaaaaggctgccccctttgacaggagggctacatccttggcgtggcacccaactcaccccagcaccgtggctgtgggttccaaagggggagatatcatgctctggaattttggcatcaaggacaaacccaccttcatcaaagggattggagctggagggagcatcactgggctgaagtttaaccctctcaataccaaccagttttacgcctcctcaatggagggaacaactaggctgcaagactttaaaggcaacattctacgagtttttgccagctcagacaccatcaacatctggttttgtagcctggatgtgtctgctagtagccgaatggtggtcacaggagacaacgtggggaacgtgatcctgctgaacatggacggcaaagagcttgtttcagtcccgatggagcccggctcctgaccacggaccagaagagcgagatccgagtttactctgcttcccagtgggactgccccctgggcctgatcccgcaccctcaccgtcacttccagcacctcacacccatcaaggcagcctggcatcctcgctacaacctcattgttgtgggccgatacccagatcctaatttcaaaagttgtaccccttatgaattgaggacgatcgacgtgttcgatggaaactcagggaagatgatgtgtcagctctatgacccagaatcttctggcatcagttcgcttaatgaattcaatcccatgggggacacgctggcctctgcaatgggttaccacattctcatctggagccaggaggaagccaggacacggaagtgagagacactaaagaaggtgtgggccagacaaggccttggagcccacacatgggatcaagtcctgcaagcagaggtggcgatttgttaaagggccaaaagtatccaaggttagggttggagcaggggtgctgggacctggggcactgtgggactgggacacttttatgttaatgctctggacttgcctccagagactgctccagagttggtgacacagctgtcccaagggcccctctgtatctagcctggaaccaaggttatcttggaactaaatgacttttctcctctcagtgggtggtagcagagggatcaagcagttatttgatttgtgctcacttttgatatggccaataaaaccataccgactgag

SEQ ID NO: 375327 - DNA, 1865 bp, Homo sapiens
ggccggagctccaagctggtttgaacaagccctgggcatgtttggcgggaagttggcttagctcggctacctgtggccccgcagttttgtagtccccgccttgtttctccccagaggcctctcaatcctccctccatgatcttcgcatagagcacagtaccccttcacacggaggacgcgatggctcccaagaaacgcccagaaacccagaagacctccgagattgtattacgccccaggaacaagaggagcaggagtcccctggagctggagcccgaggccaagaagctctgtgcgaagggctccggtcctagcagaagatgtgactcagactgcctctgggtggggctggctggcccacagatcctgccaccatgccgcagcatcgtcaggaccctccaccagcataagctgggcagagcttcctggccatctgtccagcaggggctccagcagtcctttttgcacactctggattcttaccggatattacaaaaggctgccccctttgacaggagggctacatccttggcgtggcacccaactcaccccagcaccgtggctgtgggttccaaagggggagatatcatgctctggaattttggcatcaaggacaaacccaccttcatcaaagggattggagctggagggagcatcactgggctgaagtttaaccctctcaataccaaccagttttacgcctcctcaatggagggaacaactaggctgcaagactttaaaggcaacattctacgagtttttgccagctcagacaccatcaacatctggttttgtagcctggatgtgtctgctagtagccgaatggtggtcacaggagacaacgtggggaacgtgatcctgctgaacatggacggcaaagagctttggaatctcagaatgcacaaaaagaaagtgacgcatgtggccctgaacccatgctgtgattggttcctggccacagcctccgtagatcaaacagtgaaaatttgggacctgcgccaggttagagggaaagccagcttcctctactcgctgccgcacaggcatcctgtcaacgcagcttgtttcagtcccgatggagcccggctcctgaccacggaccagaagagcgagatccgagtttactctgcttcccagtgggactgccccctgggcctgatcccgcaccctcaccgtcacttccagcacctcacacccatcaaggcagcctggcatcctcgctacaacctcattgttgtgggccgatacccagatcctaatttcaaaagttgtaccccttatgaattgaggacgatcgacgtgttcgatggaaactcagggaagatgatgtgtcagctctatgacccagaatcttctggcatcagttcgcttaatgaattcaatcccatgggggacacgctggcctctgcaatgggttaccacattctcatctggagccaggaggaagccaggacacggaagtgagagacactaaagaaggtgtgggccagacaaggccttggagcccacacatgggatcaagtcctgcaagcagaggtggcgatttgttaaagggccaaaagtatccaaggttagggttggagcaggggtgctgggacctggggcactgtgggactgggacacttttatgttaatgctctggacttgcctccagagactgctccagagttggtgacacagctgtcccaagggcccctctgtatctagcctggaaccaaggttatcttggaactaaatgacttttctcctctcagtgggtggtagcagagggatcaagcagttatttgatttgtgctcacttttgatatggccaataaaaccataccgactgagaaaactgcgtggatcttccagaagtgacctgg

SEQ ID NO: 375328 - DNA, 1749 bp, Homo sapiens
ggccggagctccaagctggtttgaacaagccctgggcatgtttggcgggaagttggcttagctcggctacctgtggccccgcagttttgtagtccccgccttgtttctccccagaggcctctcaatcctccctccatgatcttcgcatagagcacagtaccccttcacacggaggacgcgatggctcccaagaaacgcccagaaacccagaagacctccgagattgtattacgccccaggaacaagaggagcaggagtcccctggagctggagcccgaggccaagaagctctgtgcgaagggctccggtcctagcagaagatgtgactcagactgcctctgggtggggctggctggcccacagatcctgccaccatgccgcagcatcgtcaggaccctccaccagcataagctgggcagagcttcctggccatctgtccagcaggggctccagcagtcctttttgcacactctggattcttaccggatattacaaaaggctgccccctttgacaggagggctacatccttggcgtggcacccaactcaccccagcaccgtggctgtgggttccaaagggggagatatcatgctctggaattttggcatcaaggacaaacccaccttcatcaaagggattggagctggagggagcatcactgggctgaagtttaaccctctcaataccaaccagttttacgcctcctcaatggagggaacaactaggctgcaagactttaaaggcaacattctacgagtttttgccagctcagacaccatcaacatctggttttgtagcctggatgtgtctgctagtagccgaatggtggtcacaggagacaacgtggggaacgtgatcctgctgaacatggacggcaaagagcttgtttcagtcccgatggagcccggctcctgaccacggaccagaagagcgagatccgagtttactctgcttcccagtgggactgccccctgggcctgatcccgcaccctcaccgtcacttccagcacctcacacccatcaagtagggacggggtttcaccatgttagccaggatggtctcgatctcctgacctcgtgatccgcctgcctcagcctcccaaagtgttgagattacaggcagcctggcatcctcgctacaacctcattgttgtgggccgatacccagatcctaatttcaaaagttgtaccccttatgaattgaggacgatcgacgtgttcgatggaaactcagggaagatgatgtgtcagctctatgacccagaatcttctggcatcagttcgcttaatgaattcaatcccatgggggacacgctggcctctgcaatgggttaccacattctcatctggagccaggaggaagccaggacacggaagtgagagacactaaagaaggtgtgggccagacaaggccttggagcccacacatgggatcaagtcctgcaagcagaggtggcgatttgttaaagggccaaaagtatccaaggttagggttggagcaggggtgctgggacctggggcactgtgggactgggacacttttatgttaatgctctggacttgcctccagagactgctccagagttggtgacacagctgtcccaagggcccctctgtatctagcctggaaccaaggttatcttggaactaaatgacttttctcctctcagtgggtggtagcagagggatcaagcagttatttgatttgtgctcacttttgatatggccaataaaaccataccgactgag

SEQ ID NO: 375329 - DNA, 1807 bp, Homo sapiens
ggccggagctccaagctggtttgaacaagccctgggcatgtttggcgggaagttggcttagctcggctacctgtggccccgcagttttgtagtccccgccttgtttctccccagaggcctctcaatcctccctccatgatcttcgcatagagcacagtaccccttcacacggaggacgcgatggctcccaagaaacgcccagaaacccagaagacctccgagattgtattacgccccaggaacaagaggagcaggagtcccctggagctggagcccgaggccaagaagctctgtgcgaagggctccggtcctagcagaagatgtgactcagactgcctctgggtggggctggctggcccacagatcctgccaccatgccgcagcatcgtcaggaccctccaccagcataagctgggcagagcttcctggccatctgtccagcaggggctccagcagtcctttttgcacactctggattcttaccggatattacaaaaggctgccccctttgacaggagggctacatccttggcgtggcacccaactcaccccagcaccgtggctgtgggttccaaagggggagatatcatgctctggaattttggcatcaaggacaaacccaccttcatcaaagggattggagctggagggagcatcactgggctgaagtttaaccctctcaataccaaccagttttacgcctcctcaatggagggaacaactaggctgcaagactttaaaggcaacattctacgagtttttgccagctcagacaccatcaacatctggttttgtagcctggatgtgtctgctagtagccgaatggtggtcacaggagacaacgtggggaacgtgatcctgctgaacatggacggcaaagagctttggaatctcagaatgcacaaaaagaaagtgacgcatgtggccctgaacccatgctgtgattggttcctggccacagcctccgtagatcaaacagtgaaaatttgggacctgcgccagcttgtttcagtcccgatggagcccggctcctgaccacggaccagaagagcgagatccgagtttactctgcttcccagtgggactgccccctgggcctgatcccgcaccctcaccgtcacttccagcacctcacacccatcaaggcagcctggcatcctcgctacaacctcattgttgtgggccgatacccagatcctaatttcaaaagttgtaccccttatgaattgaggacgatcgacgtgttcgatggaaactcagggaagatgatgtgtcagctctatgacccagaatcttctggcatcagttcgcttaatgaattcaatcccatgggggacacgctggcctctgcaatgggttaccacattctcatctggagccaggaggaagccaggacacggaagtgagagacactaaagaaggtgtgggccagacaaggccttggagcccacacatgggatcaagtcctgcaagcagaggtggcgatttgttaaagggccaaaagtatccaaggttagggttggagcaggggtgctgggacctggggcactgtgggactgggacacttttatgttaatgctctggacttgcctccagagactgctccagagttggtgacacagctgtcccaagggcccctctgtatctagcctggaaccaaggttatcttggaactaaatgacttttctcctctcagtgggtggtagcagagggatcaagcagttatttgatttgtgctcacttttgatatggccaataaaaccataccgactgagaaaactgcgtggatcttccagaagtgacctgg

SEQ ID NO: 375330 - DNA, 1254 bp, Homo sapiens
tcattcattcaacaaatatttattgaatgcccgctgtgggttagtcaccggagcggcaacagtgagtaaataggactatctctgtccccaagaatcttacaacacagtctctccctccagcatctggttttgtagcctggatgtgtctgctagtagccgaatggtggtcacaggagacaacgtggggaacgtgatcctgctgaacatggacggcaaagagtgcgttctccgaggtcctgcctttccctccctcacccccacctcggttctgtgtccccacctgaaccgagctcttctctgcagctttggaatctcagaatgcacaaaaagaaagtgacgcatgtggccctgaacccatgctgtgattggttcctggccacagcctccgtagatcaaacagtgaaaatttgggacctgcgccaggttagagggaaagccagcttcctctactcgctgccgcacaggcatcctgtcaacgcagcttgtttcagtcccgatggagcccggctcctgaccacggaccagaagagcgagatccgagtttactctgcttcccagtgggactgccccctgggcctgatcccgcaccctcaccgtcacttccagcacctcacacccatcaaggcagcctggcatcctcgctacaacctcattgttgtgggccgatacccagatcctaatttcaaaagttgtaccccttatgaattgaggacgatcgacgtgttcgatggaaactcagggaagatgatgtgtcagctctatgacccagaatcttctggcatcagttcgcttaatgaattcaatcccatgggggacacgctggcctctgcaatgggttaccacattctcatctggagccaggaggaagccaggacacggaagtgagagacactaaagaaggtgtgggccagacaaggccttggagcccacacatgggatcaagtcctgcaagcagaggtggcgatttgttaaagggccaaaagtatccaaggttagggttggagcaggggtgctgggacctggggcactgtgggactgggacacttttatgttaatgctctggacttgcctccagagactgctccagagttggtgacacagctgtcccaagggcccctctgtatctagcctggaaccaaggttatcttggaactaaatgacttttctcctctcagtgggtggtagcagagggatcaagcagttatttgatttgtgctcacttttgatatggccaataaaaccataccgactgag

SEQ ID NO: 375331 - DNA, 1007 bp, Homo sapiens
  misc_feature (884)..(884): n is a, c, g, or t
ggccggagctccaagctggtttgaacaagccctgggcatgtttggcgggaagttggcttagctcggctacctgtggccccgcagttttgtagtccccgccttgtttctccccagaggcctctcaatcctccctccatgatcttcgcatagagcacagtaccccttcacacggaggacgcgatggctcccaagaaacgcccagaaacccagaagacctccgagattgtattacgccccaggaacaagaggagcaggagtcccctggagctggagcccgaggccaagaagctctgtgcgaagggctccggtcctagcagaagatgtgactcagactgcctctgggtggggctggctggcccacagatcctgccaccatgccgcagcatcgtcaggaccctccaccagcataagctgggcagagcttcctggccatctgtccagcaggggctccagcagtcctttttgcacactctggattcttaccggatattacaaaaggctgccccctttgacaggagggctacatccttggcgtggcacccaactcaccccagcaccgtggctgtgggttccaaagggggagatatcatgctctggaattttggcatcaaggacaaacccaccttcatcaaagggattggagctggagggagcatcactgggctgaagtttaaccctctcaataccaaccagttttacgcctcctcaatggagggaacaactaggctgcaagactttaaaggcaacattctacgagtttttgccagctcagacaccatcaacatctggttttgtagcctggatgtgtctgctagtagccgaatggtggtcacaggagacaacgtggggaacgtgatcctgctgaacatggacggcaaagagangccaaaagaattgacgcggtggctgaacctgtggatggtccgcacagctcgtaatcacggggattggccggccggtaagaaccagtcctaacggcgaagtcgtagcgggttcccgggagcgtc

SEQ ID NO: 375332 - DNA, 120 bp, Homo sapiens
cctggaccggctggtagcaagatttatgtttcagaatattgcaacataacttccttccctctgttgcctttgtgcattgtttgaaggaggagaataaaggactacttttgcagcacagca

SEQ ID NO: 375333 - DNA, 2253 bp, Homo sapiens
  misc_feature (41)..(41): n is a, c, g, or t
  misc_feature (55)..(55): n is a, c, g, or t
  misc_feature (58)..(58): n is a, c, g, or t
gtgacgcccccccacccctccacctttgcccggagcgcggnatgcagccagcgcncangccggccccggggcaggagcggtgctaggcaggggtggggtggccgaggtttattttcttgaaaaggctccaggcttcggcttggaaaatcccaccgccaaaattgagcccagcagctggagcggcagtgagagccctgccgaaaacatggaaaggatgagtgactctgcagataagccaattgacaatgatgcagaaggggtctggagccccgacatcgagcaaagctttcaggaggccctggctatctatccaccatgtgggaggaggaaaatcatcttatcagacgaaggcaaaatgtatggtaggaatgaattgatagccagatacatcaaactcaggacaggcaagacgaggaccagaaaacaggtgtctagtcacattcaggttcttgccagaaggaaatctcgtgattttcattccaagctaaaggatcagactgcaaaggataaggccctgcagcacatggcggccatgtcctcagcccagatcgtctcggccactgccattcataacaagctggggctgcctgggattccacgcccgaccttcccaggggcgccggggttctggccgggaatgattcaaacagggcagccaggatcctcacaagacgtcaagccttttgtgcagcaggcctaccccatccagccagcggtcacagcccccattccagggtttgagcctgcatcggccccagctccctcagtccctgcctggcaaggtcgctccattggcacaaccaagcttcgcctggtggaattttcagcttttctcgagcagcagcgagacccagactcgtacaacaaacacctcttcgtgcacattgggcatgccaaccattcttacagtgacccattgcttgaatcagtggacattcgtcagatttatgacaaatttcctgaaaagaaaggtggcttaaaggaactgtttggaaagggccctcaaaatgccttcttcctcgtaaaattctgggctgatttaaactgcaatattcaagatgatgctggggctttttatggtgtaaccagtcagtacgagagttctgaaaatatgacagtcacctgttccaccaaagtttgctcctttgggaagcaagtagtagaaaaagtagagacggagtatgcaaggtttgagaatggccgatttgtataccgaataaaccgctccccaatgtgtgaatatatgatcaacttcatccacaagctcaaacacttaccagagaaatatatgatgaacagtgttttggaaaacttcacaattttattggtggtaacaaacagggatacacaagaaactctactctgcatggcctgtgtgtttgaagtttcaaatagtgaacacggagcacaacatcatatttacaggcttgtaaaggactgaacatggttatttatatatatagatatctgtatatacacacacacatatgtgcacacacacactctctctccattatcgaacgactgactgtaaacctcaccacacagggtggtgccctggccccgaggtcaccccgacttttctaaatcttgtttgagtgaagtcattttttcatgtgttcatactatcattgtagctgtgaagttctggtacagttgtaaaaagagaaattgagttgtttctctatgttcttcagatgtgcagcccacaattcctcgggaaaggtgaacctgaacaacccaagtctctctctgcagagccctgtttctaattgtggtagaaaatattgagacagagcatttgccatgggacatttacagcctttatacaaatgtatttagttctcttttttccaacataaaattcttgttttaagatacaagtaaaattaatctttaaatataaatgtaaattagtacacaaaactaagaatctttagacttatctttgtaactaattagggtggaagttatgaaagaatgtaattcactaaattattttttaaatgaaacctttttttttctttttgaaaccaaatgttaaactatagccttaagaaatgcttggtagaagtgtcctaatgagacaaatttgtacttttatcctcaaggttaacactaatctcctaatccattaaactcttgaacaggtattacaaaggaagaaaacttcaccccttatccttaacatatatagtatatttaaaaaatataaaattgtattgtactaatgtgatgatggattatttaatg

SEQ ID NO: 375334 - DNA, 248 bp, Homo sapiens
catggtgactgggtgaatgcctgggtgctgggattctcgtaacctagtttccttgcatgtgagagctgtttacatttcctttgtgtttaatctctctgtttctgtactagcctcacattaaactcaatgtgtgtgagcgcgtgtgtgtgtttgcgtgtgtgtgtgcgtgtgtatgtgtgtgttcctaataacaatgcaaatgcagcagagagctggtcttgataacttttcagcacagaaacatgatt

SEQ ID NO: 375335 - DNA, 362 bp, Homo sapiens
gtgtctagtcatatacaggtcttagcaagaaagaaagttcgagaaattcaagccgccattaaggtacgtctggcttgcccacttgtagggggcttttcatctccatggttacaggcttttcctttgttttcctcccttcccctaccctgcaggtgtctagtcacattcaggttcttgccagaaggaaatctcgtgattttcattccaagctaaaggtatgcgcttttctgctttttggcttgtggttgctatgcatctcacttcctgttttccatggtgactgggtgaatgcctgggtgctgggattctcgtaacctagtttccttgcatgtgagagctgtttacatttcctttgtgtttaa

SEQ ID NO: 375336 - DNA, 205 bp, Homo sapiens
ggaaaacttcacaattttattggtaatggttttgtctctttcctctgtgggcagatgctgccatgaggcttgacagaagtgaggaaggtgggcctgggaggcgctgggcctgcgccgagggaactgaccaggttgttggattgggttcctagtggtcagtcagcagttgaatttgcatcatccatagggaaaacttgggcttgat

SEQ ID NO: 375337 - DNA, 311 bp, Homo sapiens
aaattagcccagcatggtggcaggtgcctgtggtcctagcttactggggaggctgagctgggaggattgcttgaacccaggaggttgaggctgccgtgagctgtggctatgccactgtactccagcctgggcaacagagcaagaccctgtctccaaaaacaaaaacaaacgaaaaaacaaaacacaaaaaacccaggatgacctattagaaggctgttagagtaatccatgttggtttagactatgattatggcaagagaggtgataagaagtggtcagattgtatatatcttcttttgaaggtagagcca

SEQ ID NO: 375338 - DNA, 4136 bp, Homo sapiens
caatgttcccgagcctgatggacatatcatatcaccactgttggcaggattttatatgttttggaccatgatcattttgttacaggtcttgattcctatttctctctatgtttccatcgaaattgtgaagcttggacaaatatatttcattcaaagtgatgtggatttctacaatgaaaaaatggattctattgttcagtgccgagccctgaacatcgccgaggatctgggacagattcagtacctcttttccgataagacaggaaccctcactgagaataagatggtttttcgaagatgtagtgtggcaggatttgattactgccatgaagaaaatgccaggaggttggagtcctatcaggaagctgtctctgaagatgaagattttatagacacagtcagtggttccctcagcaatatggcaaaaccgagagcccccagctgcaggacagttcataatgggcctttgggaaataagccctcaaatcatcttgctgggagctcttttactctaggaagtggagaaggagccagtgaagtgcctcattccagacaggctgctttcagtagccccattgaaacagacgtggtaccagacaccagagcaggtcatggtggactttgctgctttgggaccattaacatttcaactcctacacatactgccctttgactcagtaagaaaaagaatgtctgttgtggtccgacaccctctttccaatcaagttgtggtgtatacgaaaggcgctgattctgtgatcatggagttactgtcggtggcttccccagatggagcaagtctggagaaacaacagatgatagtaagggagaaaacccagaagcacttggatgactatgccaaacaaggccttcgtactttatgtatagcaaagaaggtcatgagtgacactgaatatgcagagtggctgaggaatcattttttagctgaaaccagcattgacaacagggaagaattactacttgaatctgccatgaggttggagaacaaacttacattacttggtgctactggcattgaagaccgtctgcaggagggagtccctgaatctatagaagctcttcacaaagcgggcatcaagatctggatgctgacaggggacaagcaggagacagctgtcaacatagcttatgcatgcaaactactggagccagatgacaagctttttatcctcaatacccaaagtaaagatgcctgtgggatgctgatgagcacaattttgaaagaacttcagaagaaaactcaagccctgccagagcaagtgtcattaagtgaagatttacttcagcctcctgtcccccgggactcagggttacgagctggactcattatcactgggaagaccctggagtttgccctgcaagaaagtctgcaaaagcagttcctggaactgacatcttggtgtcaagctgtggtctgctgccgagccacaccgctgcagaaaagtgaagtggtgaaattggtccgcagccatctccaggtgatgacccttgctattggtgatggtgccaatgatgttagcatgatacaagtggcagacattgggataggggtctcaggtcaagaaggcatgcaggctgtgatggccagtgactttgccgtttctcagttcaaacatctcagcaagctccttcttgtccatggacactggtgttatacacggctttccaacatgattctctattttttctataagaatgtggcctatgtgaacctccttttctggtaccagttcttttgtggattttcaggaacatccatgactgattactgggttttgatcttcttcaacctcctcttcacatctgcccctcctgtcatttatggtgttttggagaaagatgtgtctgcagagaccctcatgcaactgcctgaactttacagaagtggtcagaaatcagaggcatacttaccccataccttctggatcaccttattggatgctttttatcaaagcctggtctgcttctttgtgccttattttacctaccagggctcagatactgacatctttgcatttggaaaccccctgaacacagccgctctgttcatcgttctcctccatctggtcattgaaagcaagagtttgacttggattcacttgctggtcatcattggtagcatcttgtcttattttttatttgccatagtttttggagccatgtgtgtaacttgcaacccaccatccaacccttactggattatgcaggagcacatgctggatccagtattctacttagtttgtatcctcacgacgtccattgctcttctgcccaggtttgtatacagagttcttcagggatccctgtttccatctccaattctgagagctaagcactttgacagactaactccagaggagaggactaaagctctcaagaagtggagaggggctggaaagatgaatcaagtgacatcaaagtatgctaaccaatcagctggcaagtcaggaagaagacccatgcctggcccttctgctgtatttgcaatgaagtcagcaagttcctgtgctattgagcaaggaaacttatctctgtgtgaaactgctttagatcaaggctactctgaaactaaggcctttgagatggctggaccctccaaaggtaaagaaagctagataccctccttggagttgcaagtattctttcaaggttggaagagggattttgaagaggtatctctccaagcaagaatgacttgtttttccataagggacatgagcattttactaggcttggaagagctgacatgatgagcattattgtatgtttgtatatacatttgtgatagagggctagagtttgacctagagagagtttaaggaagtgaaatatttaattcagaaccaaatgcttttgtaaaactttttggattttgtaaaagcattttcattctcttagaaattcaagtattttcaaggggagtcatttgagatatatttattttactaggagatcttatattctagggaaatgctttaaatggtcaggctccagtcggaatttttttaagaaaaaagtagtttttaatacattggttaggactcagaggaaatacggaaaaaacattgtagatggttaatttacagataaaatcccaagagccttttaaacaacaaggtacctaaaatagggtataattatactgcttaaaatacagttagtgcctattaatagctttttatttcctatgggaagatgcttttggtcttctggctgaagatgtaggcatacctctcactcatttcaatgttttcctgaggtggagccttcattggaaaggggaaagagggattctagggtttcatcagggaccaggaatgcattcctctgtcaggttccaatcaagagaagaccttttatgagatctgcctctgtatagatgttgtcagttaggaaactgaagccataggtcaggcagacatcagctcagcctgtggcccattgggtgatttcctgtattttaaaactgacagtagcctgatcaaagtgatacaatcaatttcaaaacaatcttccagagaccacttgaaggttcatagtttttacaataccctgagacttttcaggtgttggagcctctaaaatatgagatataaacagaaactaatacaagttgttctctggaggtttctatgaggttcttagaaaaatttggttttaaaatcatttgaggacaggaatgtctatagcaagtttactcctattgcgaatcatgtatgctggctttagttgtaacaaacgattttattctaagtaaggccaggtgctactataaaatcatatattcctgttgaagttcttttgaagtcctatctctatttattatatttgaaagttgtcagccaccagtcatccagaatttccttcctgaatctccatgctcatatgcaatgtctacatcaaggtcttcttaatgactattattctcagggtttagttttctaccttctgcctactattttggtctgacatttttgtagccttctgttattattggaaatagtctcttacataagctgatttcgagaactttcaaaatctcacatagctaatggaagttgctttctgctttcttatgactgtttttataaataaactgtttcataaataatgta

SEQ ID NO: 375339 - DNA, 473 bp, Homo sapiens
aatttagttttacagaattcaaatggtgatgtaattcattcacaaaaaatactcccatctccttgatatcttatattttgtttattcaggtttgttacaccattcatccagtgcttagatgtgttgtctctttaatggagcagatttgtccgggtggcaatactgtatcagtgacagagcattcatttcctctgctcttcttgtcttacagacttggattcacttgctggtcatcattggtagcatcttgtcttattttttatttgccatagtttttggagccatgtgtgtaacttgcaacccaccatccaacccttactggattatgcaggagcacatgctggatccagtattctacttagtttgtatcctcacgacgtccattgctcttctgcccaggtatggtatttattttatcattgagagaataaatggaatcataggctaagaatccttcaagcaactacactact

SEQ ID NO: 375340 - DNA, 4075 bp, Homo sapiens
caatgttcccgagcctgatggacatatcatatcaccactgttggcaggattttatatgttttggaccatgatcattttgttacaggtcttgattcctatttctctctatgtttccatcgaaattgtgaagcttggacaaatatatttcattcaaagtgatgtggatttctacaatgaaaaaatggattctattgttcagtgccgagccctgaacatcgccgaggatctgggacagattcagtacctcttttccgataagacaggaaccctcactgagaataagatggtttttcgaagatgtagtgtggcaggatttgattactgccatgaagaaaatgccaggaggttggagtcctatcaggaagctgtctctgaagatgaagattttatagacacagtcagtggttccctcagcaatatggcaaaaccgagagcccccagctgcaggacagttcataatgggcctttgggaaataagccctcaaatcatcttgctgggagctcttttactctaggaagtggagaaggagccagtgaagtgcctcattccagacaggctgctttcagtagccccattgaaacagacgtggtaccagacaccagagcaggtcatggtggactttgctgctttgggaccattaacatttcaactcctacacatactgccctttgactcagtaagaaaaagaatgtctgttgtggtccgacaccctctttccaatcaagttgtggtgtatacgaaaggcgctgattctgtgatcatggagttactgtcggtggcttccccagatggagcaagtctggagaaacaacagatgatagtaagggagaaaacccagaagcacttggatgactatgccaaacaaggccttcgtactttatgtatagcaaagaaggtcatgagtgacactgaatatgcagagtggctgaggaatcattttttagctgaaaccagcattgacaacagggaagaattactacttgaatctgccatgaggttggagaacaaacttacattacttggtgctactggcattgaagaccgtctgcaggagggagtccctgaatctatagaagctcttcacaaagcgggcatcaagatctggatgctgacaggggacaagcaggagacagctgtcaacatagcttatgcatgcaaactactggagccagatgacaagctttttatcctcaatacccaaagtaaagatgcctgtgggatgctgatgagcacaattttgaaagaacttcagaagaaaactcaagccctgccagagcaagtgtcattaagtgaagatttacttcagcctcctgtcccccgggactcagggttacgagctggactcattatcactgggaagaccctggagtttgccctgcaagaaagtctgcaaaagcagttcctggaactgacatcttggtgtcaagctgtggtctgctgccgagccacaccgctgcagaaaagtgaagtggtgaaattggtccgcagccatctccaggtgatgacccttgctattggtgatggtgccaatgatgttagcatgatacaagtggcagacattgggataggggtctcaggtcaagaaggcatgcaggctgtgatggccagtgactttgccgtttctcagttcaaacatctcagcaagctccttcttgtccatggacactggtgttatacacggctttccaacatgattctctattttttctataagaatgtggcctatgtgaacctccttttctggtaccagttcttttgtggattttcaggaacatccatgactgattactgggttttgatcttcttcaacctcctcttcacatctgcccctcctgtcatttatggtgttttggagaaagatgtgtctgcagagaccctcatgcaactgcctgaactttacagaagtggtcagaaatcagaggcatacttaccccataccttctggatcaccttattggatgctttttatcaaagcctggtctgcttctttgtgccttattttacctaccagggctcagatactgacatctttgcatttggaaaccccctgaacacagccgctctgttcatcgttctcctccatctggtcattgaaagcaagagtttgtttttggagccatgtgtgtaacttgcaacccaccatccaacccttactggattatgcaggagcacatgctggatccagtattctacttagtttgtatcctcacgacgtccattgctcttctgcccaggtttgtatacagagttcttcagggatccctgtttccatctccaattctgagagctaagcactttgacagactaactccagaggagaggactaaagctctcaagaagtggagaggggctggaaagatgaatcaagtgacatcaaagtatgctaaccaatcagctggcaagtcaggaagaagacccatgcctggcccttctgctgtatttgcaatgaagtcagcaagttcctgtgctattgagcaaggaaacttatctctgtgtgaaactgctttagatcaaggctactctgaaactaaggcctttgagatggctggaccctccaaaggtaaagaaagctagataccctccttggagttgcaagtattctttcaaggttggaagagggattttgaagaggtatctctccaagcaagaatgacttgtttttccataagggacatgagcattttactaggcttggaagagctgacatgatgagcattattgtatgtttgtatatacatttgtgatagagggctagagtttgacctagagagagtttaaggaagtgaaatatttaattcagaaccaaatgcttttgtaaaactttttggattttgtaaaagcattttcattctcttagaaattcaagtattttcaaggggagtcatttgagatatatttattttactaggagatcttatattctagggaaatgctttaaatggtcaggctccagtcggaatttttttaagaaaaaagtagtttttaatacattggttaggactcagaggaaatacggaaaaaacattgtagatggttaatttacagataaaatcccaagagccttttaaacaacaaggtacctaaaatagggtataattatactgcttaaaatacagttagtgcctattaatagctttttatttcctatgggaagatgcttttggtcttctggctgaagatgtaggcatacctctcactcatttcaatgttttcctgaggtggagccttcattggaaaggggaaagagggattctagggtttcatcagggaccaggaatgcattcctctgtcaggttccaatcaagagaagaccttttatgagatctgcctctgtatagatgttgtcagttaggaaactgaagccataggtcaggcagacatcagctcagcctgtggcccattgggtgatttcctgtattttaaaactgacagtagcctgatcaaagtgatacaatcaatttcaaaacaatcttccagagaccacttgaaggttcatagtttttacaataccctgagacttttcaggtgttggagcctctaaaatatgagatataaacagaaactaatacaagttgttctctggaggtttctatgaggttcttagaaaaatttggttttaaaatcatttgaggacaggaatgtctatagcaagtttactcctattgcgaatcatgtatgctggctttagttgtaacaaacgattttattctaagtaaggccaggtgctactataaaatcatatattcctgttgaagttcttttgaagtcctatctctatttattatatttgaaagttgtcagccaccagtcatccagaatttccttcctgaatctccatgctcatatgcaatgtctacatcaaggtcttcttaatgactattattctcagggtttagttttctaccttctgcctactattttggtctgacatttttgtagccttctgttattattggaaatagtctcttacataagctgatttcgagaactttcaaaatctcacatagctaatggaagttgctttctgctttcttatgactgtttttataaataaactgtttcataaataatgta

SEQ ID NO: 375341 - DNA, 2557 bp, Homo sapiens
caatgttcccgagcctgatggacatatcatatcaccactgttggcaggattttatatgttttggaccatgatcattttgttacaggtcttgattcctatttctctctatgtttccatcgaaattgtgaagcttggacaaatatatttcattcaaagtgatgtggatttctacaatgaaaaaatggattctattgttcagtgccgagccctgaacatcgccgaggatctgggacagattcagtacctcttttccgataagacaggaaccctcactgagaataagatggtttttcgaagatgtagtgtggcaggatttgattactgccatgaagaaaatgccaggaggttggagtcctatcaggaagctgtctctgaagatgaagattttatagacacagtcagtggttccctcagcaatatggcaaaaccgagagcccccagctgcaggacagttcataatgggcctttgggaaataagccctcaaatcatcttgctgggagctcttttactctaggaagtggagaaggagccagtgaagtgcctcattccagacaggctgctttcagtagccccattgaaacagacgtggtaccagacaccagagcaggtcatggtggactttgctgctttgggaccattaacatttcaactcctacacatactgccctttgactcagtaagaaaaagaatgtctgttgtggtccgacaccctctttccaatcaagttgtggtgtatacgaaaggcgctgattctgtgatcatggagttactgtcggtggcttccccagatggagcaagtctggagaaacaacagatgatagtaagggagaaaacccagaagcacttggatgactatgccaaacaaggccttcgtactttatgtatagcaaagaaggtcatgagtgacactgaatatgcagagtggctgaggaatcattttttagctgaaaccagcattgacaacagggaagaattactacttgaatctgccatgaggttggagaacaaacttacattacttggtgctactggcattgaagaccgtctgcaggagggagtccctgaatctatagaagctcttcacaaagcgggcatcaagatctggatgctgacaggggacaagcaggagacagctgtcaacatagcttatgcatgcaaactactggagccagatgacaagctttttatcctcaatacccaaagtaaagatgcctgtgggatgctgatgagcacaattttgaaagaacttcagaagaaaactcaagccctgccagagcaagtgtcattaagtgaagatttacttcagcctcctgtcccccgggactcagggttacgagctggactcattatcactgggaagaccctggagtttgccctgcaagaaagtctgcaaaagcagttcctggaactgacatcttggtgtcaagctgtggtctgctgccgagccacaccgctgcagaaaagtgaagtggtgaaattggtccgcagccatctccaggtgatgacccttgctattggtgatggtgccaatgatgttagcatgatacaagtggcagacattgggataggggtctcaggtcaagaaggcatgcaggctgtgatggccagtgactttgccgtttctcagttcaaacatctcagcaagctccttcttgtccatggacactggtgttatacacggctttccaacatgattctctattttttctataagaatgtggcctatgtgaacctccttttctggtaccagttcttttgtggattttcaggaacatccatgactgattactgggttttgatcttcttcaacctcctcttcacatctgcccctcctgtcatttatggtgttttggagaaagatgtgtctgcagagaccctcatgcaactgcctgaactttacagaagtggtcagaaatcagaggcatacttaccccataccttctggatcaccttattggatgctttttatcaaagcctggtctgcttctttgtgccttattttacctaccagggctcagatactgacatctttgcatttggaaaccccctgaacacagccgctctgttcatcgttctcctccatctggtcattgaaagcaagagtttgaccaggtgcagtgactcacacctgcaattccagagctttgggaggctgtggatcacatgaagctaagagttcaagaccagcctgggcaacatagtgagaccctgtctctaaaaaaaataacaaaactaactgtgtgtcatggcacctgccagcagtcttggccacttgggagactgaggaggaggctcacttgagcccaacagttggaggctgcagtaagctatgatcatgccactgcactccagcttgggaaacagagagaaaccttgtctctaaaaacaaaaaagtgtgattatcttattcatgtttatcttccgcattagcctatgctctctgcgagggtagggttcatgcctattttgttcaccactgtataccagtgttaaaggacaagactgacacacagcaggtgctcaaaaaatatttgaatggataaataaatgatgaaa

SEQ ID NO: 375342 - DNA, 4673 bp, Homo sapiens
caatgttcccgagcctgatggacatatcatatcaccactgttggcaggattttatatgttttggaccatgatcattttgttacaggtcttgattcctatttctctctatgtttccatcgaaattgtgaagcttggacaaatatatttcattcaaagtgatgtggatttctacaatgaaaaaatggattctattgttcagtgccgagccctgaacatcgccgaggatctgggacagattcagtacctcttttccgataagacaggaaccctcactgagaataagatggtttttcgaagatgtagtgtggcaggatttgattactgccatgaagaaaatgccaggaggttggagtcctatcaggaagctgtctctgaagatgaagattttatagacacagtcagtggttccctcagcaatatggcaaaaccgagagcccccagctgcaggacagttcataatgggcctttgggaaataagccctcaaatcatcttgctgggagctcttttactctaggaagtggagaaggagccagtgaagtgcctcattccagacaggctgctttcagtagccccattgaaacagacgtggtaccagacaccagagcaggtcatggtggactttgctgctttgggaccattaacatttcaactcctacacatactgccctttgactcagtaagaaaaagaatgtctgttgtggtccgacaccctctttccaatcaagttgtggtgtatacgaaaggcgctgattctgtgatcatggagttactgtcggtggcttccccagatggagcaagtctggagaaacaacagatgatagtaagggagaaaacccagaagcacttggatgactatgccaaacaaggccttcgtactttatgtatagcaaagaaggtcatgagtgacactgaatatgcagagtggctgaggaatcattttttagctgaaaccagcattgacaacagggaagaattactacttgaatctgccatgaggttggagaacaaacttacattacttggtgctactggcattgaagaccgtctgcaggagggagtccctgaatctatagaagctcttcacaaagcgggcatcaagatctggatgctgacaggggacaagcaggagacagctgtcaacatagcttatgcatgcaaactactggagccagatgacaagctttttatcctcaatacccaaagtaaagatgcctgtgggatgctgatgagcacaattttgaaagaacttcagaagaaaactcaagccctgccagagcaagtgtcattaagtgaagatttacttcagcctcctgtcccccgggactcagggttacgagctggactcattatcactgggaagaccctggagtttgccctgcaagaaagtctgcaaaagcagttcctggaactgacatcttggtgtcaagctgtggtctgctgccgagccacaccgctgcagaaaagtgaagtggtgaaattggtccgcagccatctccaggtgatgacccttgctattggtgatggtgccaatgatgttagcatgatacaagtggcagacattgggataggggtctcaggtcaagaaggcatgcaggctgtgatggccagtgactttgccgtttctcagttcaaacatctcagcaagctccttcttgtccatggacactggtgttatacacggctttccaacatgattctctattttttctataagaatgtggcctatgtgaacctccttttctggtaccagttcttttgtggattttcaggaacatccatgactgattactgggttttgatcttcttcaacctcctcttcacatctgcccctcctgtcatttatggtgttttggagaaagatgtgtctgcagagaccctcatgcaactgcctgaactttacagaagtggtcagaaatcagaggcatacttaccccataccttctggatcaccttattggatgctttttatcaaagcctggtctgcttctttgtgccttattttacctaccagggctcagatactgacatctttgcatttggaaaccccctgaacacagccgctctgttcatcgttctcctccatctggtcattgaaagcaagagtttgacttggattcacttgctggtcatcattggtagcatcttgtcttattttttatttgccatagtttttggagccatgtgtgtaacttgcaacccaccatccaacccttactggattatgcaggagcacatgctggatccagtattctacttagtttgtatcctcacgacgtccattgctcttctgcccaggtttgtatacagagttcttcagggatccctgtttccatctccaattctgagagctaagcactttgacagactaactccagaggagaggactaaagctctcaagaagtggagaggggctggaaagatgaatcaagtgacatcaaagtatgctaaccaatcagctggcaagtcaggaagaagacccatgcctggcccttctgctgtatttgcaatgaagtcagcaagttcctgtgctattgagcaaggaaacttatctctgtgtgaaactgctttagatcaaggctactctgaaactaaggcctttgagatggctggaccctccaaaggtaaagaaagctagataccctccttggagttgcaagtattctttcaaggttggaagagggattttgaagaggtatctctccaagcaagaatgacttgtttttccataagggacatgagcattttactaggcttggaagagctgacatgatgagcattattgtatgtttgtatatacatttgtgatagagggctagagtttgacctagagagagtttaaggaagtgaaatatttaattcagaaccaaatgcttttgtaaaactttttggattttgtaaaagcattttcattctcttagaaattcaagtattttcaaggggagtcatttgagatatatttattttactaggagatcttatattctagggaaatgctttaaatggtcaggctccagtcggaatttttttaagaaaaaagtagtttttaatacattggttaggactcagaggaaatacggaaaaaacattgtagatggttaatttacagataaaatcccaagagccttttaaacaacaaggtacctaaaatagggtataattatactgcttaaaatacagttagtgcctattaatagctttttatttcctatgggaagatgcttttggtcttctggctgaagatgtaggcatacctctcactcatttcaatgttttcctgaggtggagccttcattggaaaggggaaagagggattctagggtttcatcagggaccaggaatgcattcctctgtcaggttccaatcaagagaagaccttttatgagatctgcctctgtatagatgttgtcagttaggaaactgaagccataggtcaggcagacatcagctcagcctgtggcccattgggtgatttcctgtattttaaaactgacagtagcctgatcaaagtgatacaatcaatttcaaaacaatcttccagagaccacttgaaggttcatagtttttacaataccctgagacttttcaggtgttggagcctctaaaatatgagatataaacagaaactaatacaagttgttctctggaggtttctatgaggttcttagaaaaatttggttttaaaatcatttgaggacaggaatgtctatagcaagtttactcctattgcgaatcatgtatgctggctttagttgtaacaaacgattttattctaagtaaggccaggtgctactataaaatcatatattcctgttgaagttcttttgaagtcctatctctatttattatatttgaaagttgtcagccaccagtcatccagaatttccttcctgaatctccatgctcatatgcaatgtctacatcaaggtcttcttaatgactattattctcagggtttagttttctaccttctgcctactattttggtctgacatttttgtagccttctgttattattggaaatagtctcttacataagctgatttcgagaactttcaaaatctcacatagctaatggaagttgctttctgctttcttatgactgtttttataaataaactgtttcataaataatgtatactggaaaattgtcatcactcttgtaaacatttgccaaatccaactgtaattagtaccagaacttagaaggaaagtcacaaagcatgccttttaccagaatattgctttgccttttcttatatggaaaatcactgatgtcatatcatttattatcctcacagcagctggcattcattccctgaaatcgtcgtctcctgataaacaataatttagagatatgttcacttgtaaataaaaaggttagaatctaaggacaaagaatgatccaaaaatactaaggaaaaagaacaattttcaattttcagaaatgaattatctgtacatatgaatagaggaaaatactgagtgctaatgttacagggccacaatctcatatccacaattccaaaatctccaaacctctgaaaactgaaatatttttcataaattaggcgtaaattctatgccctgaacaaatgtaaagctatttatgtactttgcttaatgtaatcattcatatactttgctacaaaaatattaatatatttcattactg

SEQ ID NO: 375343 - DNA, 4409 bp, Homo sapiens
  misc_feature (4324)..(4324): n is a, c, g, or t
caatgttcccgagcctgatggacatatcatatcaccactgttggcaggattttatatgttttggaccatgatcattttgttacaggtcttgattcctatttctctctatgtttccatcgaaattgtgaagcttggacaaatatatttcattcaaagtgatgtggatttctacaatgaaaaaatggattctattgttcagtgccgagccctgaacatcgccgaggatctgggacagattcagtacctcttttccgataagacaggaaccctcactgagaataagatggtttttcgaagatgtagtgtggcaggatttgattactgccatgaagaaaatgccaggaggttggagtcctatcaggaagctgtctctgaagatgaagattttatagacacagtcagtggttccctcagcaatatggcaaaaccgagagcccccagctgcaggacagttcataatgggcctttgggaaataagccctcaaatcatcttgctgggagctcttttactctaggaagtggagaaggagccagtgaagtgcctcattccagacaggctgctttcagtagccccattgaaacagacgtggtaccagacaccagagcaggtcatggtggactttgctgctttgggaccattaacatttcaactcctacacatactgccctttgactcagtaagaaaaagaatgtctgttgtggtccgacaccctctttccaatcaagttgtggtgtatacgaaaggcgctgattctgtgatcatggagttactgtcggtggcttccccagatggagcaagtctggagaaacaacagatgatagtaagggagaaaacccagaagcacttggatgactatgccaaacaaggccttcgtactttatgtatagcaaagaaggtcatgagtgacactgaatatgcagagtggctgaggaatcattttttagctgaaaccagcattgacaacagggaagaattactacttgaatctgccatgaggttggagaacaaacttacattacttggtgctactggcattgaagaccgtctgcaggagggagtccctgaatctatagaagctcttcacaaagcgggcatcaagatctggatgctgacaggggacaagcaggagacagctgtcaacatagcttatgcatgcaaactactggagccagatgacaagctttttatcctcaatacccaaagtaaagatgcctgtgggatgctgatgagcacaattttgaaagaacttcagaagaaaactcaagccctgccagagcaagtgtcattaagtgaagatttacttcagcctcctgtcccccgggactcagggttacgagctggactcattatcactgggaagaccctggagtttgccctgcaagaaagtctgcaaaagcagttcctggaactgacatcttggtgtcaagctgtggtctgctgccgagccacaccgctgcagaaaagtgaagtggtgaaattggtccgcagccatctccaggtgatgacccttgctattggtgatggtgccaatgatgttagcatgatacaagtggcagacattgggataggggtctcaggtcaagaaggcatgcaggctgtgatggccagtgactttgccgtttctcagttcaaacatctcagcaagctccttcttgtccatggacactggtgttatacacggctttccaacatgattctctattttttctataagaatgtggcctatgtgaacctccttttctggtaccagttcttttgtggattttcaggaacatccatgactgattactgggttttgatcttcttcaacctcctcttcacatctgcccctcctgtcatttatggtgttttggagaaagatgtgtctgcagagaccctcatgcaactgcctgaactttacagaagtggtcagaaatcagaggcatacttaccccataccttctggatcaccttattggatgctttttatcaaagcctggtctgcttctttgtgccttattttacctaccagggctcagatactgacatctttgcatttggaaaccccctgaacacagccgctctgttcatcgttctcctccatctggtcattgaaagcaagagtttgacttggattcacttgctggtcatcattggtagcatcttgtcttattttttatttgccatagtttttggagccatgtgtgtaacttgcaacccaccatccaacccttactggattatgcaggagcacatgctggatccagtattctacttagtttgtatcctcacgacgtccattgctcttctgcccaggtttgtatacagagttcttcagggatccctgtttccatctccaattctgagagctaagcactttgacagactaactccagaggagaggactaaagctctcaagaagtggagaggggctggaaagatgaatcaagtgacatcaaagtatgctaaccaatcagctggcaagtcaggaagaagacccatgcctggcccttctgctgtatttgcaatgaagtcagcaagttcctgtgctattgagcaaggaaacttatctctgtgtgaaactgctttagatcaaggctactctgaaactaaggcctttgagatggctggaccctccaaaggtaaagaaagctagataccctccttggagttgcaagtattctttcaaggttggaagagggattttgaagaggtatctctccaagcaagaatgacttgtttttccataagggacatgagcattttactaggcttggaagagctgacatgatgagcattattgtatgtttgtatatacatttgtgatagagggctagagtttgacctagagagagtttaaggaagtgaaatatttaattcagaaccaaatgcttttgtaaaactttttggattttgtaaaagcattttcattctcttagaaattcaagtattttcaaggggagtcatttgagatatatttattttactaggagatcttatattctagggaaatgctttaaatggtcaggctccagtcggaatttttttaagaaaaaagtagtttttaatacattggttaggactcagaggaaatacggaaaaaacattgtagatggttaatttacagataaaatcccaagagccttttaaacaacaaggtacctaaaatagggtataattatactgcttaaaatacagttagtgcctattaatagctttttatttcctatgggaagatgcttttggtcttctggctgaagatgtaggcatacctctcactcatttcaatgttttcctgaggtggagccttcattggaaaggggaaagagggattctagggtttcatcagggaccaggaatgcattcctctgtcaggttccaatcaagagaagaccttttatgagatctgcctctgtatagatgttgtcagttaggaaactgaagccataggtcaggcagacatcagctcagcctgtggcccattgggtgatttcctgtattttaaaactgacagtagcctgatcaaagtgatacaatcaatttcaaaacaatcttccagagaccacttgaaggttcatagtttttacaataccctgagacttttcaggtgttggagcctctaaaatatgagatataaacagaaactaatacaagttgttctctggaggtttctatgaggttcttagaaaaatttggttttaaaatcatttgaggacaggaatgtctatagcaagtttactcctattgcgaatcatgtatgctggctttagttgtaacaaacgattttattctaagtaaggccaggtgctactataaaatcatatattcctgttgaagttcttttgaagtcctatctctatttattatatttgaaagttgtcagccaccagtcatccagaatttccttcctgaatctccatgctcatatgcaatgtctacatcaaggtcttcttaatgactattattctcagggtttagttttctaccttctgcctactattttggtctgacatttttgtagccttctgttattattggaaatagtctcttacataagctgatttcgagaactttcaaaatctcacatagctaatggaagttgctttctgctttcttatgactgtttttataaataaactgtttcataaataatgtaaaaaaaaaaaaaaaggaaaaaaaaaattttgggggggatgggcctggaaaggtttttaaacaccattgtgtgtgggcggggggccccagatgggtacacgtaacacggggcacaaaagggtcccagagggagacccggggcgagaacaaacgcctgggattcccaccaattaaagagcggccgggganaccggagcgctttggacaactcaagagagaatcaagaggaccaaggggactttcacaagggggtcacaggaagtcgaattaaatg

SEQ ID NO: 375344 - DNA, 468 bp, Homo sapiens
gacacccaatacaatctcttgttaggaaaaaagaagaatgaatggcacgaggcagtcaatggctcgtagaaagtatgaaatcttgatggggagtcactgcaaaggccgcataccctgagatgaaaaaatagtcttaattatatccaaaatcttatttctggcaagaattgttctctgaaaaccctggtttggccctcttggaagtatgtctttatttgatacccattattatctaattatgtaggaaaaatgtctggcttccttgggagctgagcaaattttgtccctttatgcttgtagctcttttttatttgtttctagctagtttcttcccctagtaactccatacaaagctgttttctagattgtgccttgaggtttgactatttcattgctttctcaccccatctctctctttctcaaagtaataacaaggtaattgaggctatctgaaacaatagggttggg

SEQ ID NO: 375345 - DNA, 7334 bp, Homo sapiens
gcgaggaggaaacggtgccggagcgcgcagggcttgctgccgccaccgccgctgcacaggctgccggagcgagcctgccgcgcgccgccctccccgctctccttcctgggcgagctgcggggatggggcggccgcgggagcccgagcgcgcgcaggaaccgccgccgccgccgcccgcgtctccgttgccgcgcgcctgagccgccgtcgccgccgcgcgccctgcccgggggcggcccccccagccccatggaggtctcccggaggaaggcgccgccgcgccccccgcgccccgcagcgccactgcccctgctcgcctatctgctggcactggcggctcccggccggggcgcggacgagcccgtgtggcggtcggagcaagccatcggagccatcgcggcgagccaggaggacggcgtgtttgtggcgagcggcagctgcctggaccagctggactacagcctggagcacagcctctcgcgcctgtaccgggaccaagcgggcaactgcacagagccggtctcgctggcgccccccgcgcggccccggcccgggagcagcttcagcaagctgctgctgccctaccgcgagggggcggccggcctcggggggctgctgctcaccggctggaccttcgaccggggcgcctgcgaggtgcggcccctgggcaacctgagccgcaactccctgcgcaacggcaccgaggtggtgtcgtgccacccgcagggctcgacggccggcgtggtgtaccgcgcgggccggaacaaccgctggtacctggcggtggccgccacctacgtgctgcctgagccggagacggcgagccgctgcaaccccgcggcatccgaccacgacacggccatcgcgctcaaggacacggaggggcgcagcctggccacgcaggagctggggcgcctcaagctgtgcgagggcgcgggcagcctgcacttcgtggacgcctttctctggaacggcagcatctacttcccctactacccctacaactatacgagcggcgctgccaccggctggcccagcatggcgcgcatcgcgcagagcaccgaggtgctgttccagggccaggcatccctcgactgcggccacggccaccccgacggccgccgcctgctcctctcctccagcctagtggaggccctggacgtctgggcgggagtgttcagcgcggccgctggagagggccaggagcggcgctcccccaccaccacggcgctctgcctcttcagaatgagtgagatccaggcgcgcgccaagagggtcagctgggacttcaagacggccgagagccactgcaaagaaggggatcaacctgaaagagtccaaccaatcgcatcatctaccttgatccattccgacctgacatccgtttatggcaccgtggtaatgaacaggactgttttattcttggggactggagatggccagttacttaaggttattcttggtgagaatttgacttcaaattgtccagaggttatctatgaaattaaagaagagacacctgttttctacaaactcgttcctgatcctgtgaagaatatctacatttatctaacagctgggaaagaggtgaggagaattcgtgttgcaaactgcaataaacataaatcctgttcggagtgtttaacagccacagaccctcactgcggttggtgccattcgctacaaaggtgcacttttcaaggagattgtgtacattcagagaacttagaaaactggctggatatttcgtctggagcaaaaaagtgccctaaaattcagataattcgaagcagtaaagaaaagactacagtgactatggtgggaagcttctctccaagacactcaaagtgcatggtgaagaatgtggactctagcagggagctctgccagaataaaagtcagcccaaccggacctgcacctgtagcatcccaaccagagcaacctacaaagatgtttcagttgtcaacgtgatgttctccttcggttcttggaatttatcagacagattcaactttaccaactgctcatcattaaaagaatgcccagcatgcgtagaaactggctgcgcgtggtgtaaaagtgcaagaaggtgtatccaccccttcacagcttgcgacccttctgattatgagagaaaccaggaacagtgtccagtggctgtcgagaagacatcaggaggaggaagacccaaggagaacaaggggaacagaaccaaccaggctttacaggtcttctacattaagtccattgagccacagaaagtatcgacattagggaaaagcaacgtgatagtaacgggagcaaactttacccgggcatcgaacatcacaatgatcctgaaaggaaccagtacctgtgataaggatgtgatacaggttagccatgtgctaaatgacacccacatgaaattctctcttccatcaagccggaaagaaatgaaggatgtgtgtatccagtttgatggtgggaactgctcttctgtgggatccttatcctacattgctctgccacattgttcccttatatttcctgctaccacctggatcagtggtggtcaaaatataaccatgatgggcagaaattttgatgtaattgacaacttaatcatttcacatgaattaaaaggaaacataaatgtctctgaatattgtgtggcgacttactgcgggtttttagcccccagtttaaagagttcaaaagtgcgcacgaatgtcactgtgaagctgagagtacaagacacctacttggattgtggaaccctgcagtatcgggaggaccccagattcacggggtatcgggtggaatccgaggtggacacagaactggaagtgaaaattcaaaaagaaaatgacaacttcaacatttccaaaaaagacattgaaattactctcttccatggggaaaatgggcaattaaattgcagttttgaaaatattactagaaatcaagatcttaccaccatcctttgcaaaattaaaggcatcaagactgcaagcaccattgccaactcttctaagaaagttcgggtcaagctgggaaacctggagctctacgtcgagcaggagtcagttccttccacatggtattttctgattgtgctccctgtcttgctagtgattgtcatttttgcggccgtgggggtgaccaggcacaaatcgaaggagctgagtcgcaaacagagtcaacaactagaattgctggaaagcgagctccggaaagagatacgtgacggctttgctgagctgcagatggataaattggatgtggttgatagttttggaactgttcccttccttgactacaaacattttgctctgagaactttcttccctgagtcaggtggcttcacccacatcttcactgaagatatgcataacagagacgccaacgacaagaatgaaagtctcacagctttggatgccctaatctgtaataaaagctttcttgttactgtcatccacacccttgaaaagcagaagaacttttctgtgaaggacaggtgtctgtttgcctccttcctaaccattgcactgcaaaccaagctggtctacctgaccagcatcctagaggtgctgaccagggacttgatggaacagtgtagtaacatgcagccgaaactcatgctgagacgcacggagtccgtcgtcgaaaaactcctcacaaactggatgtccgtctgcctttctggatttctccgggagactgtcggagagcccttctatttgctggtgacgactctgaaccagaaaattaacaagggtcccgtggatgtaatcacttgcaaagccctgtacacacttaatgaagactggctgttgtggcaggttccggaattcagtactgtggcattaaacgtcgtctttgaaaaaatcccggaaaacgagagtgcagatgtctgtcggaatatttcagtcaatgttctcgactgtgacaccattggccaagccaaagaaaagattttccaagcattcttaagcaaaaatggctctccttatggacttcagcttaatgaaattggtcttgagcttcaaatgggcacacgacagaaagaacttctggacatcgacagttcctccgtgattcttgaagatggaatcaccaagctaaacaccattggccactatgagatatcaaatggatccactataaaagtctttaagaagatagcaaattttacttcagatgtggagtactcggatgaccactgccatttgattttaccagattcggaagcattccaagatgtgcaaggaaagagacatcgagggaagcacaagttcaaagtaaaagaaatgtatctgacaaagctgctgtcgaccaaggtggcaattcattctgtgcttgaaaaactttttagaagcatttggagtttacccaacagcagagctccatttgctataaaatacttttttgactttttggacgcccaggctgaaaacaaaaaaatcacagatcctgacgtcgtacatatttggaaaacaaacagccttcctcttcgcttctgggtaaacatcctgaagaaccctcagtttgtctttgacattaagaagacaccacatatagacggctgtttgtcagtgattgcccaggcattcatggatgcattttctctcacagagcagcaactagggaaggaagcaccaactaataagcttctctatgccaaggatatcccaacctacaaagaagaagtaaaatcttattacaaagcaatcagggatttgcctccattgtcatcctcagaaatggaagaatttttaactcaggaatctaagaaacatgaaaatgaatttaatgaagaagtggccttgacagaaatttacaaatacatcgtaaaatattttgatgagattctaaataaactagaaagagaacgagggctggaagaagctcagaaacaactcttgcatgtaaaagtcttatttgatgaaaagaagaaatgcaagtggatgtaagcactctggggcctggcttaatctggcaaagttcttcagacgacttgggagcaaaatggctgcttgagctactctgtgtcgttaatttgttgtttgcacataggttccactttgggcactgtctttttaagagaccaaggcacatgcacagcttttagaaagcataccaacccttgtgcctgtgtgtataccgtgggaacccttctgtaaatagagttgaagtggttgttgcaaacagcctccttgtttacagagaatacaaggccagtaagcgaatgtcagtattgtaactacagtctccacttaagcacaatgatataagtggttttgtttgaaaactacagctatgtagcacttgtgctacactgcacctctgcattgtaaagggatactgccagtgctcaaaacaaaatgtgaaatgagtcatttggaaacaaggtgggggtgttagggcaacctcgaggatttgcagcattgaaactttccccagtagttcttggaaaagctgaccgcagaatttggtagtgtacacttagcatttgtgagtgtgtgtgtgtgtttaaaccaaaaactaacagtgttgcaacattgttgaaagggctcgtgtttttcagtggtcatcaactgcactccatcaaactcacctccatttcaccaaggagctctaaagtaaggagagtgggctttatttaaatgaacagcattttaaccagatactttgtcctaatgtatgttccttttcttcatctgttttttcatactaaatgtatttgatagtggacatgttggatattatacaaaaaaatcattaattcatttctgttccaaaacctttgatcagaacgatctgtggaagagtaactccatttctatatgagtgagtgtctccttgctttagatttctggtgaaccctgtggttatgaatacttgtgtgtgatttaaaaaaaaaaagatacattttacatttcatcgaattgctgttcacactggagtattatatataaatatatatatttgaggcccaaggcctggaaaaatattagtatacaacttggtatcttagtcttactatgtactttttgaaagtattcctcgcaggagaaagaatttaaaatacccattttattcatgcctttctttttaaagaattctctatccagttatactgtagtctttttagtgctgattttttaattcctgaatttttgctgctcatgaccagttttaataccactgtgttttccttctattaaaccagaagaagtaaacagcataattggcaactcttgagcttttcttgtggcaggcaccttttacccttggtgctccaaatcccccatctaggaaagaaaattttttcaagtcaaataacattgatcacatattccttgaaatcatttaccaacactgtatggagcattaggatttaaatatgaatttgtcttaaaggcaattcctttttgcttctgtattatctggaaaagcatgagagaggtgacacctcaacaaactgatcagagaaaataagcagttactaccctgataggcaccttcccaatcctgttgcttttgaccattgtctgtccaacggacacacctcaaacaaacaaaactaccaaatagatgacagatcagaataaaggtgagaggtctggtccccattgaaggctgctacagtcttcaaagaggtgaaggagttcataagagaacaacagtaggaaagttgagagccaagggtaggagagttgcccaaaagacttcccctactactttagggtactgaaaactcaaaggatcagctacagctttatctaagtatttactaaatgctacatgagggtgtccctgtccagctttctggcacatgagtcctgtgtggagagttacctcctcttccagggactgtgctgttgggaactttgggcaagtcacttacctctttgtgcctcaatttctgtataatatttctaagctacctcactgaggtggtatgaagattcactaatgtatgtagcgtgtttgtcaatcctccagtgaaaagcactatctagatcacattttggatcacattagccaaatgcagtaaatggccaaattagatgtgtgctgaagacaatcagtcactgggtctatattaaacagcaaccagagcaacaaatggcaaacaatttctattttcaagtttctttgcatatttttttggtgcaaaaccatttataaacttttttttctaacactagtgtctacagcagcattcaaaaaaattctgttaccttttctgtattaggatttaaagtctatttcttattgtatacctgattgaagctgttcttggagatgaatgttttaaatgtctatatccaaaaaataaacattt

SEQ ID NO: 375346 - DNA, 520 bp, Homo sapiens
tgccttcttttaaatgcttgcatgccacatcacagagggaaattctaggatgtgaacattgtcctaaaacgcaggaattaagtcagttttctgtgttgctagatgcccagcatgcgtagaaactggctgcgcgtggtgtaaaagtgcaagaaggtgtatccaccccttcacagcttgcgacccttctgattatgagagaaaccaggaacagtgtccagtggctgtcgagaagacatcaggaggaggaagacccaaggagaacaaggggaacagaaccaaccaggctttacaggtcagaccctatttttgtgtggttgaggggaaaacctgtctttgaatgaccatgaccacaactcatactactttgggttccttaaaaaaattctctattttactttctaccaaaattcccttttgtgtctttggttttttaaccaagtttcacttaattagcgcaatacatcaatggctggacactcacataaaataaattaaaactctgtaattatgaaaaatgatg

SEQ ID NO: 375347 - DNA, 4110 bp, Homo sapiens
tgtgacagtctcactctgtcacccaggctggagtgcagtggcgcaatcttggctcactgcaacctccgcctcccagattcaagtgattaaccctcagtttgtctttgacattaagaagacaccacatatagacggctgtttgtcagtgattgcccaggcattcatggatgcattttctctcacagagcagcaactagggaaggaagcaccaactaataagcttctctatgccaaggatatcccaacctacaaagaagaagtaaaatcttattacaaagcaatcagggatttgcctccattgtcatcctcagaaatggaagaatttttaactcaggaatctaaggtatcattagaaagcagaaataagcttatatttggttactttacgtcatttcagaatctctcaacaagtctttcttttagaaacatgaaaatgaatttaatgaagaagtggccttgacagaaatttacaaatacatcgtaaaatattttgatgaggtaagattttaaataacattgtttttaacctttgaatcaggcacaaggatgtggttatagcattctgtcagtttcagaacagctctggcatcccaaaaggccagaaagggaagccaggaagcctgtctgagatgggggatcctggcactgagccagaccctgtacatggctgccccccttacagttttatcatgctgcccacatttggaccagcctgaatttacatttgagttcatggggcctacagccaccctgactcaagttaactttgatgagtaagtagtggccctattaaatggggtcagcttatgcttgattgtaatttgctaaaaatgaaagctaagcttgttaaattgcctagattctgtattcaatcgttatatgaaattatgacatatttctaacttaagcgactatttcaataaaccattctcctttatgattaattctccttaatctgggtttttttctttggaaattcaaacagacacattcatcagatgctttgtttccaaacaaatgttaactcccccttccctgattcccccccaatcatgctgggacaggctatccatgtcaatggtgagaatagctcaccaattccatttgctacttgaagatgaagtgaagctctaaggtagggtagaggcaatgagttcttaaacatgataagcatccctcgttccaggggtcaggggagagaagggaagcacgaggagggactacactgcccagatgggagggaagggaaggatctgtctctgaccaggatgtccctgcctgctgcatttaaggagaaatacttgcctgcatgttggctgcccaggaatgcttgctgtgcttggaatggctgtgacataatgcataaagcagggcctaggaagcctggccccatatttgtaagcaaatagttggtatttcttgcgagcttctattttaagccaaggtattgttgatcctgtgataaggacttagcaaaacaacttgcaaagtgagtatgtaaatgatggaagaaaatgttggcatctgtttcatacagattttaccactcacagcatcaggtatgcaaaaaacagaattgtaacgctaaaaccacaatatctaaaataactgttctaattgtcaacagattctaaataaactagaaagagaacgagggctggaagaagctcagaaacaactcttgcatgtaaaagtcttatttgatgaaaagaagaaatgcaagtggatgtaagcactctggggcctggcttaatctggcaaagttcttcagacgacttgggagcaaaatggctgcttgagctactctgtgtcgttaatttgttgtttgcacataggttccactttgggcactgtctttttaagagaccaaggcacatgcacagcttttagaaagcataccaacccttgtgcctgtgtgtataccgtgggaacccttctgtaaatagagttgaagtggttgttgcaaacagcctccttgtttacagagaatacaaggccagtaagcgaatgtcagtattgtaactacagtctccacttaagcacaatgatataagtggttttgtttgaaaactacagctatgtagcacttgtgctacactgcacctctgcattgtaaagggatactgccagtgctcaaaacaaaatgtgaaatgagtcatttggaaacaaggtgggggtgttagggcaacctcgaggatttgcagcattgaaactttccccagtagttcttggaaaagctgaccgcagaatttggtagtgtacacttagcatttgtgagtgtgtgtgtgtgtttaaaccaaaaactaacagtgttgcaacattgttgaaagggctcgtgtttttcagtggtcatcaactgcactccatcaaactcacctccatttcaccaaggagctctaaagtaaggagagtgggctttatttaaatgaacagcattttaaccagatactttgtcctaatgtatgttccttttcttcatctgttttttcatactaaatgtatttgatagtggacatgttggatattatacaaaaaaatcattaattcatttctgttccaaaacctttgatcagaacgatctgtggaagagtaactccatttctatatgagtgagtgtctccttgctttagatttctggtgaaccctgtggttatgaatacttgtgtgtgatttaaaaaaaaaaagatacattttacatttcatcgaattgctgttcacactggagtattatatataaatatatatatttgaggcccaaggcctggaaaaatattagtatacaacttggtatcttagtcttactatgtactttttgaaagtattcctcgcaggagaaagaatttaaaatacccattttattcatgcctttctttttaaagaattctctatccagttatactgtagtctttttagtgctgattttttaattcctgaatttttgctgctcatgaccagttttaataccactgtgttttccttctattaaaccagaagaagtaaacagcataattggcaactcttgagcttttcttgtggcaggcaccttttacccttggtgctccaaatcccccatctaggaaagaaaattttttcaagtcaaataacattgatcacatattccttgaaatcatttaccaacactgtatggagcattaggatttaaatatgaatttgtcttaaaggcaattcctttttgcttctgtattatctggaaaagcatgagagaggtgacacctcaacaaactgatcagagaaaataagcagttactaccctgataggcaccttcccaatcctgttgcttttgaccattgtctgtccaacggacacacctcaaacaaacaaaactaccaaatagatgacagatcagaataaaggtgagaggtctggtccccattgaaggctgctacagtcttcaaagaggtgaaggagttcataagagaacaacagtaggaaagttgagagccaagggtaggagagttgcccaaaagacttcccctactactttagggtactgaaaactcaaaggatcagctacagctttatctaagtatttactaaatgctacatgagggtgtccctgtccagctttctggcacatgagtcctgtgtggagagttacctcctcttccagggactgtgctgttgggaactttgggcaagtcacttacctctttgtgcctcaatttctgtataatatttctaagctacctcactgaggtggtatgaagattcactaatgtatgtagcgtgtttgtcaatcctccagtgaaaagcactatctagatcacattttggatcacattagccaaatgcagtaaatggccaaattagatgtgtgctgaagacaatcagtcactgggtctatattaaacagcaaccagagcaacaaatggcaaacaatttctattttcaagtttctttgcatatttttttggtgcaaaaccatttataaacttttttttctaacactagtgtctacagcagcattcaaaaaaattctgttaccttttctgtattaggatttaaagtctatttcttattgtatacctgattgaagctgttcttggagatgaatgttttaaatgtctatatccaaaaaataaacattt

SEQ ID NO: 375348 - DNA, 2098 bp, Homo sapiens
gcgaggaggaaacggtgccggagcgcgcagggcttgctgccgccaccgccgctgcacaggctgccggagcgagcctgccgcgcgccgccctccccgctctccttcctgggcgagctgcggggatggggcggccgcgggagcccgagcgcgcgcaggaaccgccgccgccgccgcccgcgtctccgttgccgcgcgcctgagccgccgtcgccgccgcgcgccctgcccgggggcggcccccccagccccatggaggtctcccggaggaaggcgccgccgcgccccccgcgccccgcagcgccactgcccctgctcgcctatctgctggcactggcggctcccggccggggcgcggacgagcccgtgtggcggtcggagcaagccatcggagccatcgcggcgagccaggaggacggcgtgtttgtggcgagcggcagctgcctggaccagctggactacagcctggagcacagcctctcgcgcctgtaccgggaccaagcgggcaactgcacagagccggtctcgctggcgccccccgcgcggccccggcccgggagcagcttcagcaagctgctgctgccctaccgcgagggggcggccggcctcggggggctgctgctcaccggctggaccttcgaccggggcgcctgcgaggtgcggcccctgggcaacctgagccgcaactccctgcgcaacggcaccgaggtggtgtcgtgccacccgcagggctcgacggccggcgtggtgtaccgcgcgggccggaacaaccgctggtacctggcggtggccgccacctacgtgctgcctgagccggagacggcgagccgctgcaaccccgcggcatccgaccacgacacggccatcgcgctcaaggacacggaggggcgcagcctggccacgcaggagctggggcgcctcaagctgtgcgagggcgcgggcagcctgcacttcgtggacgcctttctctggaacggcagcatctacttcccctactacccctacaactatacgagcggcgctgccaccggctggcccagcatggcgcgcatcgcgcagagcaccgaggtgctgttccagggccaggcatccctcgactgcggccacggccaccccgacggccgccgcctgctcctctcctccagcctagtggaggccctggacgtctgggcgggagtgttcagcgcggccgctggagagggccaggagcggcgctcccccaccaccacggcgctctgcctcttcagaatgagtgagatccaggcgcgcgccaagagggtcagctgggacttcaagacggccgagagccactgcaaagaaggggatcaacctgaaagagtccaaccaatcgcatcatctaccttgatccattccgacctgacatccgtttatggcaccgtggtaatgaacaggactgttttattcttggggactggagatggccagttacttaaggttattcttggtgagaatttgacttcaaattgtccagaggttatctatgaaattaaagaagagacacctgttttctacaaactcgttcctgatcctgtgaagaatatctacatttatctaacagctgggaaagaggtgaggagaattcgtgttgcaaactgcaataaacataaatcctgttcggagtgtttaacagccacagaccctcactgcggttggtgccattcgctacaaaggtatctcctgaattctttctcaccaactcgcatttttgaaaaagtgtcatgcggcagaacacttgttgccctactttaacgatccattccagtgacctgagggaactgatctcttcctcgactaaaatcttgttgtgcaatcctaatgaattctcgaaggtgtttccagcggcgtccgtgctatgcaatcactggacccgggagctccccagtctcggggcgggaggggcaggtgtgcagccttcaggagaacgggagagagcaggcaggtttggcttttactttctccagagttcgccaagactcaagagagaggcaaaagggccccccctccgagaagataaaagaatagagatgtctgaaaatttttcagctgaatccccatcatgtatgtcatgtattctgttcgc

SEQ ID NO: 375349 - DNA, 319 bp, Homo sapiens
atttaccactttattcaagttttagttatccataaatttgtgaaagtaaagtggtggcattttaaaactctctaaaaaggaacaaaatgctctttttcagagcttcaaatgggcacacgacagaaagaacttctggacatcgacagttcctccgtgattcttgaagatggaatcaccaagctaaacaccattggccactatgaggtaagagcaagacttgaccccgtgtctccttcctcatccccaatcctagtcccatggacattcttttaaaacatccaggactcccacccatttcctggaatgacttgcagatcga

SEQ ID NO: 375350 - DNA, 315 bp, Homo sapiens
tacaccttcaaacaaagatttaccactttattcaagttttagttatccataaatttgtgaaagtaaagtggtggcattttaaaactctctaaaaaggaacaaaatgctctttttcagagcttcaaatgggcacacgacagaaagaacttctggacatcgacagttcctccgtgattcttgaagatggaatcaccaagctaaacaccattggccactatgaggtaagagcaagacttgaccccgtgtctccttcctcatccccaatcctagtcccatggacattcttttaaaacatccaggactcccacccatttc

SEQ ID NO: 375351 - DNA, 261 bp, Homo sapiens
aaagaaggggatcaacctgaaagagtccaaccaatcgcatcatctaccttgatccattccgacctgacatccgtttatggcaccgtggtaatgaacaggactgttttattcttggggactggagatggccagttacttaaggttggttttctgtgccttcttcaaatgtctattttaatggtgatattttgtactttaaaaaaacatttttttaatgcttctgggttatacatgagaccaaaccaagaacttcatgaactc

SEQ ID NO: 375352 - DNA, 823 bp, Homo sapiens
gcgggactcagagtcaccaccctggggctgaaccagaaagaaggggatcaacctgaaagagtccaaccaatcgcatcatctaccttgatccattccgacctgacatccgtttatggcaccgtggtaatgaacaggactgttttattcttggggactggagatggccagttacttaaggttattcttggtgagaatttgacttcaaattgtccagaggttatctatgaaattaaagaagagacacctgttttctacaaactcgttcctgatcctgtgaagaatatctacatttatctaacagctgggaaagaggtgaggagaattcgtgttgcaaactgcaataaacataaatcctgttcggagtgtttaacagccacagaccctcactgcggttggtgccattcgctacaaaggtatctcctgaattctttctcaccaactcgcatttttgaaaaagtgtcatgcggcagaacacttgttgccctactttaacgatccattccagtgacctgagggaactgatctcttcctcgactaaaatcttgttgtgcaatcctaatgaattctcgaaggtgtttccagcggcgtccgtgctatgcaatcactggacccgggagctccccagtctcggggcgggaggggcaggtgtgcagccttcaggagaacgggagagagcaggcaggtttggcttttactttctccagagttcgccaagactcaagagagaggcaaaagggccccccctccgagaagataaaagaatagagatgtctgaaaatttttcagctgaatccccatcatgtatgtcatgtattctgttcgc

SEQ ID NO: 375353 - DNA, 8543 bp, Homo sapiens
gcgaggaggaaacggtgccggagcgcgcagggcttgctgccgccaccgccgctgcacaggctgccggagcgagcctgccgcgcgccgccctccccgctctccttcctgggcgagctgcggggatggggcggccgcgggagcccgagcgcgcgcaggaaccgccgccgccgccgcccgcgtctccgttgccgcgcgcctgagccgccgtcgccgccgcgcgccctgcccgggggcggcccccccagccccatggaggtctcccggaggaaggcgccgccgcgccccccgcgccccgcagcgccactgcccctgctcgcctatctgctggcactggcggctcccggccggggcgcggacgagcccgtgtggcggtcggagcaagccatcggagccatcgcggcgagccaggaggacggcgtgtttgtggcgagcggcagctgcctggaccagctggactacagcctggagcacagcctctcgcgcctgtaccgggaccaagcgggcaactgcacagagccggtctcgctggcgccccccgcgcggccccggcccgggagcagcttcagcaagctgctgctgccctaccgcgagggggcggccggcctcggggggctgctgctcaccggctggaccttcgaccggggcgcctgcgaggtgcggcccctgggcaacctgagccgcaactccctgcgcaacggcaccgaggtggtgtcgtgccacccgcagggctcgacggccggcgtggtgtaccgcgcgggccggaacaaccgctggtacctggcggtggccgccacctacgtgctgcctgagccggagacggcgagccgctgcaaccccgcggcatccgaccacgacacggccatcgcgctcaaggacacggaggggcgcagcctggccacgcaggagctggggcgcctcaagctgtgcgagggcgcgggcagcctgcacttcgtggacgcctttctctggaacggcagcatctacttcccctactacccctacaactatacgagcggcgctgccaccggctggcccagcatggcgcgcatcgcgcagagcaccgaggtgctgttccagggccaggcatccctcgactgcggccacggccaccccgacggccgccgcctgctcctctcctccagcctagtggaggccctggacgtctgggcgggagtgttcagcgcggccgctggagagggccaggagcggcgctcccccaccaccacggcgctctgcctcttcagaatgagtgagatccaggcgcgcgccaagagggtcagctgggacttcaagacggccgagagccactgcaaagaaggggatcaacctgaaagagtccaaccaatcgcatcatctaccttgatccattccgacctgacatccgtttatggcaccgtggtaatgaacaggactgttttattcttggggactggagatggccagttacttaaggttattcttggtgagaatttgacttcaaattgtccagaggttatctatgaaattaaagaagagacacctgttttctacaaactcgttcctgatcctgtgaagaatatctacatttatctaacagctgggaaagaggtgaggagaattcgtgttgcaaactgcaataaacataaatcctgttcggagtgtttaacagccacagaccctcactgcggttggtgccattcgctacaaaggtgcacttttcaaggagattgtgtacattcagagaacttagaaaactggctggatatttcgtctggagcaaaaaagtgccctaaaattcagataattcgaagcagtaaagaaaagactacagtgactatggtgggaagcttctctccaagacactcaaagtgcatggtgaagaatgtggactctagcagggagctctgccagaataaaagtcagcccaaccggacctgcacctgtagcatcccaaccagagcaacctacaaagatgtttcagttgtcaacgtgatgttctccttcggttcttggaatttatcagacagattcaactttaccaactgctcatcattaaaagaatgcccagcatgcgtagaaactggctgcgcgtggtgtaaaagtgcaagaaggtgtatccaccccttcacagcttgcgacccttctgattatgagagaaaccaggaacagtgtccagtggctgtcgagaagacatcaggaggaggaagacccaaggagaacaaggggaacagaaccaaccaggctttacaggtcttctacattaagtccattgagccacagaaagtatcgacattagggaaaagcaacgtgatagtaacgggagcaaactttacccgggcatcgaacatcacaatgatcctgaaaggaaccagtacctgtgataaggatgtgatacaggttagccatgtgctaaatgacacccacatgaaattctctcttccatcaagccggaaagaaatgaaggatgtgtgtatccagtttgatggtgggaactgctcttctgtgggatccttatcctacattgctctgccacattgttcccttatatttcctgctaccacctggatcagtggtggtcaaaatataaccatgatgggcagaaattttgatgtaattgacaacttaatcatttcacatgaattaaaaggaaacataaatgtctctgaatattgtgtggcgacttactgcgggtttttagcccccagtttaaagagttcaaaagtgcgcacgaatgtcactgtgaagctgagagtacaagacacctacttggattgtggaaccctgcagtatcgggaggaccccagattcacggggtatcgggtggaatccgaggtggacacagaactggaagtgaaaattcaaaaagaaaatgacaacttcaacatttccaaaaaagacattgaaattactctcttccatggggaaaatgggcaattaaattgcagttttgaaaatattactagaaatcaagatcttaccaccatcctttgcaaaattaaaggcatcaagactgcaagcaccattgccaactcttctaagaaagttcgggtcaagctgggaaacctggagctctacgtcgagcaggagtcagttccttccacatggtattttctgattgtgctccctgtcttgctagtgattgtcatttttgcggccgtgggggtgaccaggcacaaatcgaaggagctgagtcgcaaacagagtcaacaactagaattgctggaaagcgagctccggaaagagatacgtgacggctttgctgagctgcagatggataaattggatgtggttgatagttttggaactgttcccttccttgactacaaacattttgctctgagaactttcttccctgagtcaggtggcttcacccacatcttcactgaagatatgcataacagagacgccaacgacaagaatgaaagtctcacagctttggatgccctaatctgtaataaaagctttcttgttactgtcatccacacccttgaaaagcagaagaacttttctgtgaaggacaggtgtctgtttgcctccttcctaaccattgcactgcaaaccaagctggtctacctgaccagcatcctagaggtgctgaccagggacttgatggaacagtgtagtaacatgcagccgaaactcatgctgagacgcacggagtccgtcgtcgaaaaactcctcacaaactggatgtccgtctgcctttctggatttctccgggagactgtcggagagcccttctatttgctggtgacgactctgaaccagaaaattaacaagggtcccgtggatgtaatcacttgcaaagccctgtacacacttaatgaagactggctgttgtggcaggttccggaattcagtactgtggcattaaacgtcgtctttgaaaaaatcccggaaaacgagagtgcagatgtctgtcggaatatttcagtcaatgttctcgactgtgacaccattggccaagccaaagaaaagattttccaagcattcttaagcaaaaatggctctccttatggacttcagcttaatgaaattggtcttgagcttcaaatgggcacacgacagaaagaacttctggacatcgacagttcctccgtgattcttgaagatggaatcaccaagctaaacaccattggccactatgagatatcaaatggatccactataaaagtctttaagaagatagcaaattttacttcagatgtggagtactcggatgaccactgccatttgattttaccagattcggaagcattccaagatgtgcaaggaaagagacatcgagggaagcacaagttcaaagtaaaagaaatgtatctgacaaagctgctgtcgaccaaggtggcaattcattctgtgcttgaaaaactttttagaagcatttggagtttacccaacagcagagctccatttgctataaaatacttttttgactttttggacgcccaggctgaaaacaaaaaaatcacagatcctgacgtcgtacatatttggaaaacaaacagccttcctcttcgcttctgggtaaacatcctgaagaaccctcagtttgtctttgacattaagaagacaccacatatagacggctgtttgtcagtgattgcccaggcattcatggatgcattttctctcacagagcagcaactagggaaggaagcaccaactaataagcttctctatgccaaggatatcccaacctacaaagaagaagtaaaatcttattacaaagcaatcagggatttgcctccattgtcatcctcagaaatggaagaatttttaactcaggaatctaaggtatcattagaaagcagaaataagcttatatttggttactttacgtcatttcagaatctctcaacaagtctttcttttagaaacatgaaaatgaatttaatgaagaagtggccttgacagaaatttacaaatacatcgtaaaatattttgatgaggtaagattttaaataacattgtttttaacctttgaatcaggcacaaggatgtggttatagcattctgtcagtttcagaacagctctggcatcccaaaaggccagaaagggaagccaggaagcctgtctgagatgggggatcctggcactgagccagaccctgtacatggctgccccccttacagttttatcatgctgcccacatttggaccagcctgaatttacatttgagttcatggggcctacagccaccctgactcaagttaactttgatgagtaagtagtggccctattaaatggggtcagcttatgcttgattgtaatttgctaaaaatgaaagctaagcttgttaaattgcctagattctgtattcaatcgttatatgaaattatgacatatttctaacttaagcgactatttcaataaaccattctcctttatgattaattctccttaatctgggtttttttctttggaaattcaaacagacacattcatcagatgctttgtttccaaacaaatgttaactcccccttccctgattcccccccaatcatgctgggacaggctatccatgtcaatggtgagaatagctcaccaattccatttgctacttgaagatgaagtgaagctctaaggtagggtagaggcaatgagttcttaaacatgataagcatccctcgttccaggggtcaggggagagaagggaagcacgaggagggactacactgcccagatgggagggaagggaaggatctgtctctgaccaggatgtccctgcctgctgcatttaaggagaaatacttgcctgcatgttggctgcccaggaatgcttgctgtgcttggaatggctgtgacataatgcataaagcagggcctaggaagcctggccccatatttgtaagcaaatagttggtatttcttgcgagcttctattttaagccaaggtattgttgatcctgtgataaggacttagcaaaacaacttgcaaagtgagtatgtaaatgatggaagaaaatgttggcatctgtttcatacagattttaccactcacagcatcaggtatgcaaaaaacagaattgtaacgctaaaaccacaatatctaaaataactgttctaattgtcaacagattctaaataaactagaaagagaacgagggctggaagaagctcagaaacaactcttgcatgtaaaagtcttatttgatgaaaagaagaaatgcaagtggatgtaagcactctggggcctggcttaatctggcaaagttcttcagacgacttgggagcaaaatggctgcttgagctactctgtgtcgttaatttgttgtttgcacataggttccactttgggcactgtctttttaagagaccaaggcacatgcacagcttttagaaagcataccaacccttgtgcctgtgtgtataccgtgggaacccttctgtaaatagagttgaagtggttgttgcaaacagcctccttgtttacagagaatacaaggccagtaagcgaatgtcagtattgtaactacagtctccacttaagcacaatgatataagtggttttgtttgaaaactacagctatgtagcacttgtgctacactgcacctctgcattgtaaagggatactgccagtgctcaaaacaaaatgtgaaatgagtcatttggaaacaaggtgggggtgttagggcaacctcgaggatttgcagcattgaaactttccccagtagttcttggaaaagctgaccgcagaatttggtagtgtacacttagcatttgtgagtgtgtgtgtgtgtttaaaccaaaaactaacagtgttgcaacattgttgaaagggctcgtgtttttcagtggtcatcaactgcactccatcaaactcacctccatttcaccaaggagctctaaagtaaggagagtgggctttatttaaatgaacagcattttaaccagatactttgtcctaatgtatgttccttttcttcatctgttttttcatactaaatgtatttgatagtggacatgttggatattatacaaaaaaatcattaattcatttctgttccaaaacctttgatcagaacgatctgtggaagagtaactccatttctatatgagtgagtgtctccttgctttagatttctggtgaaccctgtggttatgaatacttgtgtgtgatttaaaaaaaaaaagatacattttacatttcatcgaattgctgttcacactggagtattatatataaatatatatatttgaggcccaaggcctggaaaaatattagtatacaacttggtatcttagtcttactatgtactttttgaaagtattcctcgcaggagaaagaatttaaaatacccattttattcatgcctttctttttaaagaattctctatccagttatactgtagtctttttagtgctgattttttaattcctgaatttttgctgctcatgaccagttttaataccactgtgttttccttctattaaaccagaagaagtaaacagcataattggcaactcttgagcttttcttgtggcaggcaccttttacccttggtgctccaaatcccccatctaggaaagaaaattttttcaagtcaaataacattgatcacatattccttgaaatcatttaccaacactgtatggagcattaggatttaaatatgaatttgtcttaaaggcaattcctttttgcttctgtattatctggaaaagcatgagagaggtgacacctcaacaaactgatcagagaaaataagcagttactaccctgataggcaccttcccaatcctgttgcttttgaccattgtctgtccaacggacacacctcaaacaaacaaaactaccaaatagatgacagatcagaataaaggtgagaggtctggtccccattgaaggctgctacagtcttcaaagaggtgaaggagttcataagagaacaacagtaggaaagttgagagccaagggtaggagagttgcccaaaagacttcccctactactttagggtactgaaaactcaaaggatcagctacagctttatctaagtatttactaaatgctacatgagggtgtccctgtccagctttctggcacatgagtcctgtgtggagagttacctcctcttccagggactgtgctgttgggaactttgggcaagtcacttacctctttgtgcctcaatttctgtataatatttctaagctacctcactgaggtggtatgaagattcactaatgtatgtagcgtgtttgtcaatcctccagtgaaaagcactatctagatcacattttggatcacattagccaaatgcagtaaatggccaaattagatgtgtgctgaagacaatcagtcactgggtctatattaaacagcaaccagagcaacaaatggcaaacaatttctattttcaagtttctttgcatatttttttggtgcaaaaccatttataaacttttttttctaacactagtgtctacagcagcattcaaaaaaattctgttaccttttctgtattaggatttaaagtctatttcttattgtatacctgattgaagctgttcttggagatgaatgttttaaatgtctatatccaaaaaataaacattt

SEQ ID NO: 375354 - DNA, 4551 bp, Homo sapiens
gcgaggaggaaacggtgccggagcgcgcagggcttgctgccgccaccgccgctgcacaggctgccggagcgagcctgccgcgcgccgccctccccgctctccttcctgggcgagctgcggggatggggcggccgcgggagcccgagcgcgcgcaggaaccgccgccgccgccgcccgcgtctccgttgccgcgcgcctgagccgccgtcgccgccgcgcgccctgcccgggggcggcccccccagccccatggaggtctcccggaggaaggcgccgccgcgccccccgcgccccgcagcgccactgcccctgctcgcctatctgctggcactggcggctcccggccggggcgcggacgagcccgtgtggcggtcggagcaagccatcggagccatcgcggcgagccaggaggacggcgtgtttgtggcgagcggcagctgcctggaccagctggactacagcctggagcacagcctctcgcgcctgtaccgggaccaagcgggcaactgcacagagccggtctcgctggcgccccccgcgcggccccggcccgggagcagcttcagcaagctgctgctgccctaccgcgagggggcggccggcctcggggggctgctgctcaccggctggaccttcgaccggggcgcctgcgaggtgcggcccctgggcaacctgagccgcaactccctgcgcaacggcaccgaggtggtgtcgtgccacccgcagggctcgacggccggcgtggtgtaccgcgcgggccggaacaaccgctggtacctggcggtggccgccacctacgtgctgcctgagccggagacggcgagccgctgcaaccccgcggcatccgaccacgacacggccatcgcgctcaaggacacggaggggcgcagcctggccacgcaggagctggggcgcctcaagctgtgcgagggcgcgggcagcctgcacttcgtggacgcctttctctggaacggcagcatctacttcccctactacccctacaactatacgagcggcgctgccaccggctggcccagcatggcgcgcatcgcgcagagcaccgaggtgctgttccagggccaggcatccctcgactgcggccacggccaccccgacggccgccgcctgctcctctcctccagcctagtggaggccctggacgtctgggcgggagtgttcagcgcggccgctggagagggccaggagcggcgctcccccaccaccacggcgctctgcctcttcagaatgagtgagatccaggcgcgcgccaagagggtcagctgggacttcaagacggccgagagccactgcaaagaaggggatcaacctgaaagagtccaaccaatcgcatcatctaccttgatccattccgacctgacatccgtttatggcaccgtggtaatgaacaggactgttttattcttggggactggagatggccagttacttaaggttattcttggtgagaatttgacttcaaattgtccagaggttatctatgaaattaaagaagagacacctgttttctacaaactcgttcctgatcctgtgaagaatatctacatttatctaacagctgggaaagaggtgaggagaattcgtgttgcaaactgcaataaacataaatcctgttcggagtgtttaacagccacagaccctcactgcggttggtgccattcgctacaaaggtgcacttttcaaggagattgtgtacattcagagaacttagaaaactggctggatatttcgtctggagcaaaaaagtgccctaaaattcagataattcgaagcagtaaagaaaagactacagtgactatggtgggaagcttctctccaagacactcaaagtgcatggtgaagaatgtggactctagcagggagctctgccagaataaaagtcagcccaaccggacctgcacctgtagcatcccaaccagagcaacctacaaagatgtttcagttgtcaacgtgatgttctccttcggttcttggaatttatcagacagattcaactttaccaactgctcatcattaaaagaatgcccagcatgcgtagaaactggctgcgcgtggtgtaaaagtgcaagaaggtgtatccaccccttcacagcttgcgacccttctgattatgagagaaaccaggaacagtgtccagtggctgtcgagaagacatcaggaggaggaagacccaaggagaacaaggggaacagaaccaaccaggctttacaggtcttctacattaagtccattgagccacagaaagtatcgacattagggaaaagcaacgtgatagtaacgggagcaaactttacccgggcatcgaacatcacaatgatcctgaaaggaaccagtacctgtgataaggatgtgatacaggttagccatgtgctaaatgacacccacatgaaattctctcttccatcaagccggaaagaaatgaaggatgtgtgtatccagtttgatggtgggaactgctcttctgtgggatccttatcctacattgctctgccacattgttcccttatatttcctgctaccacctggatcagtggtggtcaaaatataaccatgatgggcagaaattttgatgtaattgacaacttaatcatttcacatgaattaaaaggaaacataaatgtctctgaatattgtgtggcgacttactgcgggtttttagcccccagtttaaagagttcaaaagtgcgcacgaatgtcactgtgaagctgagagtacaagacacctacttggattgtggaaccctgcagtatcgggaggaccccagattcacggggtatcgggtggaatccgaggtggacacagaactggaagtgaaaattcaaaaagaaaatgacaacttcaacatttccaaaaaagacattgaaattactctcttccatggggaaaatgggcaattaaattgcagttttgaaaatattactagaaatcaagatcttaccaccatcctttgcaaaattaaaggcatcaagactgcaagcaccattgccaactcttctaagaaagttcgggtcaagctgggaaacctggagctctacgtcgagcaggagtcagttccttccacatggtattttctgattgtgctccctgtcttgctagtgattgtcatttttgcggccgtgggggtgaccaggcacaaatcgaaggagctgagtcgcaaacagagtcaacaactagaattgctggaaagcgagctccggaaagagatacgtgacggctttgctgagctgcagatggataaattggatgtggttgatagttttggaactgttcccttccttgactacaaacattttgctctgagaactttcttccctgagtcaggtggcttcacccacatcttcactgaagatatgcataacagagacgccaacgacaagaatgaaagtctcacagctttggatgccctaatctgtaataaaagctttcttgttactgtcatccacacccttgaaaagcagaagaacttttctgtgaaggacaggtgtctgtttgcctccttcctaaccattgcactgcaaaccaagctggtctacctgaccagcatcctagaggtgctgaccagggacttgatggaacagtgtagtaacatgcagccgaaactcatgctgagacgcacggagtccgtcgtcgaaaaactcctcacaaactggatgtccgtctgcctttctggatttctccgggagactgtcggagagcccttctatttgctggtgacgactctgaaccagaaaattaacaagggtcccgtggatgtaatcacttgcaaagccctgtacacacttaatgaagactggctgttgtggcaggttccggaattcagtactgtggcattaaacgtcgtctttgaaaaaatcccggaaaacgagagtgcagatgtctgtcggaatatttcagtcaatgttctcgactgtgacaccattggccaagccaaagaaaagattttccaagcattcttaagcaaaaatggctctccttatggacttcagcttaatgaaattggtcttggtaaggcggtgcgggagctatgtggtcccaggccctgatgagtgtccctccctgcctgccctccctccctgtcccccctccctgcccccaccagcttccattcagtgacacttacacagccaggttgttcctggagggcatgtctaggggccaagagactgctttggtctctcatgggcatcctgattcttcgaaggaagcacggtccttcaaagatggcgtttgttgttgttgtctttaaatattacgtctgtaaatcagattgatgagattgcaggccctgagactgcacggaatcaccttgcatcatgaaatacagaaaggtgtcaacacagtgccctctgcgtgtgttgcatttcacattggcatttgatttgtttgttgtgatactgagcgtgtcattactgggtggcttccggattaagatttgctccgcctcccccaggggcaacaaatttgcattgaatcattttcggccttacggggatctctcgaaggaaactattcctcgaccaactctacaggct

SEQ ID NO: 375355 - DNA, 5215 bp, Homo sapiens
  misc_feature (3115)..(3115): n is a, c, g, or t
  misc_feature (3117)..(3117): n is a, c, g, or t
tagcggcttctgcggctccaagccagcgggtcctgtgaaggcgagcagacgcggagaaaggacgcgggagtgagagagggtgagtcagccactgtctaaacgataacgggaggcggctctgcggggtagggttgaattcagtaaatgggctcgtgctgctgtctcttcggagacgctgctatcttagcgtcagcgagggaaggttgaggaggagccagagccgggtcctgcagcgtttctcgccatcagcgcccgtcgccatctccaccatgcagtcccgggaagacgccccgcgctctcgccgcctagccagtccccgtggtgggaagcggcccaagaagattcacaaacccacagtttcggcctttttcacgggtccagaggaattaaaggacacggcccattctgcagccctgctggcacagctcaagtccttctacgatgcgcggctgctgtgtgatgtgaccatcgaggtggtgacgcctggcagcgggcctggcacgggtcgcctgttcccctgcaaccgcaatgtgctggccgcggcatgtccctacttcaagagcatgttcacaggtggcatgtacgagagccagcaggccagcgtgaccatgcacgatgtggacgccgagtccttcgaggtgttggtcgactactgctacacgggtcgtgtgtctctcagtgaggccaacgtggagcgcctgtacgcggcctccgacatgctacagctggaatatgtgcgggaagcctgtgcctccttcttagcccgacgtcttgacctgaccaactgcaccgccatcctcaagtttgcagatgcctttggccatcgcaagctgcgatcccaggcccagtcctatatagctcagaacttcaagcaactcagccacatgggttcaattcgggaggagactctagcagatctgaccctggcccagctgctggctgtcctgcgcttggatagtctggacgtggagagtgagcagacagtgtgccatgtggcagtgcagtggctggaggctgctcccaaagagcggggtcccagtgctgcagaagtcttcaagtgcgtgcgctggatgcacttcactgaagaagatcaggactacttagaagggctgctgaccaagcccatcgtgaagaagtactgcctggacgttattgaaggggccctgcagatgcgctatggtgacctgttgtacaagtctctggtgccagtgccaaacagcagcagcagcagtagcagcagcaactctcttgtatctgcagcagaaaatccaccccagagactgggtatgtgtgccaaggagatggtgatcttctttggacaccccagagatccctttctctgctgtgatccatactcgggggacctttacaaagtgccgtcacctttgacctgtctggctcacactaggactgtcaccactctagctgtctgtatctctcctgaccatgacatctatctagctgctcagcccaggacagacctctgggtgtataaaccagctcagaatagttggcagcaacttgcagatcgcttgctgtgtcgtgagggcatggatgtggcatatctcaatggctatatctacattttgggggggcgagaccctattactggagttaagttgaaggaagtggaatgctacaatgttaagagaaaccagtgggcattggtggctccactgccccattcttttttatcctttgacctaatggtaattcgagactatctctatgctctcaacagtaagcgcatgttctgttatgatcctagccacaatatgtggctgaagtgcgtttctctgaagcgcaatgactttcaggaagcctgcgtcttcaatgaggagatctattgtatctgtgatatcccagtcatgaaggtctacaacccagttagggcagaatggaggcaaatgaataatattcccttggtctcagagaccaacaactacagaattatcaagcatggccaaaaattgttgctcatcacctctcgcaccccacagtggaaaaagaaccgggtgactgtgtatgaatatgatattaggggagaccaatggattaatataggtaccacattaggcctcttgcagtttgattctaactttttttgcctctctgctcgtgtttatccttcctgccttgaacctggtcagagtttcctcactgaagaagaagaaataccaagtgagtctagcactgaatgggacttaggtggattcagtgagccagactctgagtcaggaagttcaagttctctttctgatgatgatttttgggtgcgtgtagcgcctcagtgaaatgcacaggatcaacagggtttgttgtaactagattgaaacactaagttgtttttactgttttggaaaatatcttaaatatcctttttgttcctaaaggagaggaaaagttgattaacttctggtttggtttagaaaaagtaatgtttgaaatacgaaggtaatttaatgttacaaattttaacactcaaatcaaccttttaataattttctgtgctaagggtccagtatttatttgattatttagtatgtttatgtttcatgacactaatttagtcttttgatacattttacattctgtttactgccacaagcactgtggcaataacttttgaattttaatttttataatagaaaaatgattaggaattgctagatagtgttttgaaagcatatctttttcttcagaacaatgtagacttccaaaatggttaacctaaggggtctttacaaaatgtgttataagttaaacataatttgggaagttttacttttgttttcttctatgaagaaaaaaatgcaggctgggcgcggtggctcacgcctgtaatcctagcactttgggaggccgaggcaggtggatcacctgaggtcagttcaagaccagcctggccaacatggtgaaaccccgtctctactaaaaatacaaaaattagctgggcgtggtggcatgcgcctgtaatcccagctacccaggaggctgaggcaggagaattgctgaaacccgggagtcagaggctgcagagagccgagactgggccactgcactccagcctggatgacagagtgagactccgtctcaaaaaaaaaaaaaaaaaaangnaaaaaaaaaaaagaaaaaaaaccatatgtgtattagggtgactgagtggtgacttcatttataataatacagagaatagctataagctcattgacagtaaaaacaacaaaccaggattctactgtttgaaaagaagtttcgttttaattttggaatttagaatgtgtatttgcaaagtcaccaattttcatctaaaaggttatattctagttgtgtcaccaaatcatcaaaaaaccttaaaaaagaagtaacttgctttgtaggtttgtattgttgatctaaacctgatacatgcttcatttaatcaggaataatccttttttttctgctggacatgtataaatttcactggattgtataaatttttatctattgccttaaacatttacatgattctcaatatgttttagctgtacagttttggtgttcatcttagaggattcttcagcagaagtgatatttctttactgttttgtgaggtaatactgattttgaaaatatatataagctaaaaacagtatttcgttgatatcagtagtcattgtgttaactataaagtcaagtgccagcaaagaactttaaaactgtaaagctgtgtatagaactgttttgtgtagcatggaaatattctgtcagctttttaaagtcactaaatgttcttgattatcagcttgaaggtatttttgtattacaagttgacagttgctgggtgtagtggctcatgcctgtaatcctagcaactcggggctgaggtgggaggattgcttcagcccaggagtttgagaccagcctgggcaacatagcaaaaccccatctctacaaaaataaaaaatatgtctgggcatggtggcccaagtctgagtcccagttacttgggaggatcacttgaatgtaggatcacttgagtctaggagttcggggctgcagctatcatctgcagctataatcatagctcactgcagctatgatcatgtctcagcactccagctttggcaacagaacgagatcccatctcttagaaaaacaaagttgatagttaaagaacataagtggatgatggcatttgaggccactagtgaaagtatgttttctctaaaatatttctctaatagtgatataaatggctattttattatgatgtttgtatgtgttttgtatttctctgtaaaccatgctccagtctttgtttttctgttaccataatgtaagagaaggtcctggaacagagactaaatcccacgaaactgacattgttaaacacactaaaacagaagtacttacctcttgaagatttaatatataatggttgacatgatacatgtacatgatgaatgaccagatgcttatggtctacattttcctttatcctgttagtattaccttccttaatctttgttcattaacatgctaattcctcttcagtgtttattttctagtgacagaatgctaacatttcttacaccctggcagaagggagagaaatgtgttttggggtgggtaactaaatttttgagtgaaatatcataagatgagaatggaaagagggagacacaaagagttataacaaaaaaacaatggtttttttagccatttgactggctctttaaatagtctacaagacattcacgtttaacatcacttttagtgaaataaaatgtgccatactagtatgtgcttcaaaagggcaaatgtgctttagtgccctaaggctaaattttggtcatttgacatcagagatgttgtaagtattgcacttaatacgcacctatttctcaatagtgttattttttggctagcattttctttaccactatcttgttgatagctttttgttctctaaggttgaaacatgacagtgcttatctcaaacagattacccatctgcagaactaaggaaagcaatttatgtatgaaagaaattcttgaattcgtcattctcaacctttgaattaaagcttagactaaatagtaatatatcgtgggaaggattttggttttgtgatatttctgtgaattaaggaatagatgttaaccattattttgtagaaaagtgatttgtatgtggttaattataaataaaactggtaccagaaactta

SEQ ID NO: 375356 - DNA, 1767 bp, Homo sapiens
tagcggcttctgcggctccaagccagcgggtcctgtgaaggcgagcagacgcggagaaaggacgcgggagtgagagaggctgtacagttttggtgttcatcttagaggattcttcagcagaagtgatatttctttactgttttgtgaggtaatactgattttgaaaatatatataagctaaaaacagtatttcgttgatatcagtagtcattgtgttaactataaagtcaagtgccagcaaagaactttaaaactgtaaagctgtgtatagaactgttttgtgtagcatggaaatattctgtcagctttttaaagtcactaaatgttcttgattatcagcttgaaggtatttttgtattacaagttgacagttgctgggtgtagtggctcatgcctgtaatcctagcaactcggggctgaggtgggaggattgcttcagcccaggagtttgagaccagcctgggcaacatagcaaaaccccatctctacaaaaataaaaaatatgtctgggcatggtggcccaagtctgagtcccagttacttgggaggatcacttgaatgtaggatcacttgagtctaggagttcggggctgcagctatcatctgcagctataatcatagctcactgcagctatgatcatgtctcagcactccagctttggcaacagaacgagatcccatctcttagaaaaacaaagttgatagttaaagaacataagtggatgatggcatttgaggccactagtgaaagtatgttttctctaaaatatttctctaatagtgatataaatggctattttattatgatgtttgtatgtgttttgtatttctctgtaaaccatgctccagtctttgtttttctgttaccataatgtaagagaaggtcctggaacagagactaaatcccacgaaactgacattgttaaacacactaaaacagaagtacttacctcttgaagatttaatatataatggttgacatgatacatgtacatgatgaatgaccagatgcttatggtctacattttcctttatcctgttagtattaccttccttaatctttgttcattaacatgctaattcctcttcagtgtttattttctagtgacagaatgctaacatttcttacaccctggcagaagggagagaaatgtgttttggggtgggtaactaaatttttgagtgaaatatcataagatgagaatggaaagagggagacacaaagagttataacaaaaaaacaatggtttttttagccatttgactggctctttaaatagtctacaagacattcacgtttaacatcacttttagtgaaataaaatgtgccatactagtatgtgcttcaaaagggcaaatgtgctttagtgccctaaggctaaattttggtcatttgacatcagagatgttgtaagtattgcacttaatacgcacctatttctcaatagtgttattttttggctagcattttctttaccactatcttgttgatagctttttgttctctaaggttgaaacatgacagtgcttatctcaaacagattacccatctgcagaactaaggaaagcaatttatgtatgaaagaaattcttgaattcgtcattctcaacctttgaattaaagcttagactaaatagtaatatatcgtgggaaggattttggttttgtgatatttctgtgaattaaggaatagatgttaaccattattttgtagaaaagtgatttgtatgtggttaattataaataaaactggtaccagaaactta

SEQ ID NO: 375357 - DNA, 5304 bp, Homo sapiens
  misc_feature (3115)..(3115): n is a, c, g, or t
  misc_feature (3117)..(3117): n is a, c, g, or t
tagcggcttctgcggctccaagccagcgggtcctgtgaaggcgagcagacgcggagaaaggacgcgggagtgagagagggtgagtcagccactgtctaaacgataacgggaggcggctctgcggggtagggttgaattcagtaaatgggctcgtgctgctgtctcttcggagacgctgctatcttagcgtcagcgagggaaggttgaggaggagccagagccgggtcctgcagcgtttctcgccatcagcgcccgtcgccatctccaccatgcagtcccgggaagacgccccgcgctctcgccgcctagccagtccccgtggtgggaagcggcccaagaagattcacaaacccacagtttcggcctttttcacgggtccagaggaattaaaggacacggcccattctgcagccctgctggcacagctcaagtccttctacgatgcgcggctgctgtgtgatgtgaccatcgaggtggtgacgcctggcagcgggcctggcacgggtcgcctgttcccctgcaaccgcaatgtgctggccgcggcatgtccctacttcaagagcatgttcacaggtggcatgtacgagagccagcaggccagcgtgaccatgcacgatgtggacgccgagtccttcgaggtgttggtcgactactgctacacgggtcgtgtgtctctcagtgaggccaacgtggagcgcctgtacgcggcctccgacatgctacagctggaatatgtgcgggaagcctgtgcctccttcttagcccgacgtcttgacctgaccaactgcaccgccatcctcaagtttgcagatgcctttggccatcgcaagctgcgatcccaggcccagtcctatatagctcagaacttcaagcaactcagccacatgggttcaattcgggaggagactctagcagatctgaccctggcccagctgctggctgtcctgcgcttggatagtctggacgtggagagtgagcagacagtgtgccatgtggcagtgcagtggctggaggctgctcccaaagagcggggtcccagtgctgcagaagtcttcaagtgcgtgcgctggatgcacttcactgaagaagatcaggactacttagaagggctgctgaccaagcccatcgtgaagaagtactgcctggacgttattgaaggggccctgcagatgcgctatggtgacctgttgtacaagtctctggtgccagtgccaaacagcagcagcagcagtagcagcagcaactctcttgtatctgcagcagaaaatccaccccagagactgggtatgtgtgccaaggagatggtgatcttctttggacaccccagagatccctttctctgctgtgatccatactcgggggacctttacaaagtgccgtcacctttgacctgtctggctcacactaggactgtcaccactctagctgtctgtatctctcctgaccatgacatctatctagctgctcagcccaggacagacctctgggtgtataaaccagctcagaatagttggcagcaacttgcagatcgcttgctgtgtcgtgagggcatggatgtggcatatctcaatggctatatctacattttgggggggcgagaccctattactggagttaagttgaaggaagtggaatgctacaatgttaagagaaaccagtgggcattggtggctccactgccccattcttttttatcctttgacctaatggtaattcgagactatctctatgctctcaacagtaagcgcatgttctgttatgatcctagccacaatatgtggctgaagtgcgtttctctgaagcgcaatgactttcaggaagcctgcgtcttcaatgaggagatctattgtatctgtgatatcccagtcatgaaggtctacaacccagttagggcagaatggaggcaaatgaataatattcccttggtctcagagaccaacaactacagaattatcaagcatggccaaaaattgttgctcatcacctctcgcaccccacagtggaaaaagaaccgggtgactgtgtatgaatatgatattaggggagaccaatggattaatataggtaccacattaggcctcttgcagtttgattctaactttttttgcctctctgctcgtgtttatccttcctgccttgaacctggtcagagtttcctcactgaagaagaagaaataccaagtgagtctagcactgaatgggacttaggtggattcagtgagccagactctgagtcaggaagttcaagttctctttctgatgatgatttttgggtgcgtgtagcgcctcagtgaaatgcacaggatcaacagggtttgttgtaactagattgaaacactaagttgtttttactgttttggaaaatatcttaaatatcctttttgttcctaaaggagaggaaaagttgattaacttctggtttggtttagaaaaagtaatgtttgaaatacgaaggtaatttaatgttacaaattttaacactcaaatcaaccttttaataattttctgtgctaagggtccagtatttatttgattatttagtatgtttatgtttcatgacactaatttagtcttttgatacattttacattctgtttactgccacaagcactgtggcaataacttttgaattttaatttttataatagaaaaatgattaggaattgctagatagtgttttgaaagcatatctttttcttcagaacaatgtagacttccaaaatggttaacctaaggggtctttacaaaatgtgttataagttaaacataatttgggaagttttacttttgttttcttctatgaagaaaaaaatgcaggctgggcgcggtggctcacgcctgtaatcctagcactttgggaggccgaggcaggtggatcacctgaggtcagttcaagaccagcctggccaacatggtgaaaccccgtctctactaaaaatacaaaaattagctgggcgtggtggcatgcgcctgtaatcccagctacccaggaggctgaggcaggagaattgctgaaacccgggagtcagaggctgcagagagccgagactgggccactgcactccagcctggatgacagagtgagactccgtctcaaaaaaaaaaaaaaaaaaangnaaaaaaaaaaaagaaaaaaaaccatatgtgtattagggtgactgagtggtgacttcatttataataatacagagaatagctataagctcattgacagtaaaaacaacaaaccaggattctactgtttgaaaagaagtttcgttttaattttggaatttagaatgtgtatttgcaaagtcaccaattttcatctaaaaggttatattctagttgtgtcaccaaatcatcaaaaaaccttaaaaaagaagtaacttgctttgtaggtttgtattgttgatctaaacctgatacatgcttcatttaatcaggaataatccttttttttctgctggacatgtataaatttcactggattgtataaatttttatctattgccttaaacatttacatgattctcaatatgttttagctgtacagttttggtgttcatcttagaggattcttcagcagaagtgatatttctttactgttttgtgaggtaatactgattttgaaaatatatataagctaaaaacagtatttcgttgatatcagtagtcattgtgttaactataaagtcaagtgccagcaaagaactttaaaactgtaaagctgtgtatagaactgttttgtgtagcatggaaatattctgtcagctttttaaagtcactaaatgttcttgattatcagcttgaaggtatttttgtattacaagttgacagttgctgggtgtagtggctcatgcctgtaatcctagcaactcggggctgaggtgggaggattgcttcagcccaggagtttgagaccagcctgggcaacatagcaaaaccccatctctacaaaaataaaaaatatgtctgggcatggtggcccaagtctgagtcccagttacttgggaggatcacttgaatgtaggatcacttgagtctaggagttcggggctgcagctatcatctgcagctataatcatagctcactgcagctatgatcatgtctcagcactccagctttggcaacagaacgagatcccatctcttagaaaaacaaagttgatagttaaagaacataagtggatgatggcatttgaggccactagtgaaagtatgttttctctaaaatatttctctaatagtgatataaatggctattttattatgatgtttgtatgtgttttgtatttctctgtaaaccatgctccagtctttgtttttctgttaccataatgtaagagaaggtcctggaacagagactaaatcccacgaaactgacattgttaaacacactaaaacagaagtacttacctcttgaagatttaatatataatggttgacatgatacatgtacatgatgaatgaccagatgcttatggtctacattttcctttatcctgttagtattaccttccttaatctttgttcattaacatgctaattcctcttcagtgtttattttctagtgacagaatgctaacatttcttacaccctggcagaagggagagaaatgtgttttggggtgggtaactaaatttttgagtgaaatatcataagatgagaatggaaagagggagacacaaagagttataacaaaaaaacaatggtttttttagccatttgactggctctttaaatagtctacaagacattcacgtttaacatcacttttagtgaaataaaatgtgccatactagtatgtgcttcaaaagggcaaatgtgctttagtgccctaaggctaaattttggtcatttgacatcagagatgttgtaagtattgcacttaatacgcacctatttctcaatagtgttattttttggctagcattttctttaccactatcttgttgatagctttttgttctctaaggttgaaacatgacagtgcttatctcaaacagattacccatctgcagaactaaggaaagcaatttatgtatgaaagaaattcttgaattcgtcattctcaacctttgaattaaagcttagactaaatagtaatatatcgtgggaaggattttggttttgtgatatttctgtgaattaaggaatagatgttaaccattattttgtagaaaagtgatttgtatgtggttaattataaataaaactggtaccagaaacttaaaaaaaactggcggcgttaacacgtgggaattggaaaccctgcgttccccaattattgcttggagcaattcctttcgcaaatggcttcg

SEQ ID NO: 375358 - DNA, 308 bp, Homo sapiens
tgactcacaactgctgtcttaggactgcttatttacatatatatgtattaagacactttggttaaaacaatttattaaatgtcttaaatttctggatatgtccctgaaaataccatgaactacttctaatactgataattatgaataaacgtagctgttgatcacctcaggttttcatacaaactgaactaaggtagggttttatcataggggactttttgtttcatttaatgaaattttgatgtgttgaactgctttcctggtgtcagagaaacatgagaccatcgctcaataatggaaataaaaag

SEQ ID NO: 375359 - DNA, 593 bp, Homo sapiens
gtggaagatgcagatacaggtttgattaaatgaagaatacatttttatagatgaatttgaaacactaaatcgataatccaaattccaaaggaggaagtagttcaactatctgtgccttttctatatttgaagagcttaacccatttaagcaaagattttacagaattttctttaaatgttctgttctcttaaatcctttgggggaaatggtagatgcaaaacctcttgtgacactcttactaaactcttgaatttggaattcaaggcccacttcctagtgtcagtttatcacttcaatcttctcaactattattctcctttttatcccatttagtttagtgatataaaatatttcctatcataaatataccttgttacatttctttgtctgtcttaacaaatcttgctgtcaaagtcctgtataaggtctgactcttgtgcatatatgaagatagttgagagcagtgggtagcattgtggttaagagagacccgtagcagaggggccagtttgggacattattgcaagagtctgggcaaaagataaggtcctgtgtctttgactttgtagtcaacagaaaatttaccaataag

SEQ ID NO: 375360 - DNA, 406 bp, Homo sapiens
aggctctttctttctgtgatctgagcccagttctgttcccagacttaactctgcctctggtcatagaaggaaccccaactttggtcctaaactgaaccctgaagtcctggccacaggaagggaccccattctggttctaggctgagccctatccctggcttcagtcttggttctaccccagccatagaaggaacccttttcctggtccccagaattatccctgacctcactcatgaaccaagccctgaccctgtccttgccacaggctgagctgccccatgccaagcaggtggtcttaactgcagtttagttcagggtggagaacagctaccaacgtccattgggctgacgtggtcagaattttcaccatagctattccaaataaaataaaacccaaagaaaaaaa

SEQ ID NO: 375361 - DNA, 450 bp, Homo sapiens
catatttgggccctactgtcaaaagagccacaaaattaccaaaggataagtacaaaagaagaattgattatcattatgaggtgttctaaaatttagttttaaacagtctgctcaggagtttaactgatgtggcctttaggggccggttaagatctggttaaggagaggctcagagaggagagaatgagagaaggtgagctaagccagccttgaaacatggttaattcacacaagtggaggtgaagctatggggcgttggaaatgctgagccagggggaggacctggaatggtgtgattccttcgtggagtcagtgaggaggctgatctatttaattgaggatttgggaggcaaggtggggtgcagtgggaggtaaaagtgagactgaagacataaggttgagcctgattatttctaagaagccaggcgaaggtgaaacatttgacataat

SEQ ID NO: 375362 - DNA, 128 bp, Homo sapiens
ggcatttaaattatgagattagacacttaaattactgactggaggaccttttatcacctagtagtgtttcaaaattaatgagacatgtcctaatttccattcaggggaagggaaatgattttcctcac

SEQ ID NO: 375363 - DNA, 236 bp, Homo sapiens
ttttttgggacggagtctcactctgtcgcccaggctggagtgcagtggcatgacccgcggtaaccagcgtgagctcgcccgccagaagaatatgaaaaagcagagcgactcggttaagggaaagcgccgagatgacgggctttctgctgccgcccgcaagcagagggactcggagatcatgtccccgtacatcgttagaagcttgaattcgagcagtagtagtagtaggcggccgc

SEQ ID NO: 375364 - DNA, 475 bp, Homo sapiens
gacagaacgaggggacgtaacggaggcaggcggtaaccagcgtgactcgcccgccagaagaatatgaaaaagcagagcgactcggttaagggaaagcgccgagatgacgggctttctgctgccgcccgcaagcagagggactcggagatcatgcagcagaagcagaaaaaggcaaacgagaagaaggaggaacccaagtagctttgtggcttcgtgtccaaccctcttgcccttcgcctgtgtgcctggagccagtcccaccacgctcgcgtttcctcctgtagtgctcacaggtcccagcaccgatggcattccctttgccctgagtctgcagcgggtcccttttgtgcttccttcccctcaggtagcctctctccccctgggccactcccgggggtgagggggttaccccttcccagtgttttttattcctgtggggctcaccccaaagtattaaaagtagctttgtaattcc

SEQ ID NO: 375365 - DNA, 550 bp, Homo sapiens
  misc_feature (34)..(34): n is a, c, g, or t
tttaaacccctttactactactatgctgcgagangagacagaaggggacagaacgaggggacgtaacggaggcaggttggagccgctgccgtcgccatgacccgcggtaaccagcgtgagctcgcccgccagaagaatatgaaaaagcagagcgactcggttaagggaaagcgccgagatgacgggctttctgctgccgcccgcaagcagagggactcggagatcatgcagcagaagcagaaaaaggcaaacgagaagaaggaggaacccaagtagctttgtggcttcgtgtccaaccctcttgcccttcgcctgtgtgcctggagccagtcccaccacgctcgcgtttcctcctgtagtgctcacaggtcccagcaccgatggcattccctttgccctgagtctgcagcgggtcccttttgtgcttccttcccctcaggtagcctctctccccctgggccactcccgggggtgagggggttaccccttcccagtgttttttattcctgtggggctcaccccaaagtattaaaagtagctttgtaattcc

SEQ ID NO: 375366 - DNA, 553 bp, Homo sapiens
  misc_feature (1)..(1): n is a, c, g, or t
  misc_feature (13)..(13): n is a, c, g, or t
  misc_feature (26)..(26): n is a, c, g, or t
  misc_feature (41)..(41): n is a, c, g, or t
  misc_feature (63)..(63): n is a, c, g, or t
ncggtaaggcttngatattcgaaacncggcccgccttcgantacggcttgcggagaagaccgncagtaacggaggcaggttggagccgctgccgtcgccatgacccgcggtaaccagcgtgagctcgcccgccagaagaatatgaaaaagcagagcgactcggttaagggaaagcgccgagatgacgggctttctgctgccgcccgcaagcagagggactcggagatcatgcagcagaagcagaaaaaggcaaacgagaagaaggaggaacccaagtagctttgtggcttcgtgtccaaccctcttgcccttcgcctgtgtgcctggagccagtcccaccacgctcgcgtttcctcctgtagtgctcacaggtcccagcaccgatggcattccctttgccctgagtctgcagcgggtcccttttgtgcttccttcccctcaggtagcctctctccccctgggccactcccgggggtgagggggttaccccttcccagtgttttttattcctgtggggctcaccccaaagtattaaaagtagctttgtaattcc

SEQ ID NO: 375367 - DNA, 687 bp, Homo sapiens
  misc_feature (164)..(164): n is a, c, g, or t
cgtgtgtggaggctggagaaggggaggctgagaaggaggaggcgggggctcaggtaggcctctgagagccctgcagaactgctgctctgtgccctccccgccttcccatagcatgagggacgcgtggagactgagaggacctgaggacatgcatggaagagganagcagatgagagcgtcaaaggcaaacgagaagaaggaggaacccaagtagctttgtggcttcgtgtccaaccctcttgcccttcgcctgtgtgcctggagccagtcccaccacgctcgcgtttcctcctgtagtgctcacaggtcccagcaccgatggcattccctttgccctgagtctgcagcgggtcccttttgtgcttccttcccctcaggtagcctctctccccctgggccactcccgggggtgagggggttaccccttcccagtgttttttattcctgtggggctcaccccaaagtattaaaagtagctttgtaattccaaaaaaaaagaaaaaagagtcgagagtttttgtattggtaatgattcttgtatgaaagagtatagggcggttttgtctgaaatagtctcccacatataagatgggggataaatgaggggggggcaaataatagtgtgggggacaacaccagagggagtggggcccccgtgtcaagggggcactcggagcggaagtgggg

SEQ ID NO: 375368 - DNA, 309 bp, Homo sapiens
  misc_feature (6)..(6): n is a, c, g, or t
  misc_feature (51)..(51): n is a, c, g, or t
attttnccataaataaaaatataactaaaacaaaattatgtatatggtatnctgatatgtcagatactttggatatggtatttacttttaaaaatacagatattctgttgttgtttttttaaattaaggaaggaatctgaaagctttatcaagcaggcaggtcgagcagctgagactcttgtgcttccttcccctcaggtagcctctctccccctgggccactcccgggggtgagggggttaccccttcccagtgttttttattcctgtggggctcaccccaaagtattaaaagtagctttgtaattcc

SEQ ID NO: 375369 - DNA, 560 bp, Homo sapiens
ggcccacagcagcacacctgggagtagagcagatgcaaggcagcgaggtggagacttgctgaggaaaggcatacgttaatgtatgtgtgaggttaacccaggaggttgaattccaaaatttccccttcccctttcttccttttactcaggttctgtttcaagctgattccagccatttgggattgccgcccactgacaacttagtagggctttcattataagcaggcttgagatatctgacctttctctcgacctaaacacctggggctggaaacatggcgggagagatttacagattatacctggggcaacgaaccagaacgacattagaggagaaaagaggcctgtcgtttttattggcttctgcacgtcttcctccccagcttcggccactctccccttcgcaccctctcacctgacagaagggacttttcactaggacactgctgcctccgctgtgctgctgtgccaggcccagggaggtgccggggctggggccggccttggcacccaccatccttgtcccagggattaggcttaggtccaccagatggaaggca

SEQ ID NO: 375370 - DNA, 498 bp, Homo sapiens
gtattagtgggagtttttattttcaatcaagggtttatcaagatttatttacagggcacttctgggaatgacccttcctgggagtttatggtgttggttgagaatgaggactaatatatttaaatatttttgcacgggagaaagaactggcaaaagtcactatcaagaaggaagatctggagctaatagtgagtggtagtgcctaactagtgtatgcggaggggaggctattctgcttaatttgggttgtttcctgaaacaagcggagtcagtatatttggtggcacattaatgcctgggaacctatgtaacatgatttttttctgcagatgactgagatggagatatctcgagcagcagcagaacgcagtttgcgggaacacatgggcaacgtggtagaggcgcttattgccctaaccaactgatgcgtgctttctcaaatatacctactggattaatttatggcaataaaatttttttttgtctttttcagtttta

SEQ ID NO: 375371 - DNA, 271 bp, Homo sapiens
  misc_feature (14)..(14): n is a, c, g, or t
  misc_feature (20)..(21): n is a, c, g, or t
  misc_feature (23)..(23): n is a, c, g, or t
  misc_feature (25)..(27): n is a, c, g, or t
  misc_feature (29)..(29): n is a, c, g, or t
ctctagtacaacanctcatnncnannncncgcggtaaccagcgtgagctcgcccgccagaagaatatgaaaaagcagagcgactcggttaagggaaagcgccgagatgacgggctttctgctgccgcccgcaagcagagggactcggagatcatgcagcagaagcagaaaaaggcaatgagatgttagaagggggatgagatgttggaaggagggatgagatgttggaaggtgatatgagatgttggaagggcaatgagatgttggaaggt

SEQ ID NO: 375372 - DNA, 539 bp, Homo sapiens
taaagagggtctaagaggcagtactataggtctagtacgagctgggtgcgagtaacggaggcaggttggagccgctgccgtcgccatgacccgcggtaaccagcgtgagctcgcccgccagaagaatatgaaaaagcagagcgactcggttaagggaaagcgccgagatgacgggctttctgctgccgcccgcaagcagagggactcggagatcatgcagcagaagcagaaaaaggcaaacgagaagaaggaggaacccaagtagctttgtggcttcgtgtccaaccctcttgcccttcgcctgtgtgcctggagccagtcccaccacgctcgcgtttcctcctgtagtgctcacaggtcccagcaccgatggcattccctttgccctgagtctgcagcgggtcccttttgtgcttccttcccctcaggtagcctctctccccctgggccactcccgggggtgagggggttaccccttcccagtgttttttattcctgtggggctcaccccaaagtattaaaagtagctttgtaattcc

SEQ ID NO: 375373 - DNA, 807 bp, Homo sapiens
gtcggcgtcccccacttcttagaggaacaagtggcgttcagccacccgagattgagcaatcacaggtctgtgaggcccttagatgtccggggctgcacgcgcgctacactgactggctcagcgtgtgcctaccctaccccggcaggcgcgggtaacccattgaaccccattcgtgatggggatcggggattgccaattattccccatgaacgaggaattcccagtaagttccggtctttcgcccgcccaaaacccccgcagactcagggcaaagggaatgccacaggtcccagcaccgatggcattccctttgccctgagtaacggaggcaggttggagccgctgccgtcgccatgacccgcggtaaccagcgtgagctcgcccgccagaagaatatgaaaaagcagagcgactcggttaagggaaagcgccgagatgacgggctttctgctgccgcccgcaagcagagggactcggagatcatgcagcagaagcagaaaaaggcaaacgagaagaaggaggaacccaagtagctttgtggcttcgtgtccaaccctcttgcccttcgcctgtgtgcctggagccagtcccaccacgctcgcgtttcctcctgtagtgctcacaggtcccagcaccgatggcattccctttgccctgagtctgcagcgggtcccttttgtgcttccttcccctcaggtagcctctctccccctgggccactcccgggggtgagggggttaccccttcccagtgttttttattcctgtggggctcaccccaaagtattaaaagtagctttgtaattcc

SEQ ID NO: 375374 - DNA, 959 bp, Homo sapiens
taaagagggtctaagaggcagtactataggtctagtacgagctgggtgcgagtaacggaggcaggttggagccgctgccgtcgccatgacccgcggtaaccagcgtgagctcgcccgccagaagaatatgaaaaagcagagcgactcggttaagggaaagcgccgagatgacgggctttctgctgccgcccgcaagcagagggactcggagatcatgcagcagaagcagaaaaaggcaaacgagaagaaggaggaacccaagtagctttgtggcttcgtgtccaaccctcttgcccttcgcctgtgtgcctggagccagtcccaccacgctcgcgtttcctcctgtagtgctcacaggtcccagcaccgatggcattccctttgccctgagtctgcagcgggtcccttttgtgcttccttcccctcaggtagcctctctccccctgggccactcccgggggtgagggggttaccccttcccagtgttttttattcctgtggggctcaccccaaagtattaaaagtagctttgtaattccttaaaaaaaaaaaaaaaaacttcgaaaaaagtttctttccccccaaggggctttggggcccgcgcccttggttggcctaaaggacgaacccaaaaagggtgccaatgttcccaagcattcgggaaaaagccccagccggattgttcgcccattcgtatttggcacacgcgcaaggagcgcataaggggggaacccgcaaggggttgcgcaaaccgggatatcaccagctcaagttgccgtaaagccgaaagtgtgaagggaatactcgcgcctgaaggaagttgaagaccctcagattctaacccggacctggagttcacggcaaccttgttcgcaaaaggtggcggtctggcaagtcttttgccttaagggggttcaggtgcccaacagggccgttgtacggcggggatggggccccag

SEQ ID NO: 375375 - DNA, 777 bp, Homo sapiens
  misc_feature (34)..(34): n is a, c, g, or t
tttaaacccctttactactactatgctgcgagangagacagaaggggacagaacgaggggacgtaacggaggcaggttggagccgctgccgtcgccatgacccgcggtaaccagcgtgagctcgcccgccagaagaatatgaaaaagcagagcgactcggttaagggaaagcgccgagatgacgggctttctgctgccgcccgcaagcagagggactcggagatcatgcagcagaagcagaaaaaggcaaacgagaagaaggaggaacccaagtagctttgtggcttcgtgtccaaccctcttgcccttcgcctgtgtgcctggagccagtcccaccacgctcgcgtttcctcctgtagtgctcacaggtcccagcaccgatggcattccctttgccctgagtctgcagcgggtcccttttgtgcttccttcccctcaggtagcctctctccccctgggccactcccgggggtgagggggttaccccttcccagtgttttttattcctgtggggctcaccccaaagtattaaaagtagctttgtaattccaaaaaaaaaaaaaaaaaaaaaaaaaaaaaaaaaaaaaaaaaaaaaaaaaaaaaaaaaaaaaaaaaaaaaaaaaaaaaaaaaaaaaaaaaaaaaaagcaaaaaaaaaaaacaaaaaggggggggccacgcagaaaagcgacacgggggggcggacacacgcaaagagcgagccccacagaccgtgagaaacacagagggggggccacaacagagagagggcgcaacgg

SEQ ID NO: 375376 - DNA, 1475 bp, Homo sapiens
taaagagggtctaagaggcagtactataggtctagtacgagctgggtgcgagtaacggaggcaggttggagccgctgccgtcgccatgacccgcggtaaccagcgtgagctcgcccgccagaagaatatgaaaaagcagagcgactcggttaagggaaagcgccgagatgacgggctttctgctgccgcccgcaagcagagggactcggagatcatgcagcagaagcagaaaaaggcaaacgagaagaaggaggaacccaagtagctttgtggcttcgtgtccaaccctcttgcccttcgcctgtgtgcctggagccagtcccaccacgctcgcgtttcctcctgtagtgctcacaggtcccagcaccgatggcattccctttgccctgagtctgcagcgggtcccttttgtgcttccttcccctcaggtagcctctctccccctgggccactcccgggggtgagggggttaccccttcccagtgttttttattcctgtggggctcaccccaaagtattaaaagtagctttgtaattccttgagcgcctggtttgactggggacttggggggatggggttggaagaatgactgccctttccctcatagctgtgtaaccaaaggctctggttagagaatatgaagggccttagcttttagacctgttctacctcctcaccaaatataatggcagacccatgtgtgtctggaatggccttgaattgctctttccttaaaatagctagctcttcaggagagtatctaaggcccactccatcttacctgaaccagttggtaagggtaaccatgacatagagtgaggcaaggaagaagacgaagtggaaggcagaatagttgtaggaaagatgctggacttggactggaggagctggaggggtttcttggtcagctggcctcgcagccccacccctttgccctggagagaggaaatggctgctgggagcagagctgctgaaacacctcttcccctctcccccaactacctttgttaaggctcttgagggttcttatggcactccacagagatctaccacttcttatggttcctcacttggcactcacctttgtctgcctccactgtttcagggcagcagaaacacagtgagggcttctgcaaaacagaacgcaggttttggaatggtcttaaaagatgtgagggtgttaatctaggaaacttcccccgtgaaaagattggtctagtattaaaaagtggaggcacacctgggttcaaattctagctccagcatataagtggctgtgcagactttggtaagatgtttaatcttttgtgcctcgatttctccatttgtaaaatggagcaaatacctacctcacagggttgttgtgagggttaaattaaatgagattatgtaaaagtatctagcacagttgcctagcacattgtgggtactcaataaaaggtaacagcagctataatctgagcattctgggtag

SEQ ID NO: 375377 - DNA, 761 bp, Homo sapiens
  misc_feature (42)..(42): n is a, c, g, or t
  misc_feature (54)..(54): n is a, c, g, or t
agaaacagtgaatcccccgggcttgcaggaacgcggcccgcntcgacacggctncgagaagacgacagtaacggaggcaggttggagccgctgccgtcgccatgacccgcggtaaccagcgtgagctcgcccgccagaagaatatgaaaaagcagagcgactcggttaagggaaagcgccgagatgacgggctttctgctgccgcccgcaagcagagggactcggagatcatgcagcagaagcagaaaaaggcaaacgagaagaaggaggaacccaagtagctttgtggcttcgtgtccaaccctcttgcccttcgcctgtgtgcctggagccagtcccaccacgctcgcgtttcctcctgtagtgctcacaggtcccagcaccgatggcattccctttgccctgagtctgcagcgggtcccttttgtgcttccttcccctcaggtagcctctctccccctgggccactcccgggggtgagggggttaccccttcccagtgttttttattcctgtggggctcaccccaaagtattaaaagtagctttgtaattccaaaaaaaaaaaaaaaaaaaaaaaaaaaaaaaaaaaaaaaaaaaaaaaaaaaaaaaaaaaaaaaaaaaaaaaaaagcaaaaaaaaaaaacaaaaaggggggggccacgcagaaaagcgacacgggggggcggacacacgcaaagagcgagccccacagaccgtgagaaacacagagggggggccacaacagagagagggcgcaacgg

SEQ ID NO: 375378 - DNA, 876 bp, Homo sapiens
  misc_feature (42)..(42): n is a, c, g, or t
  misc_feature (54)..(54): n is a, c, g, or t
  misc_feature (586)..(586): n is a, c, g, or t
  misc_feature (593)..(593): n is a, c, g, or t
  misc_feature (595)..(596): n is a, c, g, or t
  misc_feature (601)..(601): n is a, c, g, or t
  misc_feature (612)..(612): n is a, c, g, or t
  misc_feature (615)..(616): n is a, c, g, or t
  misc_feature (624)..(624): n is a, c, g, or t
  misc_feature (626)..(626): n is a, c, g, or t
agaaacagtgaatcccccgggcttgcaggaacgcggcccgcntcgacacggctncgagaagacgacagtaacggaggcaggttggagccgctgccgtcgccatgacccgcggtaaccagcgtgagctcgcccgccagaagaatatgaaaaagcagagcgactcggttaagggaaagcgccgagatgacgggctttctgctgccgcccgcaagcagagggactcggagatcatgcagcagaagcagaaaaaggcaaacgagaagaaggaggaacccaagtagctttgtggcttcgtgtccaaccctcttgcccttcgcctgtgtgcctggagccagtcccaccacgctcgcgtttcctcctgtagtgctcacaggtcccagcaccgatggcattccctttgccctgagtctgcagcgggtcccttttgtgcttccttcccctcaggtagcctctctccccctgggccactcccgggggtgagggggttaccccttcccagtgttttttattcctgtggggctcaccccaaagtattaaaagtagctttgtaattccaaaaaaaaaaaaaaaaaaaaaaaaaaattgnggggggncnngcccngaaaagttttnaanncattgtgngnggggccaaggtaagggacgtgcgccaacgcgcccaaggagaccggcccagaacagcgcggttctcccccataaaaaaccgggggaccgggcgcttgcaccccgaagggtccgaggctcacggtctaaacgggccagaactgatatgccccccggggaccaccgcactcccacacatcgaccacagcgaccacacatacaaaccacctcgccccgaccacacgcgaccgaccactactacacacacaaacg

SEQ ID NO: 375379 - DNA, 1049 bp, Homo sapiens
  misc_feature (540)..(540): n is a, c, g, or t
taaagagggtctaagaggcagtactataggtctagtacgagctgggtgcgagtaacggaggcaggttggagccgctgccgtcgccatgacccgcggtaaccagcgtgagctcgcccgccagaagaatatgaaaaagcagagcgactcggttaagggaaagcgccgagatgacgggctttctgctgccgcccgcaagcagagggactcggagatcatgcagcagaagcagaaaaaggcaaacgagaagaaggaggaacccaagtagctttgtggcttcgtgtccaaccctcttgcccttcgcctgtgtgcctggagccagtcccaccacgctcgcgtttcctcctgtagtgctcacaggtcccagcaccgatggcattccctttgccctgagtctgcagcgggtcccttttgtgcttccttcccctcaggtagcctctctccccctgggccactcccgggggtgagggggttaccccttcccagtgttttttattcctgtggggctcaccccaaagtattaaaagtagctttgtaattccnaaaaaaaaaaaaaaaaaaaaaaaaaaaaaaaaaaaaaaaaaaaaaaggaggaaccaaaaaaccaaataaaacctaaaaaaaatcaaataacaattaaactgaaaaacatttaacaaaaaaaaaaaaacttaggggggggccccgaccccaattaccccctatgggagggcatttccaattcacgggccggcgtttaaacaattaggaatggaaaaacccctgtttttaccaatttaacagccttaagggcaaatccccttttgcagttggggtgataacgaaaaaggcccgcccaatcggcctttacaaagagtggccacccataagggcgatgggaaaattaaagctttaattttggataaaaatcccgaaaatttggtgaaaacccctaaattttaaaccaatggcccaaatcggggaaatcctttaaacaaaaaaatcccccctaagggtaagttgtttccaatggaaaacgatcccttttaagaacctgcctcacgtaaaaggga

SEQ ID NO: 375380 - DNA, 1030 bp, Homo sapiens
taaagagggtctaagaggcagtactataggtctagtacgagctgggtgcgagtaacggaggcaggttggagccgctgccgtcgccatgacccgcggtaaccagcgtgagctcgcccgccagaagaatatgaaaaagcagagcgactcggttaagggaaagcgccgagatgacgggctttctgctgccgcccgcaagcagagggactcggagatcatgcagcagaagcagaaaaaggcaaacgagaagaaggaggaacccaagtagctttgtggcttcgtgtccaaccctcttgcccttcgcctgtgtgcctggagccagtcccaccacgctcgcgtttcctcctgtagtgctcacaggtcccagcaccgatggcattccctttgccctgagtctgcagcgggtcccttttgtgcttccttcccctcaggtagcctctctccccctgggccactcccgggggtgagggggttaccccttcccagtgttttttattcctgtggggctcaccccaaagtattaaaagtagctttgtaattccaaaaaaaaaaaaaaaaaaaaaaaaaaaaaaaaaaaaaaaaaaaaaaagcaaaaaaaaaaaacaaaaaaaaaaaaaaaaacaaaaaaaaaaacaaacaaaaaacaaaacaacacggggggcggcgccgccgcaacaacaccacccccggcgcgggagcgacggcgaccaccggcgccacaccactgttctgttacaaaagcgacggccgcacccacacgaggggcgactcttaatataatcaacaaacggcacgcgggtcgcggcgcgcgataccacaacacacacgctgtgcaccgagaagaggcgaacacaaaccactcattttcgcggcgccttccctacaggaccgcacacacaccccccccgatgcggggacggccgacacaccagagcgagccacaccccctccagacggttatctgcccccgcccggggcacaaaacaacaaccacggcgcatgataggggcacacaaacgccatctacagaccg

SEQ ID NO: 375381 - DNA, 568 bp, Homo sapiens
taaagagggtctaagaggcagtactataggtctagtacgagctgggtgcgagtaacggaggcaggttggagccgctgccgtcgccatgacccgcggtaaccagcgtgagctcgcccgccagaagaatatgaaaaagcagagcgactcggttaagggaaagcgccgagatgacgggctttctgctgccgcccgcaagcagagggactcggagatcatgcagcagaagcagaaaaaggcaaacgagaagaaggaggaacccaagtagctttgtggcttcgtgtccaaccctcttgcccttcgcctgtgtgcctggagccagtcccaccacgctcgcgtttcctcctgtagtgctcacaggtcccagcaccgatggcattccctttgccctgagtctgcagcgggtcccttttgtgcttccttcccctcaggtagcctctctccccctgggccactcccgggggtgagggggttaccccttcccagtgttttttattcctgtggggctcaccccaaagtattaaaagtagctttgtaattccaaaaccacatccccactcaacaaacatgt

SEQ ID NO: 375382 - DNA, 543 bp, Homo sapiens
taaagagggtctaagaggcagtactataggtctagtacgagctgggtgcgagtaacggaggcaggttggagccgctgccgtcgccatgacccgcggtaaccagcgtgagctcgcccgccagaagaatatgaaaaagcagagcgactcggttaagggaaagcgccgagatgacgggctttctgctgccgcccgcaagcagagggactcggagatcatgcagcagaagcagaaaaaggcaaacgagaagaaggaggaacccaagtagctttgtggcttcgtgtccaaccctcttgcccttcgcctgtgtgcctggagccagtcccaccacgctcgcgtttcctcctgtagtgctcacaggtcccagcaccgatggcattccctttgccctgagtctgcagcgggtcccttttgtgcttccttcccctcaggtagcctctctccccctgggccactcccgggggtgagggggttaccccttcccagtgttttttattcctgtggggctcacccctcgtgccgaattcggcacgagcaaagaactta

SEQ ID NO: 375383 - DNA, 833 bp, Homo sapiens
gtcggcgtcccccacttcttagaggaacaagtggcgttcagccacccgagattgagcaatcacaggtctgtgaggcccttagatgtccggggctgcacgcgcgctacactgactggctcagcgtgtgcctaccctaccccggcaggcgcgggtaacccattgaaccccattcgtgatggggatcggggattgccaattattccccatgaacgaggaattcccagtaagttccggtctttcgcccgcccaaaacccccgcagactcagggcaaagggaatgccacaggtcccagcaccgatggcattccctttgccctgagtaacggaggcaggttggagccgctgccgtcgccatgacccgcggtaaccagcgtgagctcgcccgccagaagaatatgaaaaagcagagcgactcggttaagggaaagcgccgagatgacgggctttctgctgccgcccgcaagcagagggactcggagatcatgcagcagaagcagaaaaaggcaaacgagaagaaggaggaacccaagtagctttgtggcttcgtgtccaaccctcttgcccttcgcctgtgtgcctggagccagtcccaccacgctcgcgtttcctcctgtagtgctcacaggtcccagcaccgatggcattccctttgccctgagtctgcagcgggtcccttttgtgcttccttcgtacctataaatacgtactataaagcttttgttcacacacacgcctgaagtatcctgtaagcactctgtagtatagcagataagtcttcatggcttttctggtcttctgctgcgcagggttcattgagatttcgtatgtaatag

SEQ ID NO: 375384 - DNA, 709 bp, Homo sapiens
gtcggcgtcccccacttcttagaggaacaagtggcgttcagccacccgagattgagcaatcacaggtctgtgaggcccttagatgtccggggctgcacgcgcgctacactgactggctcagcgtgtgcctaccctaccccggcaggcgcgggtaacccattgaaccccattcgtgatggggatcggggattgccaattattccccatgaacgaggaattcccagtaagttccggtctttcgcccgcccaaaacccccgcagactcagggcaaagggaatgccacaggtcccagcaccgatggcattccctttgccctgagtaacggaggcaggttggagccgctgccgtcgccatgacccgcggtaaccagcgtgagctcgcccgccagaagaatatgaaaaagcagagcgactcggttaagggaaagcgccgagatgacgggctttctgctgccgcccgcaagcagagggactcggagatcatgcagcagaagcagaaaaaggcaaacgagaagaaggaggaacccaagtagctttgtggcttcgtgtccaaccctcttgcccttcgcctgtgtgcctggagccagtcccaccacgctcgcgtttcctcctgtagtgctcacaggtcccagcaccgatggcattccctttgccctgagtctgcagcgggtcccttttgtgcttccttgtcaaacggtgccgagctcga

SEQ ID NO: 375385 - DNA, 1164 bp, Homo sapiens
taaagagggtctaagaggcagtactataggtctagtacgagctgggtgcgagtaacggaggcaggttggagccgctgccgtcgccatgacccgcggtaaccagcgtgagctcgcccgccagaagaatatgaaaaagcagagcgactcggttaagggaaagcgccgagatgacgggctttctgctgccgcccgcaagcagaggtagccccagggaggggagggaaagggacggtggagacctgggttagaccaagggttatagaaggaaagagagctacctcagggcttgaatgtggactagtcgtgaggagcagagtgcattgcttcctctagggttttatttcctccccaccctccaaattgttagctcacagccttacaggaaaggacgggggcgggcgcctgccctcagtctgatttctgagcgtccctgggtctgaccttaagggcaagggcagggagcttcacatttcaaatacagttgtggttacggcagcccagtacttttggccctccttgctgttcggttctcctcccttctcccaacctcctcactggtgttgctgggtgtggtcctcaatacagaatagagacccttgggcctgtgtcaccagacttctgaccccttggcaacagccagatggagactggtcgccttttgagcctcagctctcttcctcttgttctcctagggtgggagtacagcagccaaacgctgaacttagtcccatccacttccatcttatcctttgtgcccttcatccccctgcatcttgtcctttttgccctctggtacctcccagtgccccatcatctctacccccagggactcggagatcatgcagcagaagcagaaaaaggcaaacgagaagaaggaggaacccaagtagctttgtggcttcgtgtccaaccctcttgcccttcgcctgtgtgcctggagccagtcccaccacgctcgcgtttcctcctgtagtgctcacaggtcccagcaccgatggcattccctttgccctgagtctgcagcgggtcccttttgtgcttccttcccctcaggtagcctctctccccctgggccactcccgggggtgagggggttaccccttcccagtgttttttattcctgtggggctcaccccaaagtattaaaagtagctttgtaattcc

SEQ ID NO: 375386 - DNA, 563 bp, Homo sapiens
taaagagggtctaagaggcagtactataggtctagtacgagctgggtgcgagtaacggaggcaggttggagccgctgccgtcgccatgacccgcggtaaccagcgtgagctcgcccgccagaagaatatgaaaaagcagagcgactcggttaagggaaagcgccgagatgacgggctttctgctgccgcccgcaagcagaggtgccccatcatctctacccccagggactcggagatcatgcagcagaagcagaaaaaggcaaacgagaagaaggaggaacccaagtagctttgtggcttcgtgtccaaccctcttgcccttcgcctgtgtgcctggagccagtcccaccacgctcgcgtttcctcctgtagtgctcacaggtcccagcaccgatggcattccctttgccctgagtctgcagcgggtcccttttgtgcttccttcccctcaggtagcctctctccccctgggccactcccgggggtgagggggttaccccttcccagtgttttttattcctgtggggctcaccccaaagtattaaaagtagctttgtaattcc

SEQ ID NO: 375387 - DNA, 386 bp, Homo sapiens
gcacgtgtgtgtgtcgatctagaggctccccgttcgacggaagcagagggactcggagatcatgcagcagaagcagaaaaaggcaaacgagaagaaggaggaacccaagtagctttgtggcttcgtgtccaaccctcttgcccttcgcctgtgtgcctggagccagtcccaccacgctcgcgtttcctcctgtagtgctcacaggtcccagcaccgatggcattccctttgccctgagtctgcagcgggtcccttttgtgcttccttcccctcaggtagcctctctccccctgggccactcccgggggtgagggggttaccccttcccagtgttttttattcctgtggggctcaccccaaagtattaaaagtagctttgtaattcc

SEQ ID NO: 375388 - DNA, 374 bp, Homo sapiens
ccccgactagcccgacaggaggaaacggaagcagagggactcggagatcatgcagcagaagcagaaaaaggcaaacgagaagaaggaggaacccaagtagctttgtggcttcgtgtccaaccctcttgcccttcgcctgtgtgcctggagccagtcccaccacgctcgcgtttcctcctgtagtgctcacaggtcccagcaccgatggcattccctttgccctgagtctgcagcgggtcccttttgtgcttccttcccctcaggtagcctctctccccctgggccactcccgggggtgagggggttaccccttcccagtgttttttattcctgtggggctcaccccaaagtattaaaagtagctttgtaattcc

SEQ ID NO: 375389 - DNA, 368 bp, Homo sapiens
  misc_feature (1)..(1): n is a, c, g, or t
nagagctcggcccgttttacggaagcagagggactcggagatcatgcagcagaagcagaaaaaggcaaacgagaagaaggaggaacccaagtagctttgtggcttcgtgtccaaccctcttgcccttcgcctgtgtgcctggagccagtcccaccacgctcgcgtttcctcctgtagtgctcacaggtcccagcaccgatggcattccctttgccctgagtctgcagcgggtcccttttgtgcttccttcccctcaggtagcctctctccccctgggccactcccgggggtgagggggttaccccttcccagtgttttttattcctgtggggctcaccccaaagtattaaaagtagctttgtaattcc

SEQ ID NO: 375390 - DNA, 1138 bp, Homo sapiens
ggcccacagcagcacacctgggagtagagcagatgcaaggcagcgaggtggagacttgctgaggaaaggcatacgttaatgtatgtgtgaggttaacccaggaggttgaattccaaaatttccccttcccctttcttccttttactcaggttctgtttcaagctgattccagccatttgggattgccgcccactgacaacttagtagggctttcattataagcaggcttgagatatctgacctttctctcgacctaaacacctggggctggaaacatggcgggagagatttacagattatacctggggcaacgaaccagaacgacattagaggagaaaagaggcctgtcgtttttattggcttctgcacgtcttcctccccagcttcggccactctccccttcgcaccctctcacctgacagaagggacttttcctagtttatgaggtggttaaggatatcggtggggtgggctggagcggtgtcgggttaggtctgagagaaggcctcgcacaaaacactgtacaaacccgaaaggaagtctgagagacgaaccgccttcctccctgaagcttctagaactggagcagaaagaaggtgtggcccagggccagccccgcctcctccccgggcggaagctgtgtcagttgccggaagtcggcgtgaggtggggcttatgcggcggcgtggtgaaatagatatggcgaccgagggggatgtggagctggagttggagactgagaccagtggaccagagcggcctccggagaagccacggaaacatgacagcggtgcggcggacttggagcgggtcaccgactatgcagaggagaaggagatccagagttccaatctggagacggccatgtctgtgattggagacagaaggtcccgggagcagaaagccaaacaggagcgggagaaagaactggcaaaagtcactatcaagaaggaagatctggagctaataatgactgagatggagatatctcgagcagcagcagaacgcagtttgcgggaacacatgggcaacgtggtagaggcgcttattgccctaaccaactgatgcgtgctttctcaaatatacctactggattaatttatggcaataaaatttttttttgtctttttcagtttta

SEQ ID NO: 375391 - DNA, 856 bp, Homo sapiens
ctcaggctgttctctccagattagggggcagtttgtctatctggccccctgtggattagcattctttattggtttaggattagacgtcattcaggttgaacggagttccctgaggtgggtgggtgcgtgtttatgtgttgaggggactattcctagtttatgaggtggttaaggatatcggtggggtgggctggagcggtgtcgggttaggtctgagagaaggcctcgcacaaaacactgtacaaacccgaaaggaagtctgagagacgaaccgccttcctccctgaagcttctagaactggagcagaaagaaggtgtggcccagggccagccccgcctcctccccgggcggaagctgtgtcagttgccggaagtcggcgtgaggtggggcttatgcggcggcgtggtgaaatagatatggcgaccgagggggatgtggagctggagttggagactgagaccagtggaccagagcggcctccggagaagccacggaaacatgacagcggtgcggcggacttggagcgggtcaccgactatgcagaggagaaggagatccagagttccaatctggagacggccatgtctgtgattggagacagaaggtcccgggagcagaaagccaaacaggagcgggagaaagaactggcaaaagtcactatcaagaaggaagatctggagctaataatgactgagatggagatatctcgagcagcagcagaacgcagtttgcgggaacacatgggcaacgtggtagaggcgcttattgccctaaccaactgatgcgtgctttctcaaatatacctactggattaatttatggcaataaaatttttttttgtctttttcagtttta

SEQ ID NO: 375392 - DNA, 485 bp, Homo sapiens
taaagagggtctaagaggcagtactataggtctagtacgagctgggtgcgagtaacggaggcaggttggagccgctgccgtcgccatgacccgcggtaaccagcgtgagctcgcccgccagaagaatatgaaaaagcagagcgactcggttaagggaaagcgccgagatgacgggctttctgctgccgcccgcaagcagagggactcggagatcatgcagcagaagcagaaccctcttgcccttcgcctgtgtgcctggagccagtcccaccacgctcgcgtttcctcctgtagtgctcacaggtcccagcaccgatggcattccctttgccctgagtctgcagcgggtcccttttgtgcttccttcccctcaggtagcctctctccccctgggccactcccgggggtgagggggttaccccttcccagtgttttttattcctgtggggctcaccccaaagtattaaaagtagctttgtaattcc

SEQ ID NO: 375393 - DNA, 308 bp, Homo sapiens
acaggcgaagggcaagagggttggacacgaagccacaaagctacttgggttcctccctcttgcccttcgcctgtgtgcctggagccagtcccaccacgctcgcgtttcctcctgtagtgctcacaggtcccagcaccgatggcattccctttgccctgagtctgcagcgggtcccttttgtgcttccttcccctcaggtagcctctctccccctgggccactcccgggggtgagggggttaccccttcccagtgttttttattcctgtggggctcaccccaaagtattaaaagtagctttgtaattcc

SEQ ID NO: 375394 - DNA, 1971 bp, Homo sapiens
ggcccacagcagcacacctgggagtagagcagatgcaaggcagcgaggtggagacttgctgaggaaaggcatacgttaatgtatgtgtgaggttaacccaggaggttgaattccaaaatttccccttcccctttcttccttttactcaggttctgtttcaagctgattccagccatttgggattgccgcccactgacaacttagtagggctttcattataagcaggcttgagatatctgacctttctctcgacctaaacacctggggctggaaacatggcgggagagatttacagattatacctggggcaacgaaccagaacgacattagaggagaaaagaggcctgtcgtttttattggcttctgcacgtcttcctccccagcttcggccactctccccttcgcaccctctcacctgacagaagggacttttcctagtttatgaggtggttaaggatatcggtggggtgggctggagcggtgtcgggttaggtctgagagaaggcctcgcacaaaacactgtacaaacccgaaaggaagtctgagagacgaaccgccttcctccctgaagcttctagaactggagcagaaagaaggtgtggcccagggccagccccgcctcctccccgggcggaagctgtgtcagttgccggaagtcggcgtgaggtggggcttatgcggcggcgtggtgaaatagatatggcgaccgagggggatgtggagctggagttggagactgagaccagtggaccagagcggcctccggagaagccacggaaacatgacagcggtgcggcggacttggagcgggtcaccgactatgcagaggagaaggagatccagagttccaatctggagacggccatgtctgtgattggagacagaaggtcccgggagcagaaagccaaacaggagcgggagaaagaactggcaaaagtcactatcaagaaggaagatctggagctaataatgactgagatggagatatctcgagcagcagcagaacgcagtttgcgggaacacatgggcaacgtggtagaggcgcttattgccctaaccaactgatgcgtgctttctcaaatatacctactggattaatttatggcaataaaatttttttttgtctttttcagttttatcatcttgggtcaagtagagtgtatactatatcctatgttgtggagaatttatatgttggagactaactgaatttaagtgacccattaaaatctagcacacctgtatgaaaaatcagtgtagaagaatacctcatgtgcagatgctaggtggcaggccagtctcattcatctgactagctctcaacagtattcaaggtacatctggagtctcagcagagttactgtactcaaatggcatgtgtctccaagacagcttatgaatatctaaaaggccagctacctgcctaggagccactatatatatagatagatgtaggttatgaacccagttcataggccaccttgagttagaattttggtacctacaacatgcttgattttgagtgattaaaaaaaaataatttggctgggtgctgtggctcacgcctctaatcccagcactttgggaggtcgaggcaggtagatcacgaggtcaggaattcaagaccagcctggccaacatgtgaaaccccgtctccactgaaaatagaaaaattagctgggcatggtggtgggcgcctataatcccagctattctggaggctgaggcaggaatcgcttgaaattggaaagcagaggtttaatttcttcttcatatttgtcctccttttcagaatacctgtgggagaaaccaaaacactgctttaagacaaggaggccagccaggcatggtggctcatgcctggaatcctggcactttgggagcctgaggctggtggatcacaaggtcaggagttcgagcacagcgtggcaacatggtgaaacccgtctccacaggtaccgagtcgattcg

SEQ ID NO: 375395 - DNA, 1711 bp, Homo sapiens
  misc_feature (1376)..(1376): n is a, c, g, or t
ggcccacagcagcacacctgggagtagagcagatgcaaggcagcgaggtggagacttgctgaggaaaggcatacgttaatgtatgtgtgaggttaacccaggaggttgaattccaaaatttccccttcccctttcttccttttactcaggttctgtttcaagctgattccagccatttgggattgccgcccactgacaacttagtagggctttcattataagcaggcttgagatatctgacctttctctcgacctaaacacctggggctggaaacatggcgggagagatttacagattatacctggggcaacgaaccagaacgacattagaggagaaaagaggcctgtcgtttttattggcttctgcacgtcttcctccccagcttcggccactctccccttcgcaccctctcacctgacagaagggacttttcctagtttatgaggtggttaaggatatcggtggggtgggctggagcggtgtcgggttaggtctgagagaaggcctcgcacaaaacactgtacaaacccgaaaggaagtctgagagacgaaccgccttcctccctgaagcttctagaactggagcagaaagaaggtgtggcccagggccagccccgcctcctccccgggcggaagctgtgtcagttgccggaagtcggcgtgaggtggggcttatgcggcggcgtggtgaaatagatatggcgaccgagggggatgtggagctggagttggagactgagaccagtggaccagagcggcctccggagaagccacggaaacatgacagcggtgcggcggacttggagcgggtcaccgactatgcagaggagaaggagatccagagttccaatctggagacggccatgtctgtgattggagacagaaggtcccgggagcagaaagccaaacaggagcgggagaaagaactggcaaaagtcactatcaagaaggaagatctggagctaataatgactgagatggagatatctcgagcagcagcagaacgcagtttgcgggaacacatgggcaacgtggtagaggcgcttattgccctaaccaactgatgcgtgctttctcaaatatacctactggattaatttatggcaataaaatttttttttgtctttttcagttttaaaaaaaaaacaaaaaaagcaacaacaacaaagaacaaaacaacctgcggggcgccttatatgcgggggggcgggacaacaaggagggtaccggaacgtcggccgagtggccaatagtgtggtgccctagacccagctttctgtggtgcacacggggggtaaacctgggcggcgcccatatggggaggccggaataaatcggaaaaggcgcgtaccgtggacgccctggtgcggaaacncgggcgcgaagcacgcgctaggcacagagcggcggaccacccagttgggagcaaaacaagctgggccgggcgaaacagtggaaatgaacgaacgaaacacggacagaacagacggaaaggcccgcaaacaagagcaagcacaaagcacgctaccacgaccaaacaaaagcgacgcacggcgcaggcagagaaggacacaacgacgacgcgcgcagtcccacagacctcagcaccgcgacgaggccaagggagagacaacaacagaccaacgaaaagacacaacagacagcggacgtacgacggagatcccagacagaccgcgcccagcaggcgaa

SEQ ID NO: 375396 - DNA, 1196 bp, Homo sapiens
ggcccacagcagcacacctgggagtagagcagatgcaaggcagcgaggtggagacttgctgaggaaaggcatacgttaatgtatgtgtgaggttaacccaggaggttgaattccaaaatttccccttcccctttcttccttttactcaggttctgtttcaagctgattccagccatttgggattgccgcccactgacaacttagtagggctttcattataagcaggcttgagatatctgacctttctctcgacctaaacacctggggctggaaacatggcgggagagatttacagattatacctggggcaacgaaccagaacgacattagaggagaaaagaggcctgtcgtttttattggcttctgcacgtcttcctccccagcttcggccactctccccttcgcaccctctcacctgacagaagggacttttcctagtttatgaggtggttaaggatatcggtggggtgggctggagcggtgtcgggttaggtctgagagaaggcctcgcacaaaacactgtacaaacccgaaaggaagtctgagagacgaaccgccttcctccctgaagcttctagaactggagcagaaagaaggtgtggcccagggccagccccgcctcctccccgggcggaagctgtgtcagttgccggaagtcggcgtgaggtggggcttatgcggcggcgtggtgaaatagatatggcgaccgagggggatgtggagctggagttggagactgagaccagtggaccagagcggcctccggagaagccacggaaacatgacagcggtgcggcggacttggagcgggtcaccgactatgcagaggagaaggagatccagagttccaatctggagacggccatgtctgtgattggagacagaaggtcccgggagcagaaagccaaacaggagcgggagaaagaactggcaaaagtcactatcaagaaggaagatctggagctaataatgactgagatggagatatctcgagcagcagcagaacgcagtttgcgggaacacatgggcaacgtggtagaggcgcttattgccctaaccaactgatgcgtgctttctcaaatatacctactggattaatttatggcaataaaatttttttttgtctttttcagttttaaaatacccaaaattaactgggatccaaaaacaactccaggaggggatggaaaaaaaaa

SEQ ID NO: 375397 - DNA, 2385 bp, Homo sapiens
ggcccacagcagcacacctgggagtagagcagatgcaaggcagcgaggtggagacttgctgaggaaaggcatacgttaatgtatgtgtgaggttaacccaggaggttgaattccaaaatttccccttcccctttcttccttttactcaggttctgtttcaagctgattccagccatttgggattgccgcccactgacaacttagtagggctttcattataagcaggcttgagatatctgacctttctctcgacctaaacacctggggctggaaacatggcgggagagatttacagattatacctggggcaacgaaccagaacgacattagaggagaaaagaggcctgtcgtttttattggcttctgcacgtcttcctccccagcttcggccactctccccttcgcaccctctcacctgacagaagggacttttcctagtttatgaggtggttaaggatatcggtggggtgggctggagcggtgtcgggttaggtctgagagaaggcctcgcacaaaacactgtacaaacccgaaaggaagtctgagagacgaaccgccttcctccctgaagcttctagaactggagcagaaagaaggtgtggcccagggccagccccgcctcctccccgggcggaagctgtgtcagttgccggaagtcggcgtgaggtggggcttatgcggcggcgtggtgaaatagatatggcgaccgagggggatgtggagctggagttggagactgagaccagtggaccagagcggcctccggagaagccacggaaacatgacagcggtgcggcggacttggagcgggtcaccgactatgcagaggagaaggagatccagagttccaatctggagacgggagaaagaactggcaaaagtcactatcaagaaggaagatctggagctaatagtgagtggtagtgcctaactagtgtatgcggaggggaggctattctgcttaatttgggttgtttcctgaaacaagcggagtcagtatatttggtggcacattaatgcctgggaacctatgtaacatgatttttttctgcagatgactgagatggagatatctcgagcagcagcagaacgcagtttgcgggaacacatgggcaacgtggtagaggcgcttattgccctaaccaactgatgcgtgctttctcaaatatacctactggattaatttatggcaataaaatttttttttgtctttttcagttttatcatcttgggtcaagtagagtgtatactatatcctatgttgtggagaatttatatgttggagactaactgaatttaagtgacccattaaaatctagcacacctgtatgaaaaatcagtgtagaagaatacctcatgtgcagatgctaggtggcaggccagtctcattcatctgactagctctcaacagtattcaaggtacatctggagtctcagcagagttactgtactcaaatggcatgtgtctccaagacagcttatgaatatctaaaaggccagctacctgcctaggagccactatatatatagatagatgtaggttatgaacccagttcataggccaccttgagttagaattttggtacctacaacatgcttgattttgagtgattaaaaaaaaataatttggctgggtgctgtggctcacgcctctaatcccagcactttgggaggtcgaggcaggtagatcacgaggtcaggaattcaagaccagcctggccaacatgtgaaaccccgtctccactgaaaatagaaaaattagctgggcatggtggtgggcgcctataatcccagctattctggaggctgaggcaggaatcgcttgaaattggaaagcagaggttgcagtgagctgagatcacactactgtactactgtactccagcctgggggaaagagtgaaactccatctcaaaaaaaaaaaaaaaaaaaagcccgggcacagtggctcacacctgtaatcccagcactttgggaggctgaggcagtcggatcatgaggtcaggagttgaagacaagcctggccaacatggtgaaaccctgtctctactaaaaatacaaaaaaaataaaattagccaggcgtggtggtgcatgcctgtagtcccagctactcaggaggctgaagcagaagaattgcttgaaccagggaggcggaagttgcagtgagctgagattgtgccactgtactccagcctgggtgacagagcgagactgtctcaaaaacaaaacaacaaaaaagaatttaggggccaggcatggtggctcatgcctgtaatcccaacaccttgggaagctgaggcaagacgatcacttgagcccagcagtttgagaccagcttgggcaacacagtgagatttcgtctctaccgcgctccccccaccacc

SEQ ID NO: 375398 - DNA, 322 bp, Homo sapiens
taaagagggtctaagaggcagtactataggtctagtacgagctgggtgcgagtaacggaggcaggttggagccgctgccgtcgccatgacccgcggtaaccagcgtgagctcgcccgccagaagaatatgaaaaagcagagcgactcggttaagggaaagcgccgagatgacgggctttctgctgccgcccgcaagcagagggactcggagatcatgcagcagaagcagaaaaaggcaaacgagaagaaggaggaacccaagtagctttgtggcttcgtgtccaacctctgccaacagccgtcgagggaccgtcagaacgca

SEQ ID NO: 375399 - DNA, 322 bp, Homo sapiens
taaagagggtctaagaggcagtactataggtctagtacgagctgggtgcgagtaacggaggcaggttggagccgctgccgtcgccatgacccgcggtaaccagcgtgagctcgcccgccagaagaatatgaaaaagcagagcgactcggttaagggaaagcgccgagatgacgggctttctgctgccgcccgcaagcagagggactcggagatcatgcagcagaagcagaaaaaggcaaacgagaagaaggaggaacccaagtagctttgtggcttcgtgtccaaccctctacaagccgccacaaactctacaagcctgcca

SEQ ID NO: 375400 - DNA, 752 bp, Homo sapiens
cctttcccatagcggccatgtctgtgattggagacagaaggtcccgggagcagaaagccaaacaggagcggtaagtcttcaggggcagccaactttaacagttcttccctccccggtccccagacaaaaataaaaaccattattaagcctttataccgttcttcaaatttatcaccaattcctgcagatctaggcgccacaactttactcttgttagcagaaggcctcctggcaacacctgctgccaagactccaggggaaaggagtattagtgggagtttttattttcaatcaagggtttatcaagatttatttacagggcacttctgggaatgacccttcctgggagtttatggtgttggttgagaatgaggactaatatatttaaatatttttgcacgggagaaagaactggcaaaagtcactatcaagaaggaagatctggagctaatagtgagtggtagtgcctaactagtgtatgcggaggggaggctattctgcttaatttgggttgtttcctgaaacaagcggagtcagtatatttggtggcacattaatgcctgggaacctatgtaacatgatttttttctgcagatgactgagatggagatatctcgagcagcagcagaacgcagtttgcgggaacacatgggcaacgtggtagaggcgcttattgccctaaccaactgatgcgtgctttctcaaatatacctactggattaatttatggcaataaaatttttttttgtctt

SEQ ID NO: 375401 - DNA, 477 bp, Homo sapiens
  misc_feature (14)..(14): n is a, c, g, or t
  misc_feature (20)..(21): n is a, c, g, or t
  misc_feature (23)..(23): n is a, c, g, or t
  misc_feature (25)..(27): n is a, c, g, or t
  misc_feature (29)..(29): n is a, c, g, or t
ctctagtacaacanctcatnncnannncncgcggtaaccagcgtgagctcgcccgccagaagaatatgaaaaagcagagcgactcggttaagggaaagcgccgagatgacgggctttctgctgccgcccgcaagcagagggactcggagatcatgcagcagaagcagaaaaaggcaaacgagaagaaggaggaacccaagtagctttgtggcttcgtgtccaaccctcttgcccttcgcctgtgtgcctggagccagtcccaccacgctcgcgtttcctcctgtagtgctcacaggtcccagcaccgatggcattccctttgccctgagtctgcagcgggtcccttttgtgcttccttcccctcaggtagcctctctccccctgggccactcccgggggtgagggggttaccccttcccagtgttttttattcctgtggggctcaccccaaagtattaaaagtagctttgtaattcc

SEQ ID NO: 375402 - DNA, 853 bp, Homo sapiens
  misc_feature (14)..(14): n is a, c, g, or t
  misc_feature (20)..(21): n is a, c, g, or t
  misc_feature (23)..(23): n is a, c, g, or t
  misc_feature (25)..(27): n is a, c, g, or t
  misc_feature (29)..(29): n is a, c, g, or t
ctctagtacaacanctcatnncnannncncgcggtaaccagcgtgagctcgcccgccagaagaatatgaaaaagcagagcgactcggttaagggaaagcgccgagatgacgggctttctgctgccgcccgcaagcagagggactcggagatcatgcagcagaagcagaaaaaggcaaacgagaagaaggaggaacccaagtagctttgtggcttcgtgtccaaccctcttgcccttcgcctgtgtgcctggagccagtcccaccacgctcgcgtttcctcctgtagtgctcacaggtcccagcaccgatggcattccctttgccctgagtctgcagcgggtcccttttgtgcttccttcccctcaggtagcctctctccccctgggccactcccgggggtgagggggttaccccttcccagtgttttttattcctgtggggctcaccccaaagtattaaaagtagctttgtaattccaaaaaaaaaaaaaaaaaaaaaaaaaaaagggggggcgcggcccaaaagtttcccccgcggggggccccaagtttagcgggtaccccggttttttgggcacaagggggccccataataggggagcgaataaacaccctaggacacgtgcacgcgttaacaacgctcggaacggggaaaaccgtgcaacgcggggacccttgacgaaggaccctaactccgggggggttggacacaaagtggggccacaataatcctagagaaagattaaaaggctctagagggaattttaaaactttgaaggtgctaaaggtggttaaacacaggaaatagatcagtggctctgaaaaactgggaaagaggtatgataggacaattt

SEQ ID NO: 375403 - DNA, 538 bp, Homo sapiens
tcagtctggactctaccacttgggtctccagattttctgttacgtccttgtgggtcaggatatttctggaagtcactccgtgaggctggtgaaatagatatggcgaccgagggggatgtggagctggagttggagactgagaccagtggaccagagcggcctccggagaagccacggaaacatgacagcggtgcggcggacttggagcgggtcaccgactatgcagaggagaaggagatccagagttccaatctggagacggccatgtctgtgattggagacagaaggtcccgggagcagaaagccaaacaggagcgggagaaagaactggcaaaagtcactatcaagaaggaagatctggagctaataatgactgagatggagatatctcgagcagcagcagaacgcagtttgcgggaacacatgggcaacgtggtagaggcgcttattgccctaaccaactgatgcgtgctttctcaaatatacctactggattaatttatggcaataaaatttttttttgtctttttcagtttta

SEQ ID NO: 375404 - DNA, 270 bp, Homo sapiens
  misc_feature (1)..(1): n is a, c, g, or t
nagagctcggcccgttttacggaagcagagggactcggagatcatgcagcagaagcagaaaaaggcaaacgagaagaaggaggaacccaagtagctttgtggcttcgtgtccaaccctcttgcccttcgcctgtgtgcctggagccagtcccaccacgctcgcgtttcctcctgtagtgctcacaggtcccagcaccgatggcattccctttgccctgagtctgcagcgggtcccttttgtgcttccttgtcaaacggtgccgagctcga

SEQ ID NO: 375405 - DNA, 755 bp, Homo sapiens
  misc_feature (34)..(34): n is a, c, g, or t
tttaaacccctttactactactatgctgcgagangagacagaaggggacagaacgaggggacgtaacggaggcaggttggagccgctgccgtcgccatgacccgcggtaaccagcgtgagctcgcccgccagaagaatatgaaaaagcagagcgactcggttaagggaaagcgccgagatgacgggctttctgctgccgcccgcaagcagagggactcggagatcatgcagcagaagcagaaaaaggcaaacgagaagaaggaggaacccaagtagctttgtggcttcgtgtccaaccctcttgcccttcgcctgtgtgcctggagccagtcccaccacgctcgcgtttcctcctgtagtgctcacaggtcccagcaccgatggcattccctttgccctgagtctgcagcgggtcccttttgtgcttccttcccctcaggtagcctctctccccctgggccactcccgggggtgagggggttaccccttcccagtgttttttattcctgtggggctcaccccaaagtattaaaagtagctttgtaattccaaaaaaaaaaaaaaaaaaaaacttccgggggtatctaattgcgggtgtgggggaaaaaggggattggaattgggcaccgtgtggcacttagggggtgttcctggacccacgctttctgtgttcaacggcggcaaaatccgccggccccccctatagggaggcggatataaataggaaaaggccggttacctgtgccctctctcac

SEQ ID NO: 375406 - DNA, 930 bp, Homo sapiens
taaagagggtctaagaggcagtactataggtctagtacgagctgggtgcgagtaacggaggcaggttggagccgctgccgtcgccatgacccgcggtaaccagcgtgagctcgcccgccagaagaatatgaaaaagcagagcgactcggttaagggaaagcgccgagatgacgggctttctgctgccgcccgcaagcagagggactcggagatcatgcagcagaagcagaaaaaggcaaacgagaagaaggaggaacccaagtagctttgtggcttcgtgtccaaccctcttgcccttcgcctgtgtgcctggagccagtcccaccacgctcgcgtttcctcctgtagtgctcacaggtcccagcaccgatggcattccctttgccctgagtctgcagcgggtcccttttgtgcttccttcccctcaggtagcctctctccccctgggccactcccgggggtgagggggttaccccttcccagtgttttttattcctgtggggctcaccccaaagtattaaaagtagctttgtaattccttgagcgcctggtttgactggggacttggggggatggggttggaagaatgactgccctttcccaccaaaaaagggagaactctttagattcagattgtgggtatgtagacttaataagtgaaacatcacagaagaagcctttattatacaatgacaaccaaacaagtactccggatatgcagtagaggaatcctctaagaaccatagagacttcttttctgtgatttttgttccccacccttgaacaccatctctaggatggagttggcctaagagtgaatgctgcaagatctgtgtttatgcctcttttcctcattcttcctcagtttgttcgtctgcttgaaagttggccaaaaaatcctgctgctcaccgacttcccgtggtcagctg

SEQ ID NO: 375407 - DNA, 1229 bp, Homo sapiens
taaagagggtctaagaggcagtactataggtctagtacgagctgggtgcgagtaacggaggcaggttggagccgctgccgtcgccatgacccgcggtaaccagcgtgagctcgcccgccagaagaatatgaaaaagcagagcgactcggttaagggaaagcgccgagatgacgggctttctgctgccgcccgcaagcagagggactcggagatcatgcagcagaagcagaaaaaggcaaacgagaagaaggaggaacccaagtagctttgtggcttcgtgtccaaccctcttgcccttcgcctgtgtgcctggagccagtcccaccacgctcgcgtttcctcctgtagtgctcacaggtcccagcaccgatggcattccctttgccctgagtctgcagcgggtcccttttgtgcttccttcccctcaggtagcctctctccccctgggccactcccgggggtgagggggttaccccttcccagtgttttttattcctgtggggctcaccccaaagtattaaaagtagctttgtaattccttgagcgcctggtttgactggggacttggggggatggggttggaagaatgactgccctttccctcatagctgtgtaaccaaaggctctggttagagaatatgaagggccttagcttttagacctgttctacctcctcaccaaatataatggcagacccatgtgtgtctggaatggccttgaattgctctttccttaaaatagctagctcttcaggagagtatctaaggcccactccatcttacctgaaccagttggtaagggtaaccatgacatagagtgaggcaaggaagaagacgaagtggaaggcagaatagttgtaggaaagatgctggacttggactggaggagctggaggggtttcttggtcagctggcctcgcagccccacccctttgccctggagagaggaaatggctgctgggagcagagctgctgaaacacctcttcccctctcccccaactacctttgttaaggctcttgagggttcttatggcactccacagagatctaccacttcttatggttcctcacttggcactcacctttgtctgcctccactgtttcagggcagcagaaacacagtgagggcttctgcaaaacagaacgcaggttttggaatggtcttaaaagatgtgagggtgttaatctaggaaacttcccccgtgaaaaaggaaaggatggggaccgag

SEQ ID NO: 375408 - DNA, 716 bp, Homo sapiens
gtcggcgtcccccacttcttagaggaacaagtggcgttcagccacccgagattgagcaatcacaggtctgtgaggcccttagatgtccggggctgcacgcgcgctacactgactggctcagcgtgtgcctaccctaccccggcaggcgcgggtaacccattgaaccccattcgtgatggggatcggggattgccaattattccccatgaacgaggaattcccagtaagttccggtctttcgcccgcccaaaacccccgcagactcagggcaaagggaatgccacaggtcccagcaccgatggcattccctttgccctgagtaacggaggcaggttggagccgctgccgtcgccatgacccgcggtaaccagcgtgagctcgcccgccagaagaatatgaaaaagcagagcgactcggttaagggaaagcgccgagatgacgggctttctgctgccgcccgcaagcagagggactcggagatcatgcagcagaagcagaaaaaggcaaacgagaagaaggaggaacccaagtagctttgtggcttcgtgtccaaccctcttgcccttcgcctgtgtgcctggagccagtcccaccacgctcgcgtttcctcctgtagtgctcacaggtcccagcaccgatggcattccctttgccctgagtctgcagcgggtcccttttgtgcttccttttgcaggcagggatcctctagaacaccg

SEQ ID NO: 375409 - DNA, 716 bp, Homo sapiens
gtcggcgtcccccacttcttagaggaacaagtggcgttcagccacccgagattgagcaatcacaggtctgtgaggcccttagatgtccggggctgcacgcgcgctacactgactggctcagcgtgtgcctaccctaccccggcaggcgcgggtaacccattgaaccccattcgtgatggggatcggggattgccaattattccccatgaacgaggaattcccagtaagttccggtctttcgcccgcccaaaacccccgcagactcagggcaaagggaatgccacaggtcccagcaccgatggcattccctttgccctgagtaacggaggcaggttggagccgctgccgtcgccatgacccgcggtaaccagcgtgagctcgcccgccagaagaatatgaaaaagcagagcgactcggttaagggaaagcgccgagatgacgggctttctgctgccgcccgcaagcagagggactcggagatcatgcagcagaagcagaaaaaggcaaacgagaagaaggaggaacccaagtagctttgtggcttcgtgtccaaccctcttgcccttcgcctgtgtgcctggagccagtcccaccacgctcgcgtttcctcctgtagtgctcacaggtcccagcaccgatggcattccctttgccctgagtctgcagcgggtcccttttgtgcttccttatgctccgtactgatgcccgcttactga

SEQ ID NO: 375410 - DNA, 768 bp, Homo sapiens
taaagagggtctaagaggcagtactataggtctagtacgagctgggtgcgagtaacggaggcaggttggagccgctgccgtcgccatgacccgcggtaaccagcgtgagctcgcccgccagaagaatatgaaaaagcagagcgactcggttaagggaaagcgccgagatgacgggctttctgctgccgcccgcaagcagagcttctagaactggagcagaaagaaggtgtggcccagggccagccccgcctcctccccgggcggaagctgtgtcagttgccggaagtcggcgtgaggtggggcttatgcggcggcgtggtgaaatagatatggcgaccgagggggatgtggagctggagttggagactgagaccagtggaccagagcggcctccggagaagccacggaaacatgacagcggtgcggcggacttggagcgggtcaccgactatgcagaggagaaggagatccagagttccaatctggagacggccatgtctgtgattggagacagaaggtcccgggagcagaaagccaaacaggagcgggagaaagaactggcaaaagtcactatcaagaaggaagatctggagctaataatgactgagatggagatatctcgagcagcagcagaacgcagtttgcgggaacacatgggcaacgtggtagaggcgcttattgccctaaccaactgatgcgtgctttctcaaatatacctactggattaatttatggcaataaaatttttttttgtctttttcagtttta

SEQ ID NO: 375411 - DNA, 1391 bp, Homo sapiens
taaagagggtctaagaggcagtactataggtctagtacgagctgggtgcgagtaacggaggcaggttggagccgctgccgtcgccatgacccgcggtaaccagcgtgagctcgcccgccagaagaatatgaaaaagcagagcgactcggttaagggaaagcgccgagatgacgggctttctgctgccgcccgcaagcagaggtagccccagggaggggagggaaagggacggtggagacctgggttagaccaagggttatagaaggaaagagagctacctcagggcttgaatgtggactagtcgtgaggagcagagtgcattgcttcctctagggttttatttcctccccaccctccaaattgttagctcacagccttacaggaaaggacgggggcgggcgcctgccctcagtctgatttctgagcgtccctgggtctgaccttaagggcaagggcagggagcttcacatttcaaatacagttgtggttacggcagcccagtacttttggccctccttgctgttcggttctcctcccttctcccaacctcctcactggtgttgctgggtgtggtcctcaatacagaatagagacccttgggcctgtgtcaccagacttctgaccccttggcaacagccagatggagactggtcgccttttgagcctcagctctcttcctcttgttctcctagggtgggagtacagcagccaaacgctgaacttagtcccatccacttccatcttatcctttgtgcccttcatccccctgcatcttgtcctttttgccctctggtacctcccagtgccccatcatctctacccccagggactcggagatcatgcagcagaagcagaaaaaggcaaacgagaagaaggaggaacccaagtagctttgtggcttcgtgtccaaccctcttgcccttcgcctgtgtgcctggagccagtcccaccacgctcgcgtttcctcctgtagtgctcacaggtcccagcaccgatggcattccctttgccctgagtctgcagcgggtcccttttgtgcttccttcccctcaggtagcctctctccccctgggccactcccgggggtgagggggttaccccttcccagtgttttttattcctgtggggctcaccccaaagtattaaaagtagctttgtaattccaaaaaaaaaaaaaaaaaaaaaaaaaaaaaaaaaaaaaaaaaaaaaaaaaaaaaaaaaaaaaaaaaaaaaaaaaaaaaaaaaaaaaaaaaaaaaaagcaaaaaaaaaaaacaaaaaggggggggccacgcagaaaagcgacacgggggggcggacacacgcaaagagcgagccccacagaccgtgagaaacacagagggggggccacaacagagagagggcgcaacgg

SEQ ID NO: 375412 - DNA, 744 bp, Homo sapiens
gtcggcgtcccccacttcttagaggaacaagtggcgttcagccacccgagattgagcaatcacaggtctgtgaggcccttagatgtccggggctgcacgcgcgctacactgactggctcagcgtgtgcctaccctaccccggcaggcgcgggtaacccattgaaccccattcgtgatggggatcggggattgccaattattccccatgaacgaggaattcccagtaagttccggtctttcgcccgcccaaaacccccgcagactcagggcaaagggaatgccacaggtcccagcaccgatggcattccctttgccctgagtaacggaggcaggttggagccgctgccgtcgccatgacccgcggtaaccagcgtgagctcgcccgccagaagaatatgaaaaagcagagcgactcggttaagggaaagcgccgagatgacgggctttctgctgccgcccgcaagcagagggactcggagatcatgcagcagaagcagaaaaaggcaaacgagaagaaggaggaacccaagtagctttgtggcttcgtgtccaaccctcttgcccttcgcctgtgtgcctggagccagtcccaccacgctcgcgtttcctcctgtagtgctgacagaggaggagcacagaggagggtgtccggggaagcagttagatgagttaagtgtgatgcacaggaaaatagtatcgtagcctatcaaagtccctctgcgctgccagctgtccacctcctct

SEQ ID NO: 375413 - DNA, 1676 bp, Homo sapiens
  misc_feature (1167)..(1167): n is a, c, g, or t
ggcccacagcagcacacctgggagtagagcagatgcaaggcagcgaggtggagacttgctgaggaaaggcatacgttaatgtatgtgtgaggttaacccaggaggttgaattccaaaatttccccttcccctttcttccttttactcaggttctgtttcaagctgattccagccatttgggattgccgcccactgacaacttagtagggctttcattataagcaggcttgagatatctgacctttctctcgacctaaacacctggggctggaaacatggcgggagagatttacagattatacctggggcaacgaaccagaacgacattagaggagaaaagaggcctgtcgtttttattggcttctgcacgtcttcctccccagcttcggccactctccccttcgcaccctctcacctgacagaagggacttttcctagtttatgaggtggttaaggatatcggtggggtgggctggagcggtgtcgggttaggtctgagagaaggcctcgcacaaaacactgtacaaacccgaaaggaagtctgagagacgaaccgccttcctccctgaagcttctagaactggagcagaaagaaggtgtggcccagggccagccccgcctcctccccgggcggaagctgtgtcagttgccggaagtcggcgtgaggtggggcttatgcggcggcgtggtgaaatagatatggcgaccgagggggatgtggagctggagttggagactgagaccagtggaccagagcggcctccggagaagccacggaaacatgacagcggtgcggcggacttggagcgggtcaccgactatgcagaggagaaggagatccagagttccaatctggagacggccatgtctgtgattggagacagaaggtcccgggagcagaaagccaaacaggagcgggagaaagaactggcaaaagtcactatcaagaaggaagatctggagctaataatgactgagatggagatatctcgagcagcagcagaacgcagtttgcgggaacacatgggcaacgtggtagaggcgcttattgccctaaccaactgatgcgtgctttctcaaatatacctactggattaatttatggcaataaaatttttttttgtctttttcagttttaaaaaaaaaaaaaaaaaaaaaaaaaaaaanaaaaaaaaaaaaaaaaaaaaaaaaaaaaaaaaaaaaaaaaaaaaaaggaggaaccaaaaaaccaaataaaacctaaaaaaaatcaaataacaattaaactgaaaaacatttaacaaaaaaaaaaaaacttaggggggggccccgaccccaattaccccctatgggagggcatttccaattcacgggccggcgtttaaacaattaggaatggaaaaacccctgtttttaccaatttaacagccttaagggcaaatccccttttgcagttggggtgataacgaaaaaggcccgcccaatcggcctttacaaagagtggccacccataagggcgatgggaaaattaaagctttaattttggataaaaatcccgaaaatttggtgaaaacccctaaattttaaaccaatggcccaaatcggggaaatcctttaaacaaaaaaatcccccctaagggtaagttgtttccaatggaaaacgatcccttttaagaacctgcctcacgtaaaaggga

SEQ ID NO: 375414 - DNA, 397 bp, Homo sapiens
gtccagacaacctgcgttcaagtcctgcctccacccagtcttagttctgtgacctgaatgacatcatttcatcctccctctgcctcagttcccttatccttaagaacaatgcctagctgggcgtagtggcttatgcctgtaatcccagcactttaggaggccgaagtgggcagatcacttgagatcaggagttcgagaccagactggccaacatgacgaaaccccatctctactaaaaatacaaaaattagccaggcgtggtggcaggtgcctgtaatcccagctactcgggaggctgaggcaggagaatcgcttgaacccaggaggcggaggttgccatgagccaagatcgctccattgcacttcagcctgggcaacagagtgagactccatctca

SEQ ID NO: 375415 - DNA, 1830 bp, Homo sapiens
agccagagagacgcagctaggcctgcacggctgtggagagatcctgccacgggccttgttcaccatgtcggtgctggatgcgctttgggaggatcgggatgtccgtttcgacctgtccgcgcagcaaatgaaaacaagacctggagaagtccttattgattgtttagattccattgaagacaccaaaggaaataatggagatagaggtagactcttggtaacaaatttaagaattctctggcactctttggcattatcaagagtcaatgtttctgtcggttacaattgcatattgaatattacaacaaggactgctaactctaaattacgaggccaaactgaagctctctatatactaacaaaatgtaacagtactcgttttgaatttatatttacaaatttggttcctggaagccctagactttttacttctgtgatggcagtacacagagcttatgaaacttctaaaatgtatcgtgattttaaattaagaagtgcactaattcagaacaagcaactaagactgttgccacaagaacatgtatatgataaaataaatggagtttggaatttatccagtgatcagggcaatttaggaaccttttttattaccaatgtgagaattgtgtggcatgcaaatatgaatgatagttttaatgtcagtataccatatctgcaaattcgttcaataaagattagagattcaaaatttggtttagctcttgtcatagaaagctctcagcagagtggtggatatgttcttggctttaaaatagatcctgtggaaaaactacaagaatcagttaaggaaatcaattcacttcacaaagtctattctgccagtcccatatttggagttgattatgagatggaagaaaagccccagccgctcgaagctctgacagtcgaacaaattcaagatgatgtagaaatagactctgatggtcacacggatgcttttgtggcttattttgctgatggcaataagcaacaagatcgtgaacctgtattttcagaagaactggggcttgcaatagagaaattgaaggatggattcaccctacagggactttgggaagtaatgagttgattgaccttgagttgagatggatttctattaaagatatctctagtttaaagatactagtcacctgccataagtcatggaatagtttttatatttacagcttttatatttaaaacttgtaagagtttttttaatgattgaggaaaaagtcatttagaaaacttcagttttcggccagcgcgtcgagggaggggccagcgacacatggcctagtaaccgtccggccgcggcgctggcttaagccatggctgagggtagctggattcctcaggcccgggcgctcctacagcagtgcctgcacgcccggctgcaaattcgcccagccgatggggacgtcgcggcccagtgggtggaggtccaaagaggactggtgatctacgtgtgctttttcaagggagctgataaagaacttcttcccaaaatggccgaagctggactgtactgctgccatctctggctcactgcaacctccctgcctgattctcctgcctcagcctgccgagtgcctgcgattacaggcgcgcgccgccacacctgactggttttcgtatttttttggtggaaaccctgtctctactaaaaatacaaaaaattagccgggcgtggtggcgggcacctgtagtcccagctactccggagaggctgaggcaggagaatggcgcgaacccgggaggcggagcttgcagtgagccgagtaaccgacgctgcactccagcctggccgacagagcgagactctgtctc

SEQ ID NO: 375416 - DNA, 436 bp, Homo sapiens
gttgttgatgtcattaggtcatgagggctctgccagcaggaatggaatttagcgtccttataaaagacccagagagatcccttgccctttgcagcatgtgaggacacagagaaaagagagacacctatgaaacaagaagtagtaggttgtcaacagatgctgcatgtgctggtgacttgatcttgggacatcctagcttcggggactgggagacatacatttctgttgtttataaggcatccaggggtatgggtatttttgttattaggcagcctggaatggaacaaaaacaggatataatttgctgagttttgacatgtcccttctacttcttcagactttcagcatctgctgtctcctcagttgaatttgtaatcaaagcataagaaatatcaggtataggccaggtgtggtggctcacgcctgtaatcccagc

SEQ ID NO: 375417 - DNA, 568 bp, Homo sapiens
gttctcagcgtcctgctcacaatcccttttactatgccactgacttacccagactggctaggacatctctatttgcattgcattgcaatatggactgaggtgagcttgcctatgaaatcagctgtgaacttattttttgttaactgtgattttaaagggcagggaggagaaaatgaatactgagggaaggaaaggagacctaacatttattgagtccttggagttcttgagatagatgcctcatacacgttaacttatgcatcctcacaatgatcttgggaggtgttatttactccattttacagaggaggaaatggaggttaaatcacttacacaggctgggcacggtgactcacgcctgtaatcccagcactctgggaagccaaggcaggaggattgcttgagcccaggggtttgagaccagcctgcctctacaaaaaaataataagtttttaaaaatcactgcccaaagttccaaagctagtcaacaaagaaaccggttacaaatttgctcttcatttagtgtaaaaatcaatgaaacttttctgaatgtttcagtctttaaaaa

SEQ ID NO: 375418 - DNA, 473 bp, Homo sapiens
atactgcagcctatgggccaacagaggcagctgggggaccaaatgccccattgtccttgccctcctaccccctgagcacctgggatacctccccccagcctgttgctgctgtccaggaaggtcaccagcctgggtcactgggcacagaacaggcgtaagtggacagataggagggagactatctgggtcacaagagggcttgggctgtttaaagtttcaaataatgaacaaatgtatcttgaactacatcaccaaatctgagccagaggagagacttgaggtagcagagaagaggaggccttttcaggatgtatctgaatagctctgaagctctgaagaaaaggttcagtaggccaggcaccagtggctcacagctgtagtgccagcactttgggaggccgaggcaggaggatcacttgaagccaggagtccaagaccagcctgaacaacatagtgagaccctatctctacaa

SEQ ID NO: 375419 - DNA, 1019 bp, Homo sapiens
atgctcggctgtggattccgtacttgaggtgttgaggcttcccacagcggggaagtttgcgcgtttcctccccaattgtgtctccgggcgctttctgcgttgccctcccatgatgtgtctgtgccccaaaaggtttgttgcacatatgtttgccgcccctcgtttgcgctatatgtgttgctctgggtttacagccggcatgttccttcatgagcgccatcagtcgcgcccccccgtgttgttgcttggcacggtccaccgtggggttctatgatcgctggaaatccttggggtgctgttggttccctagggttttctgagccctttctgtgagatttaaagggcttttccgtacgacaatattgggccgtacatctagttcgttgccttagagagatgtgaaaagttttgccgattctgtctagctccttcttggggccccggcggcgaggcacccgtaggtatcagtgcatgtcccggtatatccggtcgtctcccctgttgtgttacgacatatagcccagttgagggaacgctcacgatttgcactcccccatgcgatcctccgactgattttctctttctgttcgtcccgttttcccctggtctgtgacacggtatgcccctttctcacgtatgcacggcggactccggccactgggtccagagcacccctgcttcatggggaaaccctggtttgtcgttcccacaccaaactgagttcggaccacataacaccttccactttttcaccccacgagcgtcagcagccaacttttgtggccatacgcttttcatagagaagtatcgaagtttgcgttcatcgtccacttcaatgagtttctggcagcccgtggctgggaaggagatgttcagcttcatcttgaagcagctgtacgcctccgaggccttgtccccctccccctcaaccccaccatatgaattgtacagaatatttctattgaattcggaactgtcctttccttggctttatgcacattaaacagatgtgaatattc

SEQ ID NO: 375420 - DNA, 315 bp, Homo sapiens
ttggggaggcccatcccccacctgcaagcggttttcgtgtgtgggtccctgtgccccaccctcgttcccattggctttctctccttggcctttcatggaagccagttagtaaacttcctatttttttgagtcaaaaaacatgaggggtactgttggatgggacatttttgttggtcctacaatctagtaatgtttaagtaatggccttgtccccctccccctcaaccccaccatatgaattgtacagaatatttctattgaattcggaactgtcctttccttggctttatgcacattaaacagatgtgaatattc

SEQ ID NO: 375421 - DNA, 2968 bp, Homo sapiens
agtggcgcgcaggcttttgtaacgttcccagcgccgcgtttgaattcggggagggagcggagcggtgcggaggctctgctcggatcgaggtctgcagcgcagcttcgggagcatgagtgctgcagtgactgcagggaagctggcacgggcaccggccgaccctgggaaagccggggtccccggagttgcagctcccggagctccggcggcggctccaccggcgaaagagatcccggaggtcctagtggacccacgcagccggcggcgctatgtgcggggccgctttttgggcaagggcggctttgccaagtgcttcgagatctcggacgcggacaccaaggaggtgttcgcgggcaagattgtgcctaagtctctgctgctcaagccgcaccagagggagaagatgtccatggaaatatccattcaccgcagcctcgcccaccagcacgtcgtaggattccacggctttttcgaggacaacgacttcgtgttcgtggtgttggagctctgccgccggaggtctctcctggagctgcacaagaggaggaaagccctgactgagcctgaggcccgatactacctacggcaaattgtgcttggctgccagtacctgcaccgaaaccgagttattcatcgagacctcaagctgggcaaccttttcctgaatgaagatctggaggtgaaaataggggattttggactggcaaccaaagtcgaatatgacggggagaggaagaagaccctgtgtgggactcctaattacatagctcccgaggtgctgagcaagaaagggcacagtttcgaggtggatgtgtggtccattgggtgtatcatgtataccttgttagtgggcaaaccaccttttgagacttcttgcctaaaagagacctacctccggatcaagaagaatgaatacagtattcccaagcacatcaaccccgtggccgcctccctcatccagaagatgcttcagacagatcccactgcccgcccaaccattaacgagctgcttaatgacgagttctttacttctggctatatccctgcccgtctccccatcacctgcctgaccattccaccaaggttttcgattgctcccagcagcctggaccccagcaaccggaagcccctcacagtcctcaataaaggcttggagaaccccctgcctgagcgtccccgggaaaaagaagaaccagtggttcgagagacaggtgaggtggtcgactgccacctcagtgacatgctgcagcagctgcacagtgtcaatgcctccaagccctcggagcgtgggctggtcaggcaagaggaggctgaggatcctgcctgcatccccatcttctgggtcagcaagtgggtggactattcggacaagtacggccttgggtatcagctctgtgataacagcgtgggggtgctcttcaatgactcaacacgcctcatcctctacaatgatggtgacagcctgcagtacatagagcgtgacggcactgagtcctacctcaccgtgagttcccatcccaactccttgatgaagaagatcaccctccttaaatatttccgcaattacatgagcgagcacttgctgaaggcaggtgccaacatcacgccgcgcgaaggtgatgagctcgcccggctgccctacctacggacctggttccgcacccgcagcgccatcatcctgcacctcagcaacggcagcgtgcagatcaacttcttccaggatcacaccaagctcatcttgtgcccactgatggcagccgtgacctacatcgacgagaagcgggacttccgcacataccgcctgagtctcctggaggagtacggctgctgcaaggagctggccagccggctccgctacgcccgcactatggtggacaagctgctgagctcacgctcggccagcaaccgtctcaaggcctcctaatagctgccctcccctccggactggtgccctcctcactcccacctgcatctggggcccatactggttggctcccgcggtgccatgtctgcagtgtgccccccagccccggtggctgggcagagctgcatcatccttgcaggtgggggttgctgtataagttatttttgtacatgttcgggtgtgggttctacagccttgtccccctccccctcaaccccaccatatgaattgtacagaatatttctattgaattcggaactgtcctttccttggctttatgcacattaaacagatgtgaatattctttttcttgtatttcctgaggggtgccagggcctgggatccagcgaacatctctgcttcatcagccccaggctgcccagcctctgccagtcttgtgggggaaagggggtgacagtgtctctctgtggaccaggctggagtgcagtggcatgatcctggctcactgcagcctcgaactcctgggctcaagtgattctcccacctcagcctcccaagcagctgggactacaggcgtgcgccaccatgcctggctaattttacaaattttttgtagaaatggggtgttgccatgttggccaggctggtctcgaactcctgagctcaagtgatcctctcactcagcctcccaaaatgctgggattacaggtgtgagccactgcacccagcctgattctgaggccagccacaggctcagctcttcagtgagccagcacggagaccatctgtgtggcatccagcccacctcacctccctgtggccccaggcatggcctcctggcctctgagtctggcgggtagtagggcaggaagaggctctcagaggcgcagctcctcatggctcggtgcgtgtggaggagcagccgtggggagcggtttgtgagtactggacgaagccatcagggacttggccgagtgcctgtcgcacctcaactgggagctccctgtagtggtgcttcttgttcctcacagcacggagcaggtctcgcactgatgtccccttataggaccggaactttctcag

SEQ ID NO: 375422 - DNA, 2642 bp, Homo sapiens
agtggcgcgcaggcttttgtaacgttcccagcgccgcgtttgaattcggggagggagcggagcggtgcggaggctctgctcggatcgaggtctgcagcgcagcttcgggagcatgagtgctgcagtgactgcagggaagctggcacgggcaccggccgaccctgggaaagccggggtccccggagttgcagctcccggagctccggcggcggctccaccggcgaaagagatcccggaggtcctagtggacccacgcagccggcggcgctatgtgcggggccgctttttgggcaagggcggctttgccaagtgcttcgagatctcggacgcggacaccaaggaggtgttcgcgggcaagattgtgcctaagtctctgctgctcaagccgcaccagagggagaagatgtccatggaaatatccattcaccgcagcctcgcccaccagcacgtcgtaggattccacggctttttcgaggacaacgacttcgtgttcgtggtgttggagctctgccgccggaggtctctcctggagctgcacaagaggaggaaagccctgactgagcctgaggcccgatactacctacggcaaattgtgcttggctgccagtacctgcaccgaaaccgagttattcatcgagacctcaagctgggcaaccttttcctgaatgaagatctggaggtgaaaataggggattttggactggcaaccaaagtcgaatatgacggggagaggaagaagaccctgtgtgggactcctaattacatagctcccgaggtgctgagcaagaaagggcacagtttcgaggtggatgtgtggtccattgggtgtatcatgtataccttgttagtgggcaaaccaccttttgagacttcttgcctaaaagagacctacctccggatcaagaagaatgaatacagtattcccaagcacatcaaccccgtggccgcctccctcatccagaagatgcttcagacagatcccactgcccgcccaaccattaacgagctgcttaatgacgagttctttacttctggctatatccctgcccgtctccccatcacctgcctgaccattccaccaaggttttcgattgctcccagcagcctggaccccagcaaccggaagcccctcacagtcctcaataaaggcttggagaaccccctgcctgagcgtccccgggaaaaagaagaaccagtggttcgagagacaggtgaggtggtcgactgccacctcagtgacatgctgcagcagctgcacagtgtcaatgcctccaagccctcggagcgtgggctggtcaggcaagaggaggctgaggatcctgcctgcatccccatcttctgggtcagcaagtgggtggactattcggacaagtacggccttgggtatcagctctgtgataacagcgtgggggtgctcttcaatgactcaacacgcctcatcctctacaatgatggtgacagcctgcagtacatagagcgtgacggcactgagtcctacctcaccgtgagttcccatcccaactccttgatgaagaagatcaccctccttaaatatttccgcaattacatgagcgagcacttgctgaaggcaggtgccaacatcacgccgcgcgaaggtgatgagctcgcccggctgccctacctacggacctggttccgcacccgcagcgccatcatcctgcacctcagcaacggcagcgtgcagatcaacttcttccaggatcacaccaagctcatcttgtgcccactgatggcagccgtgacctacatcgacgagaagcgggacttccgcacataccgcctgagtctcctggaggagtacggctgctgcaaggagctggccagccggctccgctacgcccgcactatggtggacaagctgctgagctcacgctcggccagcaaccgtctcaaggcctcctaatagctgccctcccctccggactggtgccctcctcactcccacctgcatctggggcccatactggttggctcccgcggtgccatgtctgcagtgtgccccccagccccggtggctgggcagagctgcatcatccttgcaggtgggggttgctgtataagttatttttgtacatgttcgggtgtgggttctacagccttgtccccctccccctcaaccccaccatatgaattgtacagaatatttctattgaattcggaactgtcctttccttggctttatgcacattaaacagatgtgaatattctttttcttgtatttcctgaggggtgccagggcctgggatccagcgaacatctctgcttcatcagccccaggctgcccagcctctgccagtcttgtgggggaaagggggtgacagtgtctctctgtggaccaggctggagtgcagtggcatgatcctggctcactgcagcctcgaactcctgggctcaagtgattctcccacctcagcctcccaagcagctgggactacaggcgcgggcgggtcacttgaggtcaggagttcgagaccagcctggccaacatggtgaaacccccatctctactaaaaaaaatataaaaattagccgggcatggtgatacacacctgtaatcccagctactgggaaggctgaggcccggaattgcttgaacctgggaagcggaggttgcagtgagc

SEQ ID NO: 375423 - DNA, 2324 bp, Homo sapiens
agtggcgcgcaggcttttgtaacgttcccagcgccgcgtttgaattcggggagggagcggagcggtgcggaggctctgctcggatcgaggtctgcagcgcagcttcgggagcatgagtgctgcagtgactgcagggaagctggcacgggcaccggccgaccctgggaaagccggggtccccggagttgcagctcccggagctccggcggcggctccaccggcgaaagagatcccggaggtcctagtggacccacgcagccggcggcgctatgtgcggggccgctttttgggcaagggcggctttgccaagtgcttcgagatctcggacgcggacaccaaggaggtgttcgcgggcaagattgtgcctaagtctctgctgctcaagccgcaccagagggagaagatgtccatggaaatatccattcaccgcagcctcgcccaccagcacgtcgtaggattccacggctttttcgaggacaacgacttcgtgttcgtggtgttggagctctgccgccggaggtctctcctggagctgcacaagaggaggaaagccctgactgagcctgaggcccgatactacctacggcaaattgtgcttggctgccagtacctgcaccgaaaccgagttattcatcgagacctcaagctgggcaaccttttcctgaatgaagatctggaggtgaaaataggggattttggactggcaaccaaagtcgaatatgacggggagaggaagaagaccctgtgtgggactcctaattacatagctcccgaggtgctgagcaagaaagggcacagtttcgaggtggatgtgtggtccattgggtgtatcatgtataccttgttagtgggcaaaccaccttttgagacttcttgcctaaaagagacctacctccggatcaagaagaatgaatacagtattcccaagcacatcaaccccgtggccgcctccctcatccagaagatgcttcagacagatcccactgcccgcccaaccattaacgagctgcttaatgacgagttctttacttctggctatatccctgcccgtctccccatcacctgcctgaccattccaccaaggttttcgattgctcccagcagcctggaccccagcaaccggaagcccctcacagtcctcaataaaggcttggagaaccccctgcctgagcgtccccgggaaaaagaagaaccagtggttcgagagacaggtgaggtggtcgactgccacctcagtgacatgctgcagcagctgcacagtgtcaatgcctccaagccctcggagcgtgggctggtcaggcaagaggaggctgaggatcctgcctgcatccccatcttctgggtcagcaagtgggtggactattcggacaagtacggccttgggtatcagctctgtgataacagcgtgggggtgctcttcaatgactcaacacgcctcatcctctacaatgatggtgacagcctgcagtacatagagcgtgacggcactgagtcctacctcaccgtgagttcccatcccaactccttgatgaagaagatcaccctccttaaatatttccgcaattacatgagcgagcacttgctgaaggcaggtgccaacatcacgccgcgcgaaggtgatgagctcgcccggctgccctacctacggacctggttccgcacccgcagcgccatcatcctgcacctcagcaacggcagcgtgcagatcaacttcttccaggtgagctggaggtcaccaggcgcaggagagagctggggtaggctccgcatgcctggcagtggcccatgtgggttgaatgtggagtgagcggctcaggatcacaccaagctcatcttgtgcccactgatggcagccgtgacctacatcgacgagaagcgggacttccgcacataccgcctgagtctcctggaggagtacggctgctgcaaggagctggccagccggctccgctacgcccgcactatggtggacaagctgctgagctcacgctcggccagcaaccgtctcaaggcctcctaatagctgccctcccctccggactggtgccctcctcactcccacctgcatctggggcccatactggttggctcccgcggtgccatgtctgcagtgtgccccccagccccggtggctgggcagagctgcatcatccttgcaggtgggggttgctgtataagttatttttgtacatgttcgggtgtgggttctacagccttgtccccctccccctcaaccccaccatatgaattgtacagaatatttctattgaattcggaactgtcctttccttggctttatgcacattaaacagatgtgaatattc

SEQ ID NO: 375424 - DNA, 1785 bp, Homo sapiens
agtggcgcgcaggcttttgtaacgttcccagcgccgcgtttgaattcggggagggagcggagcggtgcggaggctctgctcggatcgaggtctgcagcgcagcttcgggagcatgagtgctgcagtgactgcagggaagctggcacgggcaccggccgaccctgggaaagccggggtccccggagttgcagctcccggagctccggcggcggctccaccggcgaaagagatcccggaggtcctagtggacccacgcagccggcggcgctatgtgcggggccgctttttgggcaagggcggctttgccaagtgcttcgagatctcggacgcggacaccaaggaggtgttcgcgggcaagattgtgcctaagtctctgctgctcaagccgcaccagagggagaagatgtccatggaaatatccattcaccgcagcctcgcccaccagcacgtcgtaggattccacggctttttcgaggacaacgacttcgtgttcgtggtgttggagctctgccgccggaggtctctcctggagctgcacaagaggaggaaagccctgactgagcctgaggcccgatactacctacggcaaattgtgcttggctgccagtacctgcaccgaaaccgagttattcatcgagacctcaagctgggcaaccttttcctgaatgaagatctggaggtgaaaataggggattttggactggcaaccaaagtcgaatatgacggggagaggaagaagaccctgtgtgggactcctaattacatagctcccgaggtgctgagcaagaaagggcacagtttcgaggtggatgtgtggtccattgggtgtatcatgtataccttgttagtgggcaaaccaccttttgagacttcttgcctaaaagagacctacctccggatcaagaagaatgaatacagtattcccaagcacatcaaccccgtggccgcctccctcatccagaagatgcttcagacagatcccactgcccgcccaaccattaacgagctgcttaatgacgagttctttacttctggctatatccctgcccgtctccccatcacctgcctgaccattccaccaaggttttcgattgctcccagcagcctggaccccagcaaccggaagcccctcacagtcctcaataaaggcttggagaaccccctgcctgagcgtccccgggaaaaagaagaaccagtggttcgagagacaggtgaggtggtcgactgccacctcagtgacatgctgcagcagctgcacagtgtcaatgcctccaagccctcggagcgtgggctggtcaggcaagaggaggctgaggatcctgcctgcatccccatcttctgggtcagcaagtgggtggactattcggacaagtacggccttgggtatcagctctgtgataacagcgtgggggtgctcttcaatgactcaacacgcctcatcctctacaatgatggtgacagcctgcagtacatagagcgtgacggcactgagtcctacctcaccgtgagttcccatcccaactccttgatgaagaagatcaccctccttaaatatttccgcaattacatgagcgagcacttgctgaaggcaggtgccaacatcacgccgcgcgaaggtgatgagctcgcccggctgccctacctacggacctggttccgcacccgcagcgccagccttgtccccctccccctcaaccccaccatatgaattgtacagaatatttctattgaattcggaactgtcctttccttggctttatgcacattaaacagatgtgaatattc

SEQ ID NO: 375425 - DNA, 1568 bp, Homo sapiens
agtggcgcgcaggcttttgtaacgttcccagcgccgcgtttgaattcggggagggagcggagcggtgcggaggctctgctcggatcgaggtctgcagcgcagcttcgggagcatgagtgctgcagtgactgcagggaagctggcacgggcaccggccgaccctgggaaagccggggtccccggagttgcagctcccggagctccggcggcggctccaccggcgaaagagatcccggaggtcctagtggacccacgcagccggcggcgctatgtgcggggccgctttttgggcaagggcggctttgccaagtgcttcgagatctcggacgcggacaccaaggaggtgttcgcgggcaagattgtgcctaagtctctgctgctcaagccgcaccagagggagaagatgtccatggaaatatccattcaccgcagcctcgcccaccagcacgtcgtaggattccacggctttttcgaggacaacgacttcgtgttcgtggtgttggagctctgccgccggaggtctctcctggagctgcacaagaggaggaaagccctgactgagcctgaggcccgatactacctacggcaaattgtgcttggctgccagtacctgcaccgaaaccgagttattcatcgagacctcaagctgggcaaccttttcctgaatgaagatctggaggtgaaaataggggattttggactggcaaccaaagtcgaatatgacggggagaggaagaagaccctgtgtgggactcctaattacatagctcccgaggtgctgagcaagaaagggcacagtttcgaggtggatgtgtggtccattgggtgtatcatgtataccttgttagtgggcaaaccaccttttgagacttcttgcctaaaagagacctacctccggatcaagaagaatgaatacagtattcccaagcacatcaaccccgtggccgcctccctcatccagaagatgcttcagacagatcccactgcccgcccaaccattaacgagctgcttaatgacgagttctttacttctggctatatccctgcccgtctccccatcacctgcctgaccattccaccaaggttttcgattgctcccagcagcctggaccccagcaaccggaagcccctcacagtcctcaataaaggcttggagaaccccctgcctgagcgtccccgggaaaaagaagaaccagtggttcgagagacaggtgaggtggtcgactgccacctcagtgacatgctgcagcagctgcacagtgtcaatgcctccaagccctcggagcgtgggctggtcaggcaagaggaggctgaggatcctgcctgcatccccatcttctgggtcagcaagtgggtggactattcggacaagtacggccttggtaggtttcttccagaacaggtgggtgactcaggcacagccaggtgaccttttcagttgttacagactctggcctttttgagctcccaggtactgttctcagtgccctcctctctccatcccaggcctcccagttccagctcccagtgctccctgactccccagctttttttttttccagagacag

SEQ ID NO: 375426 - DNA, 979 bp, Homo sapiens
agtggcgcgcaggcttttgtaacgttcccagcgccgcgtttgaattcggggagggagcggagcggtgcggaggctctgctcggatcgaggtctgcagcgcagcttcgggagcatgagtgctgcagtgactgcagggaagctggcacgggcaccggccgaccctgggaaagccggggtccccggagttgcagctcccggagctccggcggcggctccaccggcgaaagagatcccggaggtcctagtggacccacgcagccggcggcgctatgtgcggggccgctttttgggcaagggcggctttgccaagtgcttcgagatctcggacgcggacaccaaggaggtgttcgcgggcaagattgtgcctaagtctctgctgctcaagccgcaccagagggagaagatgtccatggaaatatccattcaccgcagcctcgcccaccagcacgtcgtaggattccacggctttttcgaggacaacgacttcgtgttcgtggtgttggagctctgccgccggaggtctctcctggagctgcacaagaggaggaaagccctgactgagcctgaggcccgatactacctacggcaaattgtgcttggctgccagtacctgcaccgaaaccgagttattcatcgagacctcaagctgggcaaccttttcctgaatgaagatctggaggtgaaaataggggattttggactggcaaccaaagtcgaatatgacggggagaggaagaagaccctgtgtgggactcctaattacatagctcccgaggtgctgagcaagaaagggcacagtttcgaggtggatgtgtggtccattgggtgtatcatgtataccttgttagtgggcaaaccaccttttgagacttcttgcctaaaagagacctacctccggatcaagaagaatgaatacagtattcccaagaacatcaaccgcgaacacgaataggggatcttcatagactcgcccggcagg

SEQ ID NO: 375427 - DNA, 1946 bp, Homo sapiens
  misc_feature (78)..(78): n is a, c, g, or t
aatcagacctaccctcatctcatccacacaaccagaaccgaaagagacaaaacaaataattaggctaggtaggaggcnggggttaataggccgagcggagcggtgcggaggctctgctcggatcgaggtctgcagcgcagcttcgggagcatgagtgctgcagtgactgcagggaagctggcacgggcaccggccgaccctgggaaagccggggtccccggagttgcagctcccggagtctctcctggagctgcacaagaggaggaaagccctgactgagcctgaggcccgatactacctacggcaaattgtgcttggctgccagtacctgcaccgaaaccgagttattcatcgagacctcaagctgggcaaccttttcctgaatgaagatctggaggtgaaaataggggattttggactggcaaccaaagtcgaatatgacggggagaggaagaagaccctgtgtgggactcctaattacatagctcccgaggtgctgagcaagaaagggcacagtttcgaggtggatgtgtggtccattgggtgtatcatgtataccttgttagtgggcaaaccaccttttgagacttcttgcctaaaagagacctacctccggatcaagaagaatgaatacagtattcccaagcacatcaaccccgtggccgcctccctcatccagaagatgcttcagacagatcccactgcccgcccaaccattaacgagctgcttaatgacgagttctttacttctggctatatccctgcccgtctccccatcacctgcctgaccattccaccaaggttttcgattgctcccagcagcctggaccccagcaaccggaagcccctcacagtcctcaataaaggcttggagaaccccctgcctgagcgtccccgggaaaaagaagaaccagtggttcgagagacaggtgaggtggtcgactgccacctcagtgacatgctgcagcagctgcacagtgtcaatgcctccaagccctcggagcgtgggctggtcaggcaagaggaggctgaggatcctgcctgcatccccatcttctgggtcagcaagtgggtggactattcggacaagtacggccttgggtatcagctctgtgataacagcgtgggggtgctcttcaatgactcaacacgcctcatcctctacaatgatggtgacagcctgcagtacatagagcgtgacggcactgagtcctacctcaccgtgagttcccatcccaactccttgatgaagaagatcaccctccttaaatatttccgcaattacatgagcgagcacttgctgaaggcaggtgccaacatcacgccgcgcgaaggtgatgagctcgcccggctgccctacctacggacctggttccgcacccgcagcgccatcatcctgcacctcagcaacggcagcgtgcagatcaacttcttccaggatcacaccaagctcatcttgtgcccactgatggcagccgtgacctacatcgacgagaagcgggacttccgcacataccgcctgagtctcctggaggagtacggctgctgcaaggagctggccagccggctccgctacgcccgcactatggtggacaagctgctgagctcacgctcggccagcaaccgtctcaaggcctcctaatagctgccctcccctccggactggtgccctcctcactcccacctgcatctggggcccatactggttggctcccgcggtgccatgtctgcagtgtgccccccagccccggtggctgggcagagctgcatcatccttgcaggtgggggttgctgtataagttatttttgtacatgttcgggtgtgggttctacagccttgtccccctccccctcaaccccaccatatgaattgtacagaatatttctattgaattcggaactgtcctttccttggctttatgcacattaaacagatgtgaatattc

SEQ ID NO: 375428 - DNA, 1895 bp, Homo sapiens
atgccgctgtgctggagaaggaatggggtgggggcatagggaaggagagaaacccaccaagacccctctttcatcccttgggagtccagagtccagtcctgtgcttcctttgcctggtaaccctctcccttccccaccggcctcaatccacctccccatccctcctgccctctccttcccacccacatctctcctggagctgcacaagaggaggaaagccctgactgagcctgaggcccgatactacctacggcaaattgtgcttggctgccagtacctgcaccgaaaccgagttattcatcgagacctcaagctgggcaaccttttcctgaatgaagatctggaggtgaaaataggggattttggactggcaaccaaagtcgaatatgacggggagaggaagaagaccctgtgtgggactcctaattacatagctcccgaggtgctgagcaagaaagggcacagtttcgaggtggatgtgtggtccattgggtgtatcatgtataccttgttagtgggcaaaccaccttttgagacttcttgcctaaaagagacctacctccggatcaagaagaatgaatacagtattcccaagcacatcaaccccgtggccgcctccctcatccagaagatgcttcagacagatcccactgcccgcccaaccattaacgagctgcttaatgacgagttctttacttctggctatatccctgcccgtctccccatcacctgcctgaccattccaccaaggttttcgattgctcccagcagcctggaccccagcaaccggaagcccctcacagtcctcaataaaggcttggagaaccccctgcctgagcgtccccgggaaaaagaagaaccagtggttcgagagacaggtgaggtggtcgactgccacctcagtgacatgctgcagcagctgcacagtgtcaatgcctccaagccctcggagcgtgggctggtcaggcaagaggaggctgaggatcctgcctgcatccccatcttctgggtcagcaagtgggtggactattcggacaagtacggccttgggtatcagctctgtgataacagcgtgggggtgctcttcaatgactcaacacgcctcatcctctacaatgatggtgacagcctgcagtacatagagcgtgacggcactgagtcctacctcaccgtgagttcccatcccaactccttgatgaagaagatcaccctccttaaatatttccgcaattacatgagcgagcacttgctgaaggcaggtgccaacatcacgccgcgcgaaggtgatgagctcgcccggctgccctacctacggacctggttccgcacccgcagcgccatcatcctgcacctcagcaacggcagcgtgcagatcaacttcttccaggatcacaccaagctcatcttgtgcccactgatggcagccgtgacctacatcgacgagaagcgggacttccgcacataccgcctgagtctcctggaggagtacggctgctgcaaggagctggccagccggctccgctacgcccgcactatggtggacaagctgctgagctcacgctcggccagcaaccgtctcaaggcctcctaatagctgccctcccctccggactggtgccctcctcactcccacctgcatctggggcccatactggttggctcccgcggtgccatgtctgcagtgtgccccccagccccggtggctgggcagagctgcatcatccttgcaggtgggggttgctgtataagttatttttgtacatgttcgggtgtgggttctacagccttgtccccctccccctcaaccccaccatatgaattgtacagaatatttctattgaattcggaactgtcctttccttggctttatgcacattaaacagatgtgaatattc

SEQ ID NO: 375429 - DNA, 1791 bp, Homo sapiens
tcagcttctggacgcgaggtgctggggggaggggtgctggtaatggacgctagggccctggagtacccagggaggagtcccagtctctcctggagctgcacaagaggaggaaagccctgactgagcctgaggcccgatactacctacggcaaattgtgcttggctgccagtacctgcaccgaaaccgagttattcatcgagacctcaagctgggcaaccttttcctgaatgaagatctggaggtgaaaataggggattttggactggcaaccaaagtcgaatatgacggggagaggaagaagaccctgtgtgggactcctaattacatagctcccgaggtgctgagcaagaaagggcacagtttcgaggtggatgtgtggtccattgggtgtatcatgtataccttgttagtgggcaaaccaccttttgagacttcttgcctaaaagagacctacctccggatcaagaagaatgaatacagtattcccaagcacatcaaccccgtggccgcctccctcatccagaagatgcttcagacagatcccactgcccgcccaaccattaacgagctgcttaatgacgagttctttacttctggctatatccctgcccgtctccccatcacctgcctgaccattccaccaaggttttcgattgctcccagcagcctggaccccagcaaccggaagcccctcacagtcctcaataaaggcttggagaaccccctgcctgagcgtccccgggaaaaagaagaaccagtggttcgagagacaggtgaggtggtcgactgccacctcagtgacatgctgcagcagctgcacagtgtcaatgcctccaagccctcggagcgtgggctggtcaggcaagaggaggctgaggatcctgcctgcatccccatcttctgggtcagcaagtgggtggactattcggacaagtacggccttgggtatcagctctgtgataacagcgtgggggtgctcttcaatgactcaacacgcctcatcctctacaatgatggtgacagcctgcagtacatagagcgtgacggcactgagtcctacctcaccgtgagttcccatcccaactccttgatgaagaagatcaccctccttaaatatttccgcaattacatgagcgagcacttgctgaaggcaggtgccaacatcacgccgcgcgaaggtgatgagctcgcccggctgccctacctacggacctggttccgcacccgcagcgccatcatcctgcacctcagcaacggcagcgtgcagatcaacttcttccaggatcacaccaagctcatcttgtgcccactgatggcagccgtgacctacatcgacgagaagcgggacttccgcacataccgcctgagtctcctggaggagtacggctgctgcaaggagctggccagccggctccgctacgcccgcactatggtggacaagctgctgagctcacgctcggccagcaaccgtctcaaggcctcctaatagctgccctcccctccggactggtgccctcctcactcccacctgcatctggggcccatactggttggctcccgcggtgccatgtctgcagtgtgccccccagccccggtggctgggcagagctgcatcatccttgcaggtgggggttgctgtataagttatttttgtacatgttcgggtgtgggttctacagccttgtccccctccccctcaaccccaccatatgaattgtacagaatatttctattgaattcggaactgtcctttccttggctttatgcacattaaacagatgtgaatattc

SEQ ID NO: 375430 - DNA, 1801 bp, Homo sapiens
aaacaacacacaaaataggtcagtaacaggcacagtgtttaatcggacgaggacacttcgtgtcgtggtgttggagctctgacgccggagagatctctcctggagctgcacaagaggaggaaagccctgactgagcctgaggcccgatactacctacggcaaattgtgcttggctgccagtacctgcaccgaaaccgagttattcatcgagacctcaagctgggcaaccttttcctgaatgaagatctggaggtgaaaataggggattttggactggcaaccaaagtcgaatatgacggggagaggaagaagaccctgtgtgggactcctaattacatagctcccgaggtgctgagcaagaaagggcacagtttcgaggtggatgtgtggtccattgggtgtatcatgtataccttgttagtgggcaaaccaccttttgagacttcttgcctaaaagagacctacctccggatcaagaagaatgaatacagtattcccaagcacatcaaccccgtggccgcctccctcatccagaagatgcttcagacagatcccactgcccgcccaaccattaacgagctgcttaatgacgagttctttacttctggctatatccctgcccgtctccccatcacctgcctgaccattccaccaaggttttcgattgctcccagcagcctggaccccagcaaccggaagcccctcacagtcctcaataaaggcttggagaaccccctgcctgagcgtccccgggaaaaagaagaaccagtggttcgagagacaggtgaggtggtcgactgccacctcagtgacatgctgcagcagctgcacagtgtcaatgcctccaagccctcggagcgtgggctggtcaggcaagaggaggctgaggatcctgcctgcatccccatcttctgggtcagcaagtgggtggactattcggacaagtacggccttgggtatcagctctgtgataacagcgtgggggtgctcttcaatgactcaacacgcctcatcctctacaatgatggtgacagcctgcagtacatagagcgtgacggcactgagtcctacctcaccgtgagttcccatcccaactccttgatgaagaagatcaccctccttaaatatttccgcaattacatgagcgagcacttgctgaaggcaggtgccaacatcacgccgcgcgaaggtgatgagctcgcccggctgccctacctacggacctggttccgcacccgcagcgccatcatcctgcacctcagcaacggcagcgtgcagatcaacttcttccaggatcacaccaagctcatcttgtgcccactgatggcagccgtgacctacatcgacgagaagcgggacttccgcacataccgcctgagtctcctggaggagtacggctgctgcaaggagctggccagccggctccgctacgcccgcactatggtggacaagctgctgagctcacgctcggccagcaaccgtctcaaggcctcctaatagctgccctcccctccggactggtgccctcctcactcccacctgcatctggggcccatactggttggctcccgcggtgccatgtctgcagtgtgccccccagccccggtggctgggcagagctgcatcatccttgcaggtgggggttgctgtataagttatttttgtacatgttcgggtgtgggttctacagccttgtccccctccccctcaaccccaccatatgaattgtacagaatatttctattgaattcggaactgtcctttccttggctttatgcacattaaacagatgtgaatattc

SEQ ID NO: 375431 - DNA, 1636 bp, Homo sapiens
gaaaaagggatgataatagatccccaccccttagatgagttggtgagggctaagtgagctaaacacaggagtgcttagaatgctttcctggcacatagtgagtgctaggaaagtgagttggtgttcggccacagtccattgacccttctgtcaatggtgctcagtaaagctgacagtggagaacttggcattgaaccaagttgtgaaccactgacctgtggtgtatttgagactgggggctgcatgtgggctggggacctgcagctcctttgaggccgtactgtactccaggtccccttcacattctgcttatggctgtccctctctctgccccagcacatcaaccccgtggccgcctccctcatccagaagatgcttcagacagatcccactgcccgcccaaccattaacgagctgcttaatgacgagttctttacttctggctatatccctgcccgtctccccatcacctgcctgaccattccaccaaggttttcgattgctcccagcagcctggaccccagcaaccggaagcccctcacagtcctcaataaaggcttggagaaccccctgcctgagcgtccccgggaaaaagaagaaccagtggttcgagagacaggtgaggtggtcgactgccacctcagtgacatgctgcagcagctgcacagtgtcaatgcctccaagccctcggagcgtgggctggtcaggcaagaggaggctgaggatcctgcctgcatccccatcttctgggtcagcaagtgggtggactattcggacaagtacggccttgggtatcagctctgtgataacagcgtgggggtgctcttcaatgactcaacacgcctcatcctctacaatgatggtgacagcctgcagtacatagagcgtgacggcactgagtcctacctcaccgtgagttcccatcccaactccttgatgaagaagatcaccctccttaaatatttccgcaattacatgagcgagcacttgctgaaggcaggtgccaacatcacgccgcgcgaaggtgatgagctcgcccggctgccctacctacggacctggttccgcacccgcagcgccatcatcctgcacctcagcaacggcagcgtgcagatcaacttcttccaggatcacaccaagctcatcttgtgcccactgatggcagccgtgacctacatcgacgagaagcgggacttccgcacataccgcctgagtctcctggaggagtacggctgctgcaaggagctggccagccggctccgctacgcccgcactatggtggacaagctgctgagctcacgctcggccagcaaccgtctcaaggcctcctaatagctgccctcccctccggactggtgccctcctcactcccacctgcatctggggcccatactggttggctcccgcggtgccatgtctgcagtgtgccccccagccccggtggctgggcagagctgcatcatccttgcaggtgggggttgctgtataagttatttttgtacatgttcgggtgtgggttctacagccttgtccccctccccctcaaccccaccatatgaattgtacagaatatttctattgaattcggaactgtcctttccttggctttatgcacattaaacagatgtgaatattc

SEQ ID NO: 375432 - DNA, 1719 bp, Homo sapiens
tggggtggaaaaaaatttcttgtgtttttatttaaatgcctactgaatccattctgtggatgaactgaactactcagcccttccatctgcctggatgctgaagatgctttccattctttgctcaaagctgggcagctctgagctgctggtgccttcaagctgtttgcctgagtggcaggtcatcctgcagggccacaccgttgggtcagaggccacggacttctcacccaacatagtccaacatgtccttctttgtttattggatttaaattaaggggtttgttgcatgcactgaacgtaacattttgatgtgtttgcaactggcttctgtcttcacagtttcttaattactccaaactggaaaactagatgcctctgactcttaccatgatagaagtcactgatattttgcccatacttaaattgattagtctttgcccctacaaccacagtgtaagctccgtggaggctggggttttgtctgttgctcactgaacctgcaacagtgcctggcacggtaggccttcagtaaatgggtcagtggaatgaaggagtgagtggaacttggtgcgctgtgctgagactttctctgcagagatatctgtgctgctgcttgtctgagcctgctggcagcagaggccctgctttgctcttctctggggccctaggcctctcaactgagcccaggtggggtgcccagcaggcttccctgttccctggtgtgggccacatgtgtggagcagaggggaagaggctggtcctgaccaactaactgtctgtctgtttctgtctcagaggaggctgaggatcctgcctgcatccccatcttctgggtcagcaagtgggtggactattcggacaagtacggccttgggtatcagctctgtgataacagcgtgggggtgctcttcaatgactcaacacgcctcatcctctacaatgatggtgacagcctgcagtacatagagcgtgacggcactgagtcctacctcaccgtgagttcccatcccaactccttgatgaagaagatcaccctccttaaatatttccgcaattacatgagcgagcacttgctgaaggcaggtgccaacatcacgccgcgcgaaggtgatgagctcgcccggctgccctacctacggacctggttccgcacccgcagcgccatcatcctgcacctcagcaacggcagcgtgcagatcaacttcttccaggatcacaccaagctcatcttgtgcccactgatggcagccgtgacctacatcgacgagaagcgggacttccgcacataccgcctgagtctcctggaggagtacggctgctgcaaggagctggccagccggctccgctacgcccgcactatggtggacaagctgctgagctcacgctcggccagcaaccgtctcaaggcctcctaatagctgccctcccctccggactggtgccctcctcactcccacctgcatctggggcccatactggttggctcccgcggtgccatgtctgcagtgtgccccccagccccggtggctgggcagagctgcatcatccttgcaggtgggggttgctgtataagttatttttgtacatgttcgggtgtgggttctacagccttgtccccctccccctcaaccccaccatatgaattgtacagaatatttctattgaattcggaactgtcctttccttggctttatgcacattaaacagatgtgaatattc

SEQ ID NO: 375433 - DNA, 566 bp, Homo sapiens
tggcgtgcgccccccgactcgcctcgccccgagacccggaaagtatattctagctaccgatcacaccaagctcatcttgtgcccactgatggcagccgtgacctacatcgacgagaagcgggacttccgcacataccgcctgagtctcctggaggagtacggctgctgcaaggagctggccagccggctccgctacgcccgcactatggtggacaagctgctgagctcacgctcggccagcaaccgtctcaaggcctcctaatagctgccctcccctccggactggtgccctcctcactcccacctgcatctggggcccatactggttggctcccgcggtgccatgtctgcagtgtgccccccagccccggtggctgggcagagctgcatcatccttgcaggtgggggttgctgtataagttatttttgtacatgttcgggtgtgggttctacagccttgtccccctccccctcaaccccaccatatgaattgtacagaatatttctattgaattcggaactgtcctttccttggctttatgcacattaaacagatgtgaatattc

SEQ ID NO: 375434 - DNA, 549 bp, Homo sapiens
  misc_feature (33)..(33): n is a, c, g, or t
gggcactgcaaccccccacagaggagagcctcnggtaaactgatcacaccaagctcatcttgtgcccactgatggcagccgtgacctacatcgacgagaagcgggacttccgcacataccgcctgagtctcctggaggagtacggctgctgcaaggagctggccagccggctccgctacgcccgcactatggtggacaagctgctgagctcacgctcggccagcaaccgtctcaaggcctcctaatagctgccctcccctccggactggtgccctcctcactcccacctgcatctggggcccatactggttggctcccgcggtgccatgtctgcagtgtgccccccagccccggtggctgggcagagctgcatcatccttgcaggtgggggttgctgtataagttatttttgtacatgttcgggtgtgggttctacagccttgtccccctccccctcaaccccaccatatgaattgtacagaatatttctattgaattcggaactgtcctttccttggctttatgcacattaaacagatgtgaatattc

SEQ ID NO: 375435 - DNA, 1059 bp, Homo sapiens
tggggtggaaaaaaatttcttgtgtttttatttaaatgcctactgaatccattctgtggatgaactgaactactcagcccttccatctgcctggatgctgaagatgctttccattctttgctcaaagctgggcagctctgagctgctggtgccttcaagctgtttgcctgagtggcaggtcatcctgcagggccacaccgttgggtcagaggccacggacttctcacccaacatagtccaacatgtccttctttgtttattggatttaaattaaggggtttgttgcatgcactgaacgtaacattttgatgtgtttgcaactggcttctgtcttcacagtttcttaattactccaaactggaaaactagatgcctctgactcttaccatgatagaagtcactgatattttgcccatacttaaattgattagtctttgcccctacaaccacagtgtaagctccgtggaggctggggttttgtctgttgctcactgaacctgcaacagtgcctggcacggtaggccttcagtaaatgggtcagtggaatgaaggagtgagtggaacttggtgcgctgtgctgagactttctctgcagagatatctgtgctgctgcttgtctgagcctgctggcagcagaggccctgctttgctcttctctggggccctaggcctctcaactgagcccaggtggggtgcccagcaggcttccctgttccctggtgtgggccacatgtgtggagcagaggggaagaggctggtcctgaccaactaactgtctgtctgtttctgtctcagaggaggctgaggatcctgcctgcatccccatcttctgggtcagcaagtgggtggactattcggacaagtacggccttggtaggtttcttccagaacaggtgggtgactcaggcacagccaggtgaccttttcagttgttacagactctggcctttttgagctcccaggtactgttctcagtgccctcctctctccatcccaggcctcccagttccagctcccagtgctccctgactccccagctttttttttttccagagacag

SEQ ID NO: 375436 - DNA, 212 bp, Homo sapiens
ctgctcagtggacttagggattgtcttcaggggccccagagttagagtgagtgtccagaggatgcctgacctttgttctgaccctgagatgatttctctcatgtctgggttgtggctgggagactggtgccaaatcctaccttgtgcttacaggtataccttgttagtgggcaaaccaccttttgagacttcttgcctaaaagagacctacc

SEQ ID NO: 375437 - DNA, 2228 bp, Homo sapiens
agtggcgcgcaggcttttgtaacgttcccagcgccgcgtttgaattcggggagggagcggagcggtgcggaggctctgctcggatcgaggtctgcagcgcagcttcgggagcatgagtgctgcagtgactgcagggaagctggcacgggcaccggccgaccctgggaaagccggggtccccggagttgcagctcccggagctccggcggcggctccaccggcgaaagagatcccggaggtcctagtggacccacgcagccggcggcgctatgtgcggggccgctttttgggcaagggcggctttgccaagtgcttcgagatctcggacgcggacaccaaggaggtgttcgcgggcaagattgtgcctaagtctctgctgctcaagccgcaccagagggagaagatgtccatggaaatatccattcaccgcagcctcgcccaccagcacgtcgtaggattccacggctttttcgaggacaacgacttcgtgttcgtggtgttggagctctgccgccggaggtctctcctggagctgcacaagaggaggaaagccctgactgagcctgaggcccgatactacctacggcaaattgtgcttggctgccagtacctgcaccgaaaccgagttattcatcgagacctcaagctgggcaaccttttcctgaatgaagatctggaggtgaaaataggggattttggactggcaaccaaagtcgaatatgacggggagaggaagaagaccctgtgtgggactcctaattacatagctcccgaggtgctgagcaagaaagggcacagtttcgaggtggatgtgtggtccattgggtgtatcatgtataccttgttagtgggcaaaccaccttttgagacttcttgcctaaaagagacctacctccggatcaagaagaatgaatacagtattcccaagcacatcaaccccgtggccgcctccctcatccagaagatgcttcagacagatcccactgcccgcccaaccattaacgagctgcttaatgacgagttctttacttctggctatatccctgcccgtctccccatcacctgcctgaccattccaccaaggttttcgattgctcccagcagcctggaccccagcaaccggaagcccctcacagtcctcaataaaggcttggagaaccccctgcctgagcgtccccgggaaaaagaagaaccagtggttcgagagacaggtgaggtggtcgactgccacctcagtgacatgctgcagcagctgcacagtgtcaatgcctccaagccctcggagcgtgggctggtcaggcaagaggaggctgaggatcctgcctgcatccccatcttctgggtcagcaagtgggtggactattcggacaagtacggccttgggtatcagctctgtgataacagcgtgggggtgctcttcaatgactcaacacgcctcatcctctacaatgatggtgacagcctgcagtacatagagcgtgacggcactgagtcctacctcaccgtgagttcccatcccaactccttgatgaagaagatcaccctccttaaatatttccgcaattacatgagcgagcacttgctgaaggcaggtgccaacatcacgccgcgcgaaggtgatgagctcgcccggctgccctacctacggacctggttccgcacccgcagcgccatcatcctgcacctcagcaacggcagcgtgcagatcaacttcttccaggatcacaccaagctcatcttgtgcccactgatggcagccgtgacctacatcgacgagaagcgggacttccgcacataccgcctgagtctcctggaggagtacggctgctgcaaggagctggccagccggctccgctacgcccgcactatggtggacaagctgctgagctcacgctcggccagcaaccgtctcaaggcctcctaatagctgccctcccctccggactggtgccctcctcactcccacctgcatctggggcccatactggttggctcccgcggtgccatgtctgcagtgtgccccccagccccggtggctgggcagagctgcatcatccttgcaggtgggggttgctgtataagttatttttgtacatgttcgggtgtgggttctacagccttgtccccctccccctcaaccccaccatatgaattgtacagaatatttctattgaattcggaactgtcctttccttggctttatgcacattaaacagatgtgaatattc

SEQ ID NO: 375438 - DNA, 2266 bp, Homo sapiens
  misc_feature (78)..(78): n is a, c, g, or t
aatcagacctaccctcatctcatccacacaaccagaaccgaaagagacaaaacaaataattaggctaggtaggaggcnggggttaataggccgagcggagcggtgcggaggctctgctcggatcgaggtctgcagcgcagcttcgggagcatgagtgctgcagtgactgcagggaagctggcacgggcaccggccgaccctgggaaagccggggtccccggagttgcagctcccggagctccggcggcggctccaccggcgaaagagatcccggaggtcctagtggacccacgcagccggcggcgctatgtgcggggccgctttttgggcaagggcggctttgccaagtgcttcgagatctcggacgcggacaccaaggaggtgttcgcgggcaagattgtgcctaagtctctgctgctcaagccgcaccagagggagaagatgtccatggaaatatccattcaccgcagcctcgcccaccagcacgtcgtaggattccacggctttttcgaggacaacgacttcgtgttcgtggtgttggagctctgccgccggaggtctctcctggagctgcacaagaggaggaaagccctgactgagcctgaggcccgatactacctacggcaaattgtgcttggctgccagtacctgcaccgaaaccgagttattcatcgagacctcaagctgggcaaccttttcctgaatgaagatctggaggtgaaaataggggattttggactggcaaccaaagtcgaatatgacggggagaggaagaagaccctgtgtgggactcctaattacatagctcccgaggtgctgagcaagaaagggcacagtttcgaggtggatgtgtggtccattgggtgtatcatgtataccttgttagtgggcaaaccaccttttgagacttcttgcctaaaagagacctacctccggatcaagaagaatgaatacagtattcccaagcacatcaaccccgtggccgcctccctcatccagaagatgcttcagacagatcccactgcccgcccaaccattaacgagctgcttaatgacgagttctttacttctggctatatccctgcccgtctccccatcacctgcctgaccattccaccaaggttttcgattgctcccagcagcctggaccccagcaaccggaagcccctcacagtcctcaataaaggcttggagaaccccctgcctgagcgtccccgggaaaaagaagaaccagtggttcgagagacaggtgaggtggtcgactgccacctcagtgacatgctgcagcagctgcacagtgtcaatgcctccaagccctcggagcgtgggctggtcaggcaagaggaggctgaggatcctgcctgcatccccatcttctgggtcagcaagtgggtggactattcggacaagtacggccttgggtatcagctctgtgataacagcgtgggggtgctcttcaatgactcaacacgcctcatcctctacaatgatggtgacagcctgcagtacatagagcgtgacggcactgagtcctacctcaccgtgagttcccatcccaactccttgatgaagaagatcaccctccttaaatatttccgcaattacatgagcgagcacttgctgaaggcaggtgccaacatcacgccgcgcgaaggtgatgagctcgcccggctgccctacctacggacctggttccgcacccgcagcgccatcatcctgcacctcagcaacggcagcgtgcagatcaacttcttccaggatcacaccaagctcatcttgtgcccactgatggcagccgtgacctacatcgacgagaagcgggacttccgcacataccgcctgagtctcctggaggagtacggctgctgcaaggagctggccagccggctccgctacgcccgcactatggtggacaagctgctgagctcacgctcggccagcaaccgtctcaaggcctcctaatagctgccctcccctccggactggtgccctcctcactcccacctgcatctggggcccatactggttggctcccgcggtgccatgtctgcagtgtgccccccagccccggtggctgggcagagctgcatcatccttgcaggtgggggttgctgtataagttatttttgtacatgttcgggtgtgggttctacagccttgtccccctccccctcaaccccaccatatgaattgtacagaatatttctattgaattcggaactgtcctttccttggctttatgcacattaaacagatgtgaatattc

SEQ ID NO: 375439 - DNA, 2017 bp, Homo sapiens
agtggcgcgcaggcttttgtaacgttcccagcgccgcgtttgaattcggggagggagcggagcggtgcggaggctctgctcggatcgaggtctgcagcgcagcttcgggagcatgagtgctgcagtgactgcagggaagctggcacgggcaccggccgaccctgggaaagccggggtccccggagttgcagctcccggagctccggcggcggctccaccggcgaaagagatcccggaggtcctagtggacccacgcagccggcggcgctatgtgcggggccgctttttgggcaagggcggctttgccaagtgcttcgagatctcggacgcggacaccaaggaggtgttcgcgggcaagattgtgcctaagtctctgctgctcaagccgcaccagagggagaagatgtccatggaaatatccattcaccgcagcctcgcccaccagcacgtcgtaggattccacggctttttcgaggacaacgacttcgtgttcgtggtgttggagctctgccgccggaggtctctcctggagctgcacaagaggaggaaagccctgactgagcctgaggcccgatactacctacggcaaattgtgcttggctgccagtacctgcaccgaaaccgagttattcatcgagacctcaagctgggcaaccttttcctgaatgaagatctggaggtgaaaataggggattttggactggcaaccaaagtcgaatatgacggggagaggaagaagaccctgtgtgggactcctaattacatagctcccgaggtgctgagcaagaaagggcacagtttcgaggtggatgtgtggtccattgggtgtatcatgtataccttgttagtgggcaaaccaccttttgagacttcttgcctaaaagagacctacctccggatcaagaagaatgaatacagtattcccaagcacatcaaccccgtggccgcctccctcatccagaagatgcttcagacagatcccactgcccgcccaaccattaacgagctgcttaatgacgagttctttacttctggctatatccctgcccgtctccccatcacctgcctgaccattccaccaaggttttcgattgctcccagcagcctggaccccagcaaccggaagcccctcacagtcctcaataaaggcttggagaaccccctgcctgagcgtccccgggaaaaagaagaaccagtggttcgagagacaggtgaggtggtcgactgccacctcagtgacatgctgcagcagctgcacagtgtcaatgcctccaagccctcggagcgtgggctggtcaggcaagaggaggctgaggatcctgcctgcatccccatcttctgggtcagcaagtgggtggactattcggacaagtacggccttgggtatcagctctgtgataacagcgtgggggtgctcttcaatgactcaacacgcctcatcctctacaatgatggtgacagcctgcagtacatagagcgtgacggcactgagtcctacctcaccgtgagttcccatcccaactccttgatgaagaagatcaccctccttaaatatttccgcaattacatgagcgagcacttgctgaaggcaggtgccaacatcacgccgcgcgaaggtgatgagctcgcccggctgccctacctacggacctggttccgcacccgcagcgccatcatcctgcacctcagcaacggcagcgtgcagatcaacttcttccaggatcacaaccaagctacatctttgtagccccatggatggcagaccgtgaacctaattcggagcgagaagcggggaaccttcccggacattaccggcctgaaggttcatcccgtggaaggaagcaagacactggctgccacgggcgcatggccccagcacgggacccgattaaggcccggcacaaaggtggaccaagccagatgcacacacgatcgaaccagacaacgacctcacgggcccctaaatagagggccccacacacagagaaggtgacctcgtaaatccccacggaatcag

SEQ ID NO: 375440 - DNA, 1071 bp, Homo sapiens
agtggcgcgcaggcttttgtaacgttcccagcgccgcgtttgaattcggggagggagcggagcggtgcggaggctctgctcggatcgaggtctgcagcgcagcttcgggagcatgagtgctgcagtgactgcagggaagctggcacgggcaccggccgaccctgggaaagccggggtccccggagttgcagctcccggagctccggcggcggctccaccggcgaaagagatcccggaggtcctagtggacccacgcagccggcggcgctatgtgcggggccgctttttgggcaagggcggctttgccaagtgcttcgagatctcggacgcggacaccaaggaggtgttcgcgggcaagattgtgcctaagtctctgctgctcaagccgcaccagagggagaagatgtccatggaaatatccattcaccgcagcctcgcccaccagcacgtcgtaggattccacggctttttcgaggacaacgacttcgtgttcgtggtgttggagctctgccgccggaggtctctcctggagctgcacaagaggaggaaagccctgactgagcctgaggcccgatactacctacggcaaattgtgcttggctgccagtacctgcaccgaaaccgagttattcatcgagacctcaagctgggcaaccttttcctgaatgaagatctggaggtgaaaataggggattttggactggcaaccaaagtcgaatatgacggggagaggaagaagaccctgtgtgggactcctaattacatagctcccgaggtgctgagcaagaaagggcacagtttcgaggtggatgtgtggtccattgggtgtatcatgtataccttgttagtgggcaaaccaccttttgagacttcttgcctaaaagagacctacctccggatcaagaagaatgaatacagtattcccaaggtgactaatgatgctttaagtttacatttattttgttttccccagaagctgtttatggagcccagcaatatcctaggaccagaaataggtctatcccacctctaaggtagccacagagcttgagagggcctgtgtctgaaatt

SEQ ID NO: 375441 - DNA, 1856 bp, Homo sapiens
gctggggaactggaactgcctgcggggcagttggagcgcccagacctggagctgctggaaagagtacccagcaagggagagcctgggacttggagctgctagagaagggtgctgggagcctcccgcttacgtatggaaagtgtctttgtctctcctggagctgcacaagaggaggaaagccctgactgagcctgaggcccgatactacctacggcaaattgtgcttggctgccagtacctgcaccgaaaccgagttattcatcgagacctcaagctgggcaaccttttcctgaatgaagatctggaggtgaaaataggggattttggactggcaaccaaagtcgaatatgacggggagaggaagaagaccctgtgtgggactcctaattacatagctcccgaggtgctgagcaagaaagggcacagtttcgaggtggatgtgtggtccattgggtgtatcatgtataccttgttagtgggcaaaccaccttttgagacttcttgcctaaaagagacctacctccggatcaagaagaatgaatacagtattcccaagcacatcaaccccgtggccgcctccctcatccagaagatgcttcagacagatcccactgcccgcccaaccattaacgagctgcttaatgacgagttctttacttctggctatatccctgcccgtctccccatcacctgcctgaccattccaccaaggttttcgattgctcccagcagcctggaccccagcaaccggaagcccctcacagtcctcaataaaggcttggagaaccccctgcctgagcgtccccgggaaaaagaagaaccagtggttcgagagacaggtgaggtggtcgactgccacctcagtgacatgctgcagcagctgcacagtgtcaatgcctccaagccctcggagcgtgggctggtcaggcaagaggaggctgaggatcctgcctgcatccccatcttctgggtcagcaagtgggtggactattcggacaagtacggccttgggtatcagctctgtgataacagcgtgggggtgctcttcaatgactcaacacgcctcatcctctacaatgatggtgacagcctgcagtacatagagcgtgacggcactgagtcctacctcaccgtgagttcccatcccaactccttgatgaagaagatcaccctccttaaatatttccgcaattacatgagcgagcacttgctgaaggcaggtgccaacatcacgccgcgcgaaggtgatgagctcgcccggctgccctacctacggacctggttccgcacccgcagcgccatcatcctgcacctcagcaacggcagcgtgcagatcaacttcttccaggatcacaccaagctcatcttgtgcccactgatggcagccgtgacctacatcgacgagaagcgggacttccgcacataccgcctgagtctcctggaggagtacggctgctgcaaggagctggccagccggctccgctacgcccgcactatggtggacaagctgctgagctcacgctcggccagcaaccgtctcaaggcctcctaatagctgccctcccctccggactggtgccctcctcactcccacctgcatctggggcccatactggttggctcccgcggtgccatgtctgcagtgtgccccccagccccggtggctgggcagagctgcatcatccttgcaggtgggggttgctgtataagttatttttgtacatgttcgggtgtgggttctacagccttgtccccctccccctcaaccccaccatatgaattgtacagaatatttctattgaattcggaactgtcctttccttggctttatgcacattaaacagatgtgaatattc

SEQ ID NO: 375442 - DNA, 1008 bp, Homo sapiens
cttctggagcatcgaaaacttggtggaattgtcaggcaggtgatggggagacgggcagggatatagccagaagtaaagaactcgtcattaagcagttcgttaatggttgggcgggcagtgggatctgtctgaagcatcttctggatgagggaggcggccacgggtatcagctctgtgataacagcgtgggggtgctcttcaatgactcaacacgcctcatcctctacaatgatggtgacagcctgcagtacatagagcgtgacggcactgagtcctacctcaccgtgagttcccatcccaactccttgatgaagaagatcaccctccttaaatatttccgcaattacatgagcgagcacttgctgaaggcaggtgccaacatcacgccgcgcgaaggtgatgagctcgcccggctgccctacctacggacctggttccgcacccgcagcgccatcatcctgcacctcagcaacggcagcgtgcagatcaacttcttccaggatcacaccaagctcatcttgtgcccactgatggcagccgtgacctacatcgacgagaagcgggacttccgcacataccgcctgagtctcctggaggagtacggctgctgcaaggagctggccagccggctccgctacgcccgcactatggtggacaagctgctgagctcacgctcggccagcaaccgtctcaaggcctcctaatagctgccctcccctccggactggtgccctcctcactcccacctgcatctggggcccatactggttggctcccgcggtgccatgtctgcagtgtgccccccagccccggtggctgggcagagctgcatcatccttgcaggtgggggttgctgtataagttatttttgtacatgttcgggtgtgggttctacagccttgtccccctccccctcaaccccaccatatgaattgtacagaatatttctattgaattcggaactgtcctttccttggctttatgcacattaaacagatgtgaatattc

SEQ ID NO: 375443 - DNA, 556 bp, Homo sapiens
cccctcgcccttattacgaattatgtttggatgaaaggtatcagtaccgatcacaccaagctcatcttgtgcccactgatggcagccgtgacctacatcgacgagaagcgggacttccgcacataccgcctgagtctcctggaggagtacggctgctgcaaggagctggccagccggctccgctacgcccgcactatggtggacaagctgctgagctcacgctcggccagcaaccgtctcaaggcctcctaatagctgccctcccctccggactggtgccctcctcactcccacctgcatctggggcccatactggttggctcccgcggtgccatgtctgcagtgtgccccccagccccggtggctgggcagagctgcatcatccttgcaggtgggggttgctgtataagttatttttgtacatgttcgggtgtgggttctacagccttgtccccctccccctcaaccccaccatatgaattgtacagaatatttctattgaattcggaactgtcctttccttggctttatgcacattaaacagatgtgaatattc

SEQ ID NO: 375444 - DNA, 303 bp, Homo sapiens
ctgttctactaatctctatagtcgtaattactgtaactttctcataattcttaaaattgggtagtatgaatccaaatttttctttcaatataacactttttggttatttaaattcctttgcttttccatatgttttagaattagccagtctgtatctatagaaaatcctgctgaggccagatagggtggctcaaatctgcaatctcagcactttggaaggttgaggtgggagcgtcacttgagcccaggagttcaagaccagactgtgcaatatgggaacacagggagaccccatctttacca

SEQ ID NO: 375445 - DNA, 964 bp, Homo sapiens
ggaaaattattgttgccttaatgttttctaagcaaaggcatgatcactcaaggagaaatacacttagctttcttaaagttaatttttacgttttaataattcacatacaatcttaactcagaaaaagagaggtcccttgtacgccttactccgtttcctccaatggtaacatcttggtaatatttccaaaatggtaatatttgcaaatagtggccgggcgtggtggctcacacctgtaatcccagcactttgggaagctgaagtgggtggatcatgaggtcaggagatcgagaccatcctggctaacacagtgaaaccccgtctctactaaaaatataaaaaattagctgggtatggtggtgggcacctctagtcccagctactcaggaggctgaggcaggagaatggtgcgaacccaggagacggaggttgcagtgagccaagatcgcgccactgcactccagtctgggcgacagaggaagactccgtctcagaaaaatgaatgaatgaataaataaataaaatttgcaaatattgcaaatgccacagtaccaggagattgacatttatacaagcaaggtacagaacatttccgtcaacaccgggattcatcatgttgcctttttatagtcatgaccccttctattcagtgctgctcctccttccctccttaacccctggcaactactaatctattccccactcttataatttattcatttcaagaatgttacttaaatggaattctacatgtaacctttgggattacccttcgtccactcaccataattctgtggagattcgtccaggttattgtgggtatcaatcatttgttgtttttttaaaaaaaattactgaggactatttgatgctgtggatatataccacagtttaaccattcatctcacaaaagtcgtgtatacattgtttccccagttttggctattaaaaacaaggctgctat

SEQ ID NO: 375446 - DNA, 521 bp, Homo sapiens
  misc_feature (492)..(492): n is a, c, g, or t
  misc_feature (494)..(494): n is a, c, g, or t
  misc_feature (498)..(498): n is a, c, g, or t
  misc_feature (500)..(500): n is a, c, g, or t
  misc_feature (502)..(504): n is a, c, g, or t
  misc_feature (507)..(508): n is a, c, g, or t
  misc_feature (510)..(510): n is a, c, g, or t
  misc_feature (512)..(513): n is a, c, g, or t
  misc_feature (518)..(520): n is a, c, g, or t
ggggcgttcgggaaggtgaaggttggcaaacatgaattgactgggcataaagtagctgtgaagatactcaatcgacagaagattcggagccttgatgtggtaggaaaaatccgcagagaaattcagaacctcaagcttttcaggcatcctcatataattaaactgtaccaggtcatcagtacaccatctgatattttcatggtgatggaatatgtctcaggaggagagctatttgattatatctgtaagaatggaaggctggatgaaaaagaaagtcggcgtctgttccaacagatcctttctggtgtggattattgtcacaggcatatggtggtccatagagatttgaaacctgaaaatgtcctgcttgatgcacacatgaatgcaaagatagctgattttggtctttcaaacatgatgtcagatggtgaatttttaagaacaagttgtggctcacccaactatgctgcaccagaagtaatttcaggaagntngtantngnnnccnngncnncctcnnna

SEQ ID NO: 375447 - DNA, 552 bp, Homo sapiens
gcagactcagttcctggagaaagatggcgacagccgagaagcagaaacacgacgggcgggtgaagatcggccactacattctgggtgacacgctgggggtcggcaccttcggcaaagtgaaggttggcaaacatgaattgactgggcataaagtagctgtgaagatactcaatcgacagaagattcggagccttgatgtggtaggaaaaatccgcagagaaattcagaacctcaagcttttcaggcatcctcatataattaaactgtaagctctgtttattaattaaatatagtccagtcatcttttcatcttttttgttaacctacttaatgtgacaagtgagaaaaatgactgacacttctttttgtttcctaagggttttgaaaagtttcttcctaggctgtgtgcggtggctcacacctgtaattccagtactttgggaggctgaggcaggcggatcacctgaggtcaggagttcgagaccagcctggccaacatggtgaaaccctgtctccagtaaaaatacaaaaattagctgggcatggtggtgg

SEQ ID NO: 375448 - DNA, 2267 bp, Homo sapiens
  misc_feature (2227)..(2227): n is a, c, g, or t
gcagactcagttcctggagaaagatggcgacagccgagaagcagaaacacgacgggcgggtgaagatcggccactacattctgggtgacacgctgggggtcggcaccttcggcaaagtgaaggttggcaaacatgaattgactgggcataaagtagctgtgaagatactcaatcgacagaagattcggagccttgatgtggtaggaaaaatccgcagagaaattcagaacctcaagcttttcaggcatcctcatataattaaactgtaccaggtcatcagtacaccatctgatattttcatggtgatggaatatgtctcaggaggagagctatttgattatatctgtaagaatggaaggctggatgaaaaagaaagtcggcgtctgttccaacagatcctttctggtgtggattattgtcacaggcatatggtggtccatagagatttgaaacctgaaaatgtcctgcttgatgcacacatgaatgcaaagatagctgattttggtctttcaaacatgatgtcagatggtgaatttttaagaacaagttgtggctcacccaactatgctgcaccagaagtaatttcaggaagattgtatgcaggcccagaggtagatatatggagcagtggggttattctctatgctttattatgtggaacccttccatttgatgatgaccatgtgccaactctttttaagaagatatgtgatgggatcttctatacccctcaatatttaaatccttctgtgattagccttttgaaacatatgctgcaggtggatcccatgaagagggccacaatcaaagatatcagggaacatgaatggtttaaacaggaccttccaaaatatctctttcctgaggatccatcatatagttcaaccatgattgatgatgaagccttaaaagaagtatgtgaaaagtttgagtgctcagaagaggaagttctcagctgtctttacaacagaaatcaccaggatcctttggcagttgcctaccatctcataatagataacaggagaataatgaatgaagccaaagatttctatttggcgacaagcccacctgattcttttcttgatgatcatcacctgactcggccccatcctgaaagagtaccattcttggttgctgaaacaccaagggcacgccatacccttgatgaattaaatccacagaaatccaaacaccaaggtgtaaggaaagcaaaatggcatttaggaattagaagtcaaagtcgaccaaatgatattatggcagaagtatgtagagcaatcaaacaattggattatgaatggaaggttgtaaacccatattatttgcgtgtacgaaggaagaatcctgtgacaagcacttactccaaaatgagtctacagttataccaagtggatagtagaacttatctactggatttccgtagtattgatgatgaaattacagaagccaaatcagggactgctactccacagagatcgggatcagttagcaactatcgatcttgccaaaggagtgattcagatgctgaggctcaaggaaaatcctcagaagtttctcttacctcatctgtgacctcacttgactcttctcctgttgacctaactccaagacctggaagtcacacaatagaattttttgagatgtgtgcaaatctaattaaaattcttgcacaataaacagaaaactttgcttatttcttttgcagcaataagcatgcataataagtcacagccaaatgcttccatttgtaatcaagttatacataattataaccgagggctggcgttttggaatgcaatttgcacagggattggaacatgatttatagttaaaagcctaatatgcagaaatgaattaagatcattttgttgttcattgtgcagtatgtatatagcataatatacacagtgaattataggtctcaggcttacttgatttttggctattttatatttagtgtacacagggctttgaaatattaatttacataaaggccttcatatattattacgtgttatatattacgtgttataaatttattcaataaatatttgcctagaattcccaagacctttataggtgattttgttttctgggctccttaacttcataaatagctagtatcttccagcagtagtaacagtctggataacttcttccatatccctccctctttgtttttttgagacagagcgagactctggctcataaaataataataataatnaataaataaaaaataaatgtttcaggtaaacccaaaaaaa

SEQ ID NO: 375449 - DNA, 1675 bp, Homo sapiens
gcagactcagttcctggagaaagatggcgacagccgagaagcagaaacacgacgggcgggtgaagatcggccactacattctgggtgacacgctgggggtcggcaccttcggcaaagtgaaggttggcaaacatgaattgactgggcataaagtagctgtgaagatactcaatcgacagaagattcggagccttgatgtggtaggaaaaatccgcagagaaattcagaacctcaagcttttcaggcatcctcatataattaaactgtaccaggtcatcagtacaccatctgatattttcatggtgatggaatatgtctcaggaggagagctatttgattatatctgtaagaatggaaggctggatgaaaaagaaagtcggcgtctgttccaacagatcctttctggtgtggattattgtcacaggcatatggtggtccatagagatttgaaacctgaaaatgtcctgcttgatgcacacatgaatgcaaagatagctgattttggtctttcaaacatgatgtcagatggtgaatttttaagaacaagttgtggctcacccaactatgctgcaccagaagtaatttcaggaagattgtatgcaggcccagaggtagatatatggagcagtggggttattctctatgctttattatgtggaacccttccatttgatgatgaccatgtgccaactctttttaagaagatatgtgatgggatcttctatacccctcaatatttaaatccttctgtgattagccttttgaaacatatgctgcaggtggatcccatgaagagggccacaatcaaagatatcagggaacatgaatggtttaaacaggaccttccaaaatatctctttcctgaggatccatcatatagttcaaccatgattgatgatgaagccttaaaagaagtatgtgaaaagtttgagtgctcagaagaggaagttctcagctgtctttacaacagaaatcaccaggatcctttggcagttgcctaccatctcataatagataacaggagaataatgaatgaagccaaagatttctatttggcgacaagcccacctgattcttttcttgatgatcatcacctgactcggccccatcctgaaagagtaccattcttggttgctgaaacaccaagggcacgccatacccttgatgaattaaatccacagaaatccaaacaccaaggtgtaaggaaagcaaaatggcatttaggaattagaagtcaaagtcgaccaaatgatattatggcagaagtatgtagagcaatcaaacaattggattatgaatggaaggttgtaaacccatattatttgcgtgtacgaaggaagaatcctgtgacaagcacttactccaaaatgagtctacagttataccaagtggatagtagaacttatctactggatttccgtagtattgatgatgaaattacagaagccaaatcagggactgctactccacagagatcgggatcagttagcaactatcgatcttgccaaaggagtgattcagatgctgaggctcaaggaaaatcctcagaagtttctcttacctcatctgtgacctcacttgactcttctcctgttgacctaactccaagacctggaagtcacacaatagaattttttgagatgtgtgcaaatctaattaaaattcttgcacaata

SEQ ID NO: 375450 - DNA, 3416 bp, Homo sapiens
aaaaaaataaaagtttcttcccattcatgtatttttctaaccccattgatggtcatttaagcctgtgttcatgttttgcccttgtgcttatcagctgttatcttctcattctttcctgtctcctggaaagatgctcttctggtaatgtttggtgccccattgctgtaaaaccaacagtgatctgctagtaaaaactcttgacctccaaatgcccacatgatgtcagttagcctcactagtgagaatgcggtagtagaaagggtttttccccatcctgcttatacctgaacatatagataacaaaatttcaggaatccaaggtttcaaaagggcagtaatcttactgttgttttacagttgccagttatagagtctacaaataactatttcctgctcagcttctgctttgttatgcaggcaataacttaaagatgcttaggtttttctcctgaactggctgactcaaacttgtttcactcttacctcttctcatttgttgagtgctaggttttaaataccatccatatgctgaccacccctaaatgtacatctcttgctttaagatctcttcttacaccagacttatttgctcactgctgactttacatttccatttggatgttcgcaagacgtttaaaactcaacccggcccaaaatgaactctttattactctcccaaacctgctcttcccacagttttcaccatcttggctaacagccaatgacccagggctaaaacttaggaaccatttttaacttccctgtttctttcactttctaccatgcatttcatttcttccttcacaatcaagctaggatttgattgcttctcagttcctttattgctgtcaacctggtctcagccaccatctgtctcatgaaatcctgaagtaacctcctgtggctacctttactgttgacagttaattcttcacattgctgccatagttttacttttaatatgccagatcacatgactgcttaaaacgtacgatagcttttcatcttccttggagtaaaagccaaagccttatcatggcttgtaaaattctgtgtcttctggcctgcagttaacacctttgactctacatcctatttctctctaatattcctcgaacatgccaagcaggcttctacttggggacctttgcagttgctattccctctcccagtttcgctttcctcctagataattacataatttgttcccattcttcttttaggctcagctcaaatgttactttattagaggctttcctttagcactctgtatacaaagattccccttcatttgctttatttttcttcatagcatgttccaccacctgagatattgcttatttatttagtgtctgtttcctggttcctggaacatgaactccatgagagcagagaatttttgtttcctgcagtttttctagctcctagcctagtacctggtatactataggtgcttagtaaatatttattgaatgaatgaatatatgtgttttaatatttgtagacaatgttttctctcaccaggtaccaggtcatcagtacaccatctgatattttcatggtgatggaatatgtctcaggaggagagctatttgattatatctgtaagaatggaagggtaagctgttctgctttaattctgtatgtattttgtaactcccctttatcctttactagcatcaaaatgtcagcaaccaattttaagaggtctatttaataaccagttcccttagtcatatatttgtttagaatcataaactatgtagaactagaaaggatcttaaagattatctccttagcctgtttatacagatgtggatactgagcctcgcggcttatatgattgctcacagtaacgtgatttattaatgacggaattggcttgagcccccagaactcataatcctcagacttatgcttccagggtatacaaatactttgaatatgtatcttaatgtaattaatcgttacaaaatatattattattacttaaagatctaggccttgctagtcaattctagccacatttaaattgcattcattttttggtttcagaaatctgatgtacctggagtagtaaaaacaggctccacgaaggagctggatgaaaaagaaagtcggcgtctgttccaacagatcctttctggtgtggattattgtcacaggcatatggtggtccatagagatttgaaacctgaaaatgtcctgcttgatgcacacatgaatgcaaagatagctgattttggtctttcaaacatgatgtcagatggtgaatttttaagaacaagttgtggctcacccaactatgctgcaccagaagtaatttcaggaagattgtatgcaggcccagaggtagatatatggagcagtggggttattctctatgctttattatgtggaacccttccatttgatgatgaccatgtgccaactctttttaagaagatatgtgatgggatcttctatacccctcaatatttaaatccttctgtgattagccttttgaaacatatgctgcaggtggatcccatgaagagggccacaatcaaagatatcagggaacatgaatggtttaaacaggaccttccaaaatatctctttcctgaggatccatcatatagttcaaccatgattgatgatgaagccttaaaagaagtatgtgaaaagtttgagtgctcagaagaggaagttctcagctgtctttacaacagaaatcaccaggatcctttggcagttgcctaccatctcataatagataacaggagaataatgaatgaagccaaagatttctatttggcgacaagcccacctgattcttttcttgatgatcatcacctgactcggccccatcctgaaagagtaccattcttggttgctgaaacaccaagggcacgccatacccttgatgaattaaatccacagaaatccaaacaccaaggtgtaaggaaagcaaaatggcatttaggaattagaagtcaaagtcgaccaaatgatattatggcagaagtatgtagagcaatcaaacaattggattatgaatggaaggttgtaaacccatattatttgcgtgtacgaaggaagaatcctgtgacaagcacttactccaaaatgagtctacagttataccaagtggatagtagaacttatctactggatttccgtagtattgatgatgaaattacagaagccaaatcagggactgctactccacagagatcgggatcagttagcaactatcgatcttgccaaaggagtgattcagatgctgaggctcaaggaaaatcctcagaagtttctcttacctcatctgtgacctcacttgactcttctcctgttgacctaactccaagacctggaagtcacacaatagaattttttgagatgtgtgcaaatctaattaaaattcttgcacaata

SEQ ID NO: 375451 - DNA, 1648 bp, Homo sapiens
aggggctggtaggtacgaggggctgggatgcgaaggtgcaaactttcccagttggcaaacatgaattgactgggcataaagtagctgtgaagatactcaatcgacagaagattcggagccttgatgtggtaggaaaaatccgcagagaaattcagaacctcaagcttttcaggcatcctcatataattaaactgtaccaggtcatcagtacaccatctgatattttcatggtgatggaatatgtctcaggaggagagctatttgattatatctgtaagaatggaaggaaatctgatgtacctggagtagtaaaaacaggctccacgaaggagctggatgaaaaagaaagtcggcgtctgttccaacagatcctttctggtgtggattattgtcacaggcatatggtggtccatagagatttgaaacctgaaaatgtcctgcttgatgcacacatgaatgcaaagatagctgattttggtctttcaaacatgatgtcagatggtgaatttttaagaacaagttgtggctcacccaactatgctgcaccagaagtaatttcaggaagattgtatgcaggcccagaggtagatatatggagcagtggggttattctctatgctttattatgtggaacccttccatttgatgatgaccatgtgccaactctttttaagaagatatgtgatgggatcttctatacccctcaatatttaaatccttctgtgattagccttttgaaacatatgctgcaggtggatcccatgaagagggccacaatcaaagatatcagggaacatgaatggtttaaacaggaccttccaaaatatctctttcctgaggatccatcatatagttcaaccatgattgatgatgaagccttaaaagaagtatgtgaaaagtttgagtgctcagaagaggaagttctcagctgtctttacaacagaaatcaccaggatcctttggcagttgcctaccatctcataatagataacaggagaataatgaatgaagccaaagatttctatttggcgacaagcccacctgattcttttcttgatgatcatcacctgactcggccccatcctgaaagagtaccattcttggttgctgaaacaccaagggcacgccatacccttgatgaattaaatccacagaaatccaaacaccaaggtgtaaggaaagcaaaatggcatttaggaattagaagtcaaagtcgaccaaatgatattatggcagaagtatgtagagcaatcaaacaattggattatgaatggaaggttgtaaacccatattatttgcgtgtacgaaggaagaatcctgtgacaagcacttactccaaaatgagtctacagttataccaagtggatagtagaacttatctactggatttccgtagtattgatgatgaaattacagaagccaaatcagggactgctactccacagagatcgggatcagttagcaactatcgatcttgccaaaggagtgattcagatgctgaggctcaaggaaaatcctcagaagtttctcttacctcatctgtgacctcacttgactcttctcctgttgacctaactccaagacctggaagtcacacaatagaattttttgagatgtgtgcaaatctaattaaaattcttgcacaata

SEQ ID NO: 375452 - DNA, 2624 bp, Homo sapiens
aaaaaaataaaagtttcttcccattcatgtatttttctaaccccattgatggtcatttaagcctgtgttcatgttttgcccttgtgcttatcagctgttatcttctcattctttcctgtctcctggaaagatgctcttctggtaatgtttggtgccccattgctgtaaaaccaacagtgatctgctagtaaaaactcttgacctccaaatgcccacatgatgtcagttagcctcactagtgagaatgcggtagtagaaagggtttttccccatcctgcttatacctgaacatatagataacaaaatttcaggaatccaaggtttcaaaagggcagtaatcttactgttgttttacagttgccagttatagagtctacaaataactatttcctgctcagcttctgctttgttatgcaggcaataacttaaagatgcttaggtttttctcctgaactggctgactcaaacttgtttcactcttacctcttctcatttgttgagtgctaggttttaaataccatccatatgctgaccacccctaaatgtacatctcttgctttaagatctcttcttacaccagacttatttgctcactgctgactttacatttccatttggatgttcgcaagacgtttaaaactcaacccggcccaaaatgaactctttattactctcccaaacctgctcttcccacagttttcaccatcttggctaacagccaatgacccagggctaaaacttaggaaccatttttaacttccctgtttctttcactttctaccatgcatttcatttcttccttcacaatcaagctaggatttgattgcttctcagttcctttattgctgtcaacctggtctcagccaccatctgtctcatgaaatcctgaagtaacctcctgtggctacctttactgttgacagttaattcttcacattgctgccatagttttacttttaatatgccagatcacatgactgcttaaaacgtacgatagcttttcatcttccttggagtaaaagccaaagccttatcatggcttgtaaaattctgtgtcttctggcctgcagttaacacctttgactctacatcctatttctctctaatattcctcgaacatgccaagcaggcttctacttggggacctttgcagttgctattccctctcccagtttcgctttcctcctagataattacataatttgttcccattcttcttttaggctcagctcaaatgttactttattagaggctttcctttagcactctgtatacaaagattccccttcatttgctttatttttcttcatagcatgttccaccacctgagatattgcttatttatttagtgtctgtttcctggttcctggaacatgaactccatgagagcagagaatttttgtttcctgcagtttttctagctcctagcctagtacctggtatactataggtgcttagtaaatatttattgaatgaatgaatatatgtgttttaatatttgtagacaatgttttctctcaccaggtaccaggtcatcagtacaccatctgatattttcatggtgatggaatatgtctcaggaggagagctatttgattatatctgtaagaatggaagggtaagctgttctgctttaattctgtatgtattttgtaactcccctttatcctttactagcatcaaaatgtcagcaaccaattttaagaggtctatttaataaccagttcccttagtcatatatttgtttagaatcataaactatgtagaactagaaaggatcttaaagattatctccttagcctgtttatacagatgtggatactgagcctcgcggcttatatgattgctcacagtaacgtgatttattaatgacggaattggcttgagcccccagaactcataatcctcagacttatgcttccagggtatacaaatactttgaatatgtatcttaatgtaattaatcgttacaaaatatattattattacttaaagatctaggccttgctagtcaattctagccacatttaaattgcattcattttttggtttcagaaatctgatgtacctggagtagtaaaaacaggctccacgaaggaggtaggaattagatataaagaatttacagctggaaggaactttgtaggacattttgaacactaccttaagttacagatacaaaaactcaacactgccctctgcccatactttttctcatacccaggttatgtggtatgcaaaagcccctttgtgggagagctgtagctagccctgaaaagagagcttttctctcaattttaagttatttacattactcattcatttgttctatatagcatgtctatttacttttatcaaaatcaaacttattaaccaagttaattttgattttactatttcttaacatgattcatttctatttcaggtactcccctttactcctgcttctccttaccaaaaaaaaaaaaaaaaaaaaaattctgcctggagaaatgggaaacaggcacaattgatatatatttttcttatctttacggtggtaggtaaatatctgggtaaaccctggggggtatcactacaagtttacccagtggattataaaatttccagcaccggttttttct

SEQ ID NO: 375453 - DNA, 847 bp, Homo sapiens
gcagactcagttcctggagaaagatggcgacagccgagaagcagaaacacgacgggcgggtgaagatcggccactacattctgggtgacacgctgggggtcggcaccttcggcaaagtgaaggttggcaaacatgaattgactgggcataaagtagctgtgaagatactcaatcgacagaagattcggagccttgatgtggtaggaaaaatccgcagagaaattcagaacctcaagcttttcaggcatcctcatataattaaactgtaccaggtcatcagtacaccatctgatattttcatggtgatggaatatgtctcaggaggagagctatttgattatatctgtaagaatggaaggctggatgaaaaagaaagtcggcgtctgttccaacagatcctttctggtgtggattattgtcacaggcatatggtggtccatagagatttgaaacctgaaaatgtcctgcttgatgcacacatgaatgcaaagatagctgattttggtctttcaaacatgatgtcagatggtgaatttttaagaacaagttgtggctcacccaactatgctgcaccagaagtaatttcaggaagattgtatgcaggcccagaggtagatatatggagcagtggggttattctctatgctttattatgtggaacccttccatttgatgatgaccatgtgccaactctttttaagaagatatgtgatgggatcttctatacccctcaatatttaaatccttctgtgattagccttttgaaacatatgctgcaggtggatgacagaacgagactggatctcaaaatatagataaatttaaaaccccgccccccaaaaaaaca

SEQ ID NO: 375454 - DNA, 128 bp, Homo sapiens
tccttaacttcataaatagctagtatcttccagcagtagtaacagtctggataacttcttccatatccctccctctttgtttttttgagacagtgtcactttgtcacccaggctggagtgcaatggtg

SEQ ID NO: 375455 - DNA, 1149 bp, Homo sapiens
  misc_feature (1147)..(1147): n is a, c, g, or t
  misc_feature (1149)..(1149): n is a, c, g, or t
gcagactcagttcctggagaaagatggcgacagccgagaagcagaaacacgacgggcgggtgaagatcggccactacattctgggtgacacgctgggggtcggcaccttcggcaaagtgaaggttggcaaacatgaattgactgggcataaagtagctgtgaagatactcaatcgacagaagattcggagccttgatgtggtaggaaaaatccgcagagaaattcagaacctcaagcttttcaggcatcctcatataattaaactgtaccaggtcatcagtacaccatctgatattttcatggtgatggaatatgtctcaggaggagagctatttgattatatctgtaagaatggaaggctggatgaaaaagaaagtcggcgtctgttccaacagatcctttctggtgtggattattgtcacaggcatatggtggtccatagagatttgaaacctgaaaatgtcctgcttgatgcacacatgaatgcaaagatagctgattttggtctttcaaacatgatgtcagatggtgaatttttaagaacaagttgtggctcacccaactatgctgcaccagaagtaatttcaggaagagactgcaatattataagaattttaacctctcaatttactaactaccagcattgagaacatgaagatatttgtacagtgtcgctttttgaatagtttggaaaacaggagaatttaatatttttaagaataactctttgtccttcactatactactgaaattgaaaacagaagctgaagtttgctagatttataatgaacttttaataacttttcacccaaaccatgcttatttgtgtgaatgttttgcatcttgattaactcaatgcagaaatactgtagtattttctatttttataagcttgttggcctagactgctcaaagaaatgagatttgtgtaaaaatatggctgtgagtaaggcaggagtacctaattttagatttgtcaagtttcatcttttttttaaatattaacttaatgtcaaaaattatttaaaaaatttttaaaaaaatggtgttgtctatcttaattcttttaggaataaaacaattcaggacatggagactgtggaaagttgttatttaaataaataaaaagaaatgttataactgtganan

SEQ ID NO: 375456 - DNA, 440 bp, Homo sapiens
gcagactcagttcctggagaaagatggcgacagccgagaagcagaaacacgacgggcgggtgaagatcggccactacattctgggtgacacgctgggggtcggcaccttcggcaaagtgaaggttggcaaacatgaattgactgggcataaagtagctgtgaagatactcaatcgacagaagattcggagccttgatgtggtaggaaaaatccgcagagaaattcagaacctcaagcttttcaggcatcctcatataattaaactggttttgaaaagtttcttcctaggctgtgtgcggtggctcacacctgtaattccagtactttgggaggctgaggcaggcggatcacctgaggtcaggagttcgagaccagcctggccaacatggtgaaaccctgtctccagtaaaaatacaaaaattagctgggcatggtggtgg

SEQ ID NO: 375457 - DNA, 2091 bp, Homo sapiens
gcagactcagttcctggagaaagatggcgacagccgagaagcagaaacacgacgggcgggtgaagatcggccactacattctgggtgacacgctgggggtcggcaccttcggcaaagtgaaggttggcaaacatgaattgactgggcataaagtagctgtgaagatactcaatcgacagaagattcggagccttgatgtggtaggaaaaatccgcagagaaattcagaacctcaagcttttcaggcatcctcatataattaaactgtaccaggtcatcagtacaccatctgatattttcatggtgatggaatatgtctcaggaggagagctatttgattatatctgtaagaatggaaggctggatgaaaaagaaagtcggcgtctgttccaacagatcctttctggtgtggattattgtcacaggcatatggtggtccatagagatttgaaacctgaaaatgtcctgcttgatgcacacatgaatgcaaagatagctgattttggtctttcaaacatgatgtcagatggtgaatttttaagaacaagttgtggctcacccaactatgctgcaccagaagtaatttcaggaagattgtatgcaggcccagaggtagatatatggagcagtggggttattctctatgctttattatgtggaacccttccatttgatgatgaccatgtgccaactctttttaagaagatatgtgatgggatcttctatacccctcaatatttaaatccttctgtgattagccttttgaaacatatgctgcaggtggatcccatgaagagggccacaatcaaagatatcagggaacatgaatggtttaaacaggaccttccaaaatatctctttcctgaggatccatcatatagttcaaccatgattgatgatgaagccttaaaagaagtatgtgaaaagtttgagtgctcagaagaggaagttctcagctgtctttacaacagaaatcaccaggatcctttggcagttgcctaccatctcataatagataacaggagaataatgaatgaagccaaagatttctatttggcgacaagcccacctgattcttttcttgatgatcatcacctgactcggccccatcctgaaagagtaccattcttggttgctgaaacaccaagggcacgccatacccttgatgaattaaatccacagaaatccaaacaccaaggtgtaaggaaagcaaaatggcatttaggaattagaagtcaaagtcgaccaaatgatattatggcagaagtatgtagagcaatcaaacaattggattatgaatggaaggttgtaaacccatattatttgcgtgtacgaaggaagaatcctgtgacaagcacttactccaaaatgagtctacagttataccaagtggatagtagaacttatctactggatttccgtagtattgatggtatgtacatcacacaaaacaacatagattagaccttgttactaacttggtattttacgccttgattcttttgaggcttcttgacttgttcctagtaattcaactgcaaaggaataaaaaatgtgatttcttgtgcctttgcaatattaacatttatgaatcttatttttcttgtaatcttatagcatattgtccttttaagattatcatcttgtaaaatccttaaagccaggtgtagtctgatcctaaggtgatagttttctgctgcatttgtttttttggtgtagttcattttgataagagacaatgttttatttagaaataaatattgactcttctgtaagcttttatttattattaaataagttttcagttaagaatgaagttatggcaattcttcattggccaattcaattgcattaagctacgctgttgagtgcaggtgtggtggcttatgcctgtaaacagcccagcactttgggaggctgaggtgggaggatggcttgagcccaggaatttgagaccagccttagcaacatactgagactctgtctttacaaaatattagatgaggttcacgtttgaatttttttcttctttataaactcaaagatagtacacacatagtagcagaaagacacaggtttgagccatgatatg

SEQ ID NO: 375458 - DNA, 1406 bp, Homo sapiens
  misc_feature (1366)..(1366): n is a, c, g, or t
tctggtggtgatagagatgataaaatatttattaagaaatgaagtcaggttcagtatgtgaaaagtttgagtgctcagaagaggaagttctcagctgtctttacaacagaaatcaccaggatcctttggcagttgcctaccatctcataatagataacaggagaataatgaatgaagccaaagatttctatttggcgacaagcccacctgattcttttcttgatgatcatcacctgactcggccccatcctgaaagagtaccattcttggttgctgaaacaccaagggcacgccatacccttgatgaattaaatccacagaaatccaaacaccaaggtgtaaggaaagcaaaatggcatttaggaattagaagtcaaagtcgaccaaatgatattatggcagaagtatgtagagcaatcaaacaattggattatgaatggaaggttgtaaacccatattatttgcgtgtacgaaggaagaatcctgtgacaagcacttactccaaaatgagtctacagttataccaagtggatagtagaacttatctactggatttccgtagtattgatgatgaaattacagaagccaaatcagggactgctactccacagagatcgggatcagttagcaactatcgatcttgccaaaggagtgattcagatgctgaggctcaaggaaaatcctcagaagtttctcttacctcatctgtgacctcacttgactcttctcctgttgacctaactccaagacctggaagtcacacaatagaattttttgagatgtgtgcaaatctaattaaaattcttgcacaataaacagaaaactttgcttatttcttttgcagcaataagcatgcataataagtcacagccaaatgcttccatttgtaatcaagttatacataattataaccgagggctggcgttttggaatgcaatttgcacagggattggaacatgatttatagttaaaagcctaatatgcagaaatgaattaagatcattttgttgttcattgtgcagtatgtatatagcataatatacacagtgaattataggtctcaggcttacttgatttttggctattttatatttagtgtacacagggctttgaaatattaatttacataaaggccttcatatattattacgtgttatatattacgtgttataaatttattcaataaatatttgcctagaattcccaagacctttataggtgattttgttttctgggctccttaacttcataaatagctagtatcttccagcagtagtaacagtctggataacttcttccatatccctccctctttgtttttttgagacagagcgagactctggctcataaaataataataataatnaataaataaaaaataaatgtttcaggtaaacccaaaaaaa

SEQ ID NO: 375459 - DNA, 875 bp, Homo sapiens
gcagactcagttcctggagaaagatggcgacagccgagaagcagaaacacgacgggcgggtgaagatcggccactacattctgggtgacacgctgggggtcggcaccttcggcaaagtgaaggttggcaaacatgaattgactgggcataaagtagctgtgaagatactcaatcgacagaagattcggagccttgatgtggtaggaaaaatccgcagagaaattcagaacctcaagcttttcaggcatcctcatataattaaactgtaccaggtcatcagtacaccatctgatattttcatggtgatggaatatgtctcaggaggagagctatttgattatatctgtaagaatggaaggctggatgaaaaagaaagtcggcgtctgttccaacagatcctttctggtgtggattattgtcacaggcatatggtggtccatagagatttgaaacctgaaaatgtcctgcttgatgcacacatgaatgcaaagatagctgattttggtctttcaaacatgatgtcagatggtgaatttttaagaacaagttgtggctcacccaactatgctgcaccagaagtaatttcaggaagattgtatgcaggcccagaggtagatatatggagcagtggggttattctctatgctttattatgtggaacccttccatttgatgatgaccatgtgccaactctttttaagaagatatgtgatgggatcttctatacccctcaatatttaaatccttctgtgattagccttttgaaacatatgctgcaggtggatcccatgaagagggccacaatcaaagatatcaggtaataaagcagtttggaagttatcagatctgatagtatccatgataaaagttatgtg

SEQ ID NO: 375460 - DNA, 2478 bp, Homo sapiens
ggcggtgtaaggctgggtgggggaggaaggaggtggaggacgagtaggaggggggaggaggagtggggaagtgcaaggcggctgcgcagacagcgctcctcacacagagcagcccctgacccgggcgaatgcgggcttgtgccgccgccgccgccgccgccgcccgggccaagtgacaaaggaaggaaggaagcgaggaggagccggccccgcagccgctgacagggctctgggctggggcaaagcgcggacacttcctgagcgggcaccgagcagagccgaggggcgggagggcggccgagctgttgccgcggacgggggagggggccccgagggacggaagcggttgccgggttcccatgtccccggcgaatggggaacagtcgaggagccgctgcctggggtctgaagggagctgcctccgccaccgccatggccgctggatccagccgccgcctgcagctgctcctggcgcaatgaggagaggagccgccgccaccgccaccgcccgcctctgactgactcgcgactccgccgccctctagttcgccgggcccctgccgtcagcccgccggatcccgcggcttgccggagctgcagcgtttcccgtcgcatctccgagccaccccctccctccctctccctccctcctacccatccccctttctcttcaagcgtgagactcgtgatccttccgccgcttcccttcttcattgactcggaaaaaaaatccccgaggaaaatataatattcgaagtactcattttcaatcaagtatttgcccccgtttcacgtgatacatatttttttaggatttgccctctcttttctctcctcccaggaaagggaggggaaagaattgtattttttcccaagtcctaaatcatctatatgttaaatatccgtgccgatctgtcttgaaggagaaatatatcgcttgttttgttttttatagtatacaaaaggagtgaaaagccaagaggacgaagtctttttctttttcttctgtgggagaacttaatgctgcatttatcgttaacctaacaccccaacataaagacaaaaggaagaaaaggaggaaggaaggaaaaggtgattcgcgaagagagtgatcatgtcagggcggcccagaaccacctcctttgcggagagctgcaagccggtgcagcagccttcagcttttggcagcatgaaagttagcagagacaaggacggcagcaaggtgacaacagtggtggcaactcctgggcagggtccagacaggccacaagaagtcagctatacagacactaaagtgattggaaatggatcatttggtgtggtatatcaagccaaactttgtgattcaggagaactggtcgccatcaagaaagtattgcaggacaagagatttaagaatcgagagctccagatcatgagaaagctagatcactgtaacatagtccgattgcgttatttcttctactccagtggtgagaagaaagatgaggtctatcttaatctggtgctggactatgttccggaaacagtatacagagttgccagacactatagtcgagccaaacagacgctccctgtgatttatgtcaagttgtatatgtatcagctgttccgaagtttagcctatatccattcctttggaatctgccatcgggatattaaaccgcagaacctcttgttggatcctgatactgctgtattaaaactctgtgactttggaagtgcaaagcagctggtccgaggagaacccaatgtttcgtatatctgttctcggtactatagggcaccagagttgatctttggagccactgattatacctctagtatagatgtatggtctgctggctgtgtgttggctgagctgttactaggacaaccaatatttccaggggatagtggtgtggatcagttggtagaaataatcaaggtcctgggaactccaacaagggagcaaatcagagaaatgaacccaaactacacagaatttaaattccctcaaattaaggcacatccttggactaaggtcttccgaccccgaactccaccggaggcaattgcactgtgtagccgtctgctggagtatacaccaactgcccgactaacaccactggaagcttgtgcacattcattttttgatgaattacgggacccaaatgtcaaactaccaaatgggcgagacacacctgcactcttcaacttcaccactcaagaactgtcaagtaatccacctctggctaccatccttattcctcctcatgctcggattcaagcagctgcttcaacccccacaaatgccacagcagcgtcagatgctaatactggagaccgtggacagaccaataatgctgcttctgcatcagcttccaactccacctgaacagtcccgagcagccagctgcacaggaaaaaccaccagttacttgagtgtcactcagcaacactggtcacgtttggaaagaatattaaaaagagaaaaaa

SEQ ID NO: 375461 - DNA, 1436 bp, Homo sapiens
  misc_feature (13)..(13): n is a, c, g, or t
  misc_feature (18)..(18): n is a, c, g, or t
  misc_feature (24)..(24): n is a, c, g, or t
gctcgtcagtctngtgcncggtgngaagaaaaggaggaaggaaggaaaaggtgattcgcgaagagagtgatcatgtcagggcggcccagaaccacctcctttgcggagagctgcaagccggtgcagcagccttcagcttttggcagcatgaaagttagcagagacaaggacggcagcaaggtgacaacagtggtggcaactcctgggcagggtccagacaggccacaagaagtcagctatacagacactaaagtgattggaaatggatcatttggtgtggtatatcaagccaaactttgtgattcaggagaactggtcgccatcaagaaagtattgcaggacaagagatttaagaatcgagagctccagatcatgagaaagctagatcactgtaacatagtccgattgcgttatttcttctactccagtggtgagaagaaagatgaggtctatcttaatctggtgctggactatgttccggaaacagtatacagagttgccagacactatagtcgagccaaacagacgctccctgtgatttatgtcaagttgtatatgtatcagctgttccgaagtttagcctatatccattcctttggaatctgccatcgggatattaaaccgcagaacctcttgttggatcctgatactgctgtattaaaactctgtgactttggaagtgcaaagcagctggtccgaggagaacccaatgtttcgtatatctgttctcggtactatagggcaccagagttgatctttggagccactgattatacctctagtatagatgtatggtctgctggctgtgtgttggctgagctgttactaggacaaccaatatttccaggggatagtggtgtggatcagttggtagaaataatcaaggtcctgggaactccaacaagggagcaaatcagagaaatgaacccaaactacacagaatttaaattccctcaaattaaggcacatccttggactaaggtcttccgaccccgaactccaccggaggcaattgcactgtgtagccgtctgctggagtatacaccaactgcccgactaacaccactggaagcttgtgcacattcattttttgatgaattacgggacccaaatgtcaaactaccaaatgggcgagacacacctgcactcttcaacttcaccactcaagaactgtcaagtaatccacctctggctaccatccttattcctcctcatgctcggattcaagcagctgcttcaacccccacaaatgccacagcagcgtcagatgctaatactggagaccgtggacagaccaataatgctgcttctgcatcagcttccaactccacctgaacagtcccgagcagccagctgcacaggaaaaaccaccagttacttgagtgtcactcagcaacactggtcacgtttggaaagaatattaaaaagagaaaaaa

SEQ ID NO: 375462 - DNA, 2565 bp, Homo sapiens
ggcggtgtaaggctgggtgggggaggaaggaggtggaggacgagtaggaggggggaggaggagtggggaagtgcaaggcggctgcgcagacagcgctcctcacacagagcagcccctgacccgggcgaatgcgggcttgtgccgccgccgccgccgccgccgcccgggccaagtgacaaaggaaggaaggaagcgaggaggagccggccccgcagccgctgacagggctctgggctggggcaaagcgcggacacttcctgagcgggcaccgagcagagccgaggggcgggagggcggccgagctgttgccgcggacgggggagggggccccgagggacggaagcggttgccgggttcccatgtccccggcgaatggggaacagtcgaggagccgctgcctggggtctgaagggagctgcctccgccaccgccatggccgctggatccagccgccgcctgcagctgctcctggcgcaatgaggagaggagccgccgccaccgccaccgcccgcctctgactgactcgcgactccgccgccctctagttcgccgggcccctgccgtcagcccgccggatcccgcggcttgccggagctgcagcgtttcccgtcgcatctccgagccaccccctccctccctctccctccctcctacccatccccctttctcttcaagcgtgagactcgtgatccttccgccgcttcccttcttcattgactcggaaaaaaaatccccgaggaaaatataatattcgaagtactcattttcaatcaagtatttgcccccgtttcacgtgatacatatttttttaggatttgccctctcttttctctcctcccaggaaagggaggggaaagaattgtattttttcccaagtcctaaatcatctatatgttaaatatccgtgccgatctgtcttgaaggagaaatatatcgcttgttttgttttttatagtatacaaaaggagtgaaaagccaagaggacgaagtctttttctttttcttctgtgggagaacttaatgctgcatttatcgttaacctaacaccccaacataaagacaaaaggaagaaaaggaggaaggaaggaaaaggtgattcgcgaagagagtgatcatgtcagggcggcccagaaccacctcctttgcggagagctgcaagccggtgcagcagccttcagcttttggcagcatgaaagttagcagagacaaggacggcagcaaggtgacaacagtggtggcaactcctgggcagggtccagacaggccacaagaagtcagctatacagacactaaagtgattggaaatggatcatttggtgtggtatatcaagccaaactttgtgattcaggagaactggtcgccatcaagaaagtattgcaggacaagagatttaagaatcgagagctccagatcatgagaaagctagatcactgtaacatagtccgattgcgttatttcttctactccagtggtgagaagaaagatgaggtctatcttaatctggtgctggactatgttccggaaacagtatacagagttgccagacactatagtcgagccaaacagacgctccctgtgatttatgtcaagttgtatatgtatcagctgttccgaagtttagcctatatccattcctttggaatctgccatcgggatattaaaccgcagaacctcttgttggatcctgatactgctgtattaaaactctgtgactttggaagtgcaaagcagctggtccgaggagaacccaatgtttcgtatatctgttctcggtactatagggcaccagagttgatctttggagccactgattatacctctagtatagatgtatggtctgctggctgtgtgttggctgagctgttactaggacaaccaatatttccaggggatagtggtgtggatcagttggtagaaataatcaaggtcctgggaactccaacaagggagcaaatcagagaaatgaacccaaactacacagaatttaaattccctcaaattaaggcacatccttggactaaggtcttccgaccccgaactccaccggaggcaattgcactgtgtagccgtctgctggagtatacaccaactgcccgactaacaccactggaagcttgtgcacattcattttttgatgaattacgggacccaaatgtcaaactaccaaatgggcgagacacacctgcactcttcaacttcaccactcaagaactgtcaagtaatccacctctggctaccatccttattcctcctcatgctcggattcaagcagctgcttcaacccccacaaatgccacagcagcgtcagatgctaatactggagaccgtggacagaccaataatgctgcttctgcatcagcttccaactccacctgaacagtcccgagcagccagctgcacaggaaaaaccaccagttacttgagtgtcactcagcaacactggtcacgtttggaaagaatattaaaaagagaaaaaaatcctgttcattttagtgttcaatttttttattattattgttgttcttatttaaccttgtaaaatatctataaatacaaaccaaaaa

SEQ ID NO: 375463 - DNA, 2379 bp, Homo sapiens
ggcggtgtaaggctgggtgggggaggaaggaggtggaggacgagtaggaggggggaggaggagtggggaagtgcaaggcggctgcgcagacagcgctcctcacacagagcagcccctgacccgggcgaatgcgggcttgtgccgccgccgccgccgccgccgcccgggccaagtgacaaaggaaggaaggaagcgaggaggagccggccccgcagccgctgacagggctctgggctggggcaaagcgcggacacttcctgagcgggcaccgagcagagccgaggggcgggagggcggccgagctgttgccgcggacgggggagggggccccgagggacggaagcggttgccgggttcccatgtccccggcgaatggggaacagtcgaggagccgctgcctggggtctgaagggagctgcctccgccaccgccatggccgctggatccagccgccgcctgcagctgctcctggcgcaatgaggagaggagccgccgccaccgccaccgcccgcctctgactgactcgcgactccgccgccctctagttcgccgggcccctgccgtcagcccgccggatcccgcggcttgccggagctgcagcgtttcccgtcgcatctccgagccaccccctccctccctctccctccctcctacccatccccctttctcttcaagcgtgagactcgtgatccttccgccgcttcccttcttcattgactcggaaaaaaaatccccgaggaaaatataatattcgaagtactcattttcaatcaagtatttgcccccgtttcacgtgatacatatttttttaggatttgccctctcttttctctcctcccaggaaagggaggggaaagaattgtattttttcccaagtcctaaatcatctatatgttaaatatccgtgccgatctgtcttgaaggagaaatatatcgcttgttttgttttttatagtatacaaaaggagtgaaaagccaagaggacgaagtctttttctttttcttctgtgggagaacttaatgctgcatttatcgttaacctaacaccccaacataaagacaaaaggaagaaaaggaggaaggaaggaaaaggtgattcgcgaagagagtgatcatgtcagggcggcccagaaccacctcctttgcggagagctgcaagccggtgcagcagccttcagcttttggcagcatgaaagttagcagagacaaggacggcagcaaggtgacaacagtggtggcaactcctgggcagggtccagacaggccacaagaagtcagctatacagacactaaagtgattggaaatggatcatttggtgtggtatatcaagccaaactttgtgattcaggagaactggtcgccatcaagaaagtattgcaggacaagagatttaagaatcgagagctccagatcatgagaaagctagatcactgtaacatagtccgattgcgttatttcttctactccagtggtgagaagaaagatgaggtctatcttaatctggtgctggactatgttccggaaacagtatacagagttgccagacactatagtcgagccaaacagacgctccctgtgatttatgtcaagttgtatatgtatcagctgttccgaagtttagcctatatccattcctttggaatctgccatcgggatattaaaccgcagaacctcttgttggatcctgatactgctgtattaaaactctgtgactttggaagtgcaaagcagctggtccgaggagaacccaatgtttcgtatatctgttctcggtactatagggcaccagagttgatctttggagccactgattatacctctagtatagatgtatggtctgctggctgtgtgttggctgagctgttactaggacaaccaatatttccaggggatagtggtgtggatcagttggtagaaataatcaaggtcctgggaactccaacaagggagcaaatcagagaaatgaacccaaactacacagaatttaaattccctcaaattaaggcacatccttggactaaggtcttccgaccccgaactccaccggaggcaattgcactgtgtagccgtctgctggagtatacaccaactgcccgactaacaccactggaagcttgtgcacattcattttttgatgaattacgggacccaaatgtcaaactaccaaatgggcgagacacacctgcactcttcaacttcaccactcaagatgctaatactggagaccgtggacagaccaataatgctgcttctgcatcagcttccaactccacctgaacagtcccgagcagccagctgcacaggaaaaaccaccagttacttgagtgtcactcagcaacactggtcacgtttggaaagaatattaaaaagagaaaaaa

SEQ ID NO: 375464 - DNA, 2646 bp, Homo sapiens
ggcggtgtaaggctgggtgggggaggaaggaggtggaggacgagtaggaggggggaggaggagtggggaagtgcaaggcggctgcgcagacagcgctcctcacacagagcagcccctgacccgggcgaatgcgggcttgtgccgccgccgccgccgccgccgcccgggccaagtgacaaaggaaggaaggaagcgaggaggagccggccccgcagccgctgacagggctctgggctggggcaaagcgcggacacttcctgagcgggcaccgagcagagccgaggggcgggagggcggccgagctgttgccgcggacgggggagggggccccgagggacggaagcggttgccgggttcccatgtccccggcgaatggggaacagtcgaggagccgctgcctggggtctgaagggagctgcctccgccaccgccatggccgctggatccagccgccgcctgcagctgctcctggcgcaatgaggagaggagccgccgccaccgccaccgcccgcctctgactgactcgcgactccgccgccctctagttcgccgggcccctgccgtcagcccgccggatcccgcggcttgccggagctgcagcgtttcccgtcgcatctccgagccaccccctccctccctctccctccctcctacccatccccctttctcttcaagcgtgagactcgtgatccttccgccgcttcccttcttcattgactcggaaaaaaaatccccgaggaaaatataatattcgaagtactcattttcaatcaagtatttgcccccgtttcacgtgatacatatttttttaggatttgccctctcttttctctcctcccaggaaagggaggggaaagaattgtattttttcccaagtcctaaatcatctatatgttaaatatccgtgccgatctgtcttgaaggagaaatatatcgcttgttttgttttttatagtatacaaaaggagtgaaaagccaagaggacgaagtctttttctttttcttctgtgggagaacttaatgctgcatttatcgttaacctaacaccccaacataaagacaaaaggaagaaaaggaggaaggaaggaaaaggtgattcgcgaagagagtgatcatgtcagggcggcccagaaccacctcctttgcggagagctgcaagccggtgcagcagccttcagcttttggcagcatgaaagttagcagagacaaggacggcagcaaggtgacaacagtggtggcaactcctgggcagggtccagacaggccacaagaagtcagctatacagacactaaagtgattggaaatggatcatttggtgtggtatatcaagccaaactttgtgattcaggagaactggtcgccatcaagaaagtattgcaggacaagagatttaagaatcgagagctccagatcatgagaaagctagatcactgtaacatagtccgattgcgttatttcttctactccagtggtgagaagaaagatgaggtctatcttaatctggtgctggactatgttccggaaacagtatacagagttgccagacactatagtcgagccaaacagacgctccctgtgatttatgtcaagttgtatatgtatcagctgttccgaagtttagcctatatccattcctttggaatctgccatcgggatattaaaccgcagaacctcttgttggatcctgatactgctgtattaaaactctgtgactttggaagtgcaaagcagctggtccgaggagaacccaatgtttcgtatatctgttctcggtactatagggcaccagagttgatctttggagccactgattatacctctagtatagatgtatggtctgctggctgtgtgttggctgagctgttactaggacaaccaatatttccaggggatagtggtgtggatcagttggtagaaataatcaaggtcctgggaactccaacaagggagcaaatcagagaaatgaacccaaactacacagaatttaaattccctcaaattaaggcacatccttggactaaggattcgtcaggaacaggacatttcacctcaggagtgcgggtcttccgaccccgaactccaccggaggcaattgcactgtgtagccgtctgctggagtatacaccaactgcccgactaacagtggtgtagtcgggcagttggtgtatactccagcagaggtgaccactggaagcttgtgcacattcattttttgatgaattacgggacccaaatgtcaaactaccaaatgggcgagacacacctgcactcttcaacttcaccactcaagaactgtcaagtaatccacctctggctaccatccttattcctcctcatgctcggattcaagcagctgcttcaacccccacaaatgccacagcagcgtcagatgctaatactggagaccgtggacagaccaataatgctgcttctgcatcagcttccaactccacctgaacagtcccgagcagccagctgcacaggaaaaaccaccagttacttgagtgtcactcagcaacactggtcacgtttggaaagaatattaaaaagagaaaaaaatcctgttcattttagtgttcaatttttttattattattgttgttcttatttaaccttgtaaaatatctataaatacaaaccaaaaa

SEQ ID NO: 375465 - DNA, 1313 bp, Homo sapiens
ggacagctgtataatctttggctatactgaactaagtgaagaaaaaatactctcagatgtgattattgcaatagatagtttttctagataaagatatctgatttttacttgaatatttttgagtatggtaatcttttttatgacccaaatttaacattattgttatcatagaagtctgtctatggtaatacagcatggaatctgtagtcagctacagataaaaggctttcacaaagtttgtttgcctttgtctgttttgtgctactataacagaataccaaagactggataatatataaacaatagaaatttacttggttcactgttctagagactggaaagtccaatgtcaaagggcccacatctggtgatggccttcgtgctgtatcatctcatattggaaggcagaaagtcaagacaaggcaagagtgagagggagccaaacttacatttctaaccagcctgctcttgaaataacaatcctgcttccactttaatgacatgagtccattcacaagggcagagccattacctaattaccatttaaacatcccacctctcaacactgttgaattgggtattaagtttccaacacatgagctttgggggacatactcaaatcatggcactgctctatttaatgagttacgtattttatttaacttgggaattccttttttcagtgaatccaatgcctgaaaacatggagactaaatttgtaaatatataggaaaagatggcaataacttgctttctttctaggtcctgggaactccaacaagggagcaaatcagagaaatgaacccaaactacacagaatttaaattccctcaaattaaggcacatccttggactaaggtcttccgaccccgaactccaccggaggcaattgcactgtgtagccgtctgctggagtatacaccaactgcccgactaacaccactggaagcttgtgcacattcattttttgatgaattacgggacccaaatgtcaaactaccaaatgggcgagacacacctgcactcttcaacttcaccactcaagaactgtcaagtaatccacctctggctaccatccttattcctcctcatgctcggattcaagcagctgcttcaacccccacaaatgccacagcagcgtcagatgctaatactggagaccgtggacagaccaataatgctgcttctgcatcagcttccaactccacctgaacagtcccgagcagccagctgcacaggaaaaaccaccagttacttgagtgtcactcagcaacactggtcacgtttggaaagaatattaaaaagagaaaaaa

SEQ ID NO: 375466 - DNA, 637 bp, Homo sapiens
taacaggatttttttctctttttaatattctttccaaacgtgaccagtgttgctgagtgacactcaagtaactggtggtttttcctgtgcagctggctgatcaggactgttcaggtggagttggaagctgatgcagaagcagcattattggtctgtccacggtctccagtattagcatctgacgctgctgtggcatttgtgggggttgaagcagctgcttgaatccgagcatgaggaggaataaggatggtagccagaggtggattacttgacagttcttgagtggtgaagttgatgaattacgggacccaaatgtcaaactaccaaatgggcgagacacacctgcactcttcaacttcaccactcaagaactgtcaagtaatccacctctggctaccatccttattcctcctcatgctcggattcaagcagctgcttcaacccccacaaatgccacagcagcgtcagatgctaatactggagaccgtggacagaccaataatgctgcttctgcatcagcttccaactccacctgaacagtcccgagcagccagctgcacaggaaaaaccaccagttacttgagtgtcactcagcaacactggtcacgtttggaaagaatattaaaaagagaaaaaa

SEQ ID NO: 375467 - DNA, 460 bp, Homo sapiens
agatttttctctgagcatttctcatataatctttaattagcaattcacccctgtgaatccatatgcatttaactctttccattctagaaggtcctttcccaaatgcaaccatgtttctgtacatggtgggaattaagtcattattcacagggtatttgcttagattcttaaaataaaacattaattgttctttccctttttttgtactgcaggtcttccgaccccgaactccaccggaggcaattgcactgtgtagccgtctgctggagtatacaccaactgcccgactaacaccactggaagcttgtgcacattcattttttgatgaattacgggacccaaatgtcaaactaccaaatgggcgagacacacctgcactcttcaacttcaccactcaaggtaactccaaacacttagcctcttcaccagttctaggaaagctacaccctgggtgtgaaat

SEQ ID NO: 375468 - DNA, 869 bp, Homo sapiens
aactttttttggttttgtatttttttaataaacgcactggcattggaacataataaactaaaattaaaatgtttctttactgtgcctcaccattgcacaatcaaaaaaaatttttttgcatacactgtggtgaaataatttttaaaacttggacttgctactgtgaagactgatgtttaaagtttataactgtataaacattttctatgtccccccccacaccatggatttcttataacattggatatatttttccttgctggactattctcttttggattgacttcccctgtttggattatttcactgcattatcatctttaggattcgtcaggaacaggacatttcacctcaggagtgcgggtatgtacttaatttttttttcccaaaatttcagggcaggtctataaaacttgggggaaatcttctttgagaggctaaataattactcattcttgaaatgtaatagtaaacaatgtaagtagctgtgatttctgtttttattcactgtatggcataggtttcacttatagtatatttagattgtcagcctcttgggtgattcattgacatctaggctgaagtttaggaattgtggggttttaaaattattatttctattacaagaataaatattgatgaagatccatgaaaccaaaggtctgagtgttaagcaatttcagtgagtaaggaaagaagtgacagcggaagcttctttaattaaaagacaaatttcagttcttggtggtttccttttctttagaagcaaaaataattcagatgagctagtttctagtttgccctataatttttagaagttacatgctaactcaccctgtattatggtcagaaatctgaactgtgggaga

SEQ ID NO: 375469 - DNA, 903 bp, Homo sapiens
cacgaggaatctgccatcaggatccaacaagaggttctgcggtttaatatcccgatggcagattccaaaggaatggatataggctaaacttcggaacctcttgttggatcctgatactgctgtattaaaactctgtgactttggaagtgcaaagcagctggtccgaggagaacccaatgtttcgtatatctgttctcggtactatagggcaccagagttgatctttggagccactgattatacctctagtatagatgtatggtctgctggctgtgtgttggctgagctgttactaggacaaccaatatttccaggggatagtggtgtggatcagttggtagaaataatcaaggtcctgggaactccaacaagggagcaaatcagagaaatgaacccaaactacacagaatttaaattccctcaaattaaggcacatccttggactaaggtcttccgaccccgaactccaccggaggcaattgcactgtgtagccgtctgctggagtatacaccaactgcccgactaacaccactggaagcttgtgcacattcattttttgatgaattacgggacccaaatgtcaaactaccaaatgggcgagacacacctgcactcttcaacttcaccactcaagaactgtcaagtaatccacctctggctaccatccttattcctcctcatgctcggattcaagcagctgcttcaacccccacaaatgccacagcagcgtcagatgctaatactggagaccgtggacagaccaataatgctgcttctgcatcagcttccaactccacctgaacagtcccgagcagccagctgcacaggaaaaaccaccagttacttgagtgtcactcagcaacactggtcacgtttggaaagaatattaaaaagagaaaaaa

SEQ ID NO: 375470 - DNA, 2517 bp, Homo sapiens
ggcggtgtaaggctgggtgggggaggaaggaggtggaggacgagtaggaggggggaggaggagtggggaagtgcaaggcggctgcgcagacagcgctcctcacacagagcagcccctgacccgggcgaatgcgggcttgtgccgccgccgccgccgccgccgcccgggccaagtgacaaaggaaggaaggaagcgaggaggagccggccccgcagccgctgacagggctctgggctggggcaaagcgcggacacttcctgagcgggcaccgagcagagccgaggggcgggagggcggccgagctgttgccgcggacgggggagggggccccgagggacggaagcggttgccgggttcccatgtccccggcgaatggggaacagtcgaggagccgctgcctggggtctgaagggagctgcctccgccaccgccatggccgctggatccagccgccgcctgcagctgctcctggcgcaatgaggagaggagccgccgccaccgccaccgcccgcctctgactgactcgcgactccgccgccctctagttcgccgggcccctgccgtcagcccgccggatcccgcggcttgccggagctgcagcgtttcccgtcgcatctccgagccaccccctccctccctctccctccctcctacccatccccctttctcttcaagcgtgagactcgtgatccttccgccgcttcccttcttcattgactcggaaaaaaaatccccgaggaaaatataatattcgaagtactcattttcaatcaagtatttgcccccgtttcacgtgatacatatttttttaggatttgccctctcttttctctcctcccaggaaagggaggggaaagaattgtattttttcccaagtcctaaatcatctatatgttaaatatccgtgccgatctgtcttgaaggagaaatatatcgcttgttttgttttttatagtatacaaaaggagtgaaaagccaagaggacgaagtctttttctttttcttctgtgggagaacttaatgctgcatttatcgttaacctaacaccccaacataaagacaaaaggaagaaaaggaggaaggaaggaaaaggtgattcgcgaagagagtgatcatgtcagggcggcccagaaccacctcctttgcggagagctgcaagccggtgcagcagccttcagcttttggcagcatgaaagttagcagagacaaggacggcagcaaggtgacaacagtggtggcaactcctgggcagggtccagacaggccacaagaagtcagctatacagacactaaagtgattggaaatggatcatttggtgtggtatatcaagccaaactttgtgattcaggagaactggtcgccatcaagaaagtattgcaggacaagagatttaagaatcgagagctccagatcatgagaaagctagatcactgtaacatagtccgattgcgttatttcttctactccagtggtgagaagaaagatgaggtctatcttaatctggtgctggactatgttccggaaacagtatacagagttgccagacactatagtcgagccaaacagacgctccctgtgatttatgtcaagttgtatatgtatcagctgttccgaagtttagcctatatccattcctttggaatctgccatcgggatattaaaccgcagaacctcttgttggatcctgatactgctgtattaaaactctgtgactttggaagtgcaaagcagctggtccgaggagaacccaatgtttcgtatatctgttctcggtactatagggcaccagagttgatctttggagccactgattatacctctagtatagatgtatggtctgctggctgtgtgttggctgagctgttactaggacaaccaatatttccaggggatagtggtgtggatcagttggtagaaataatcaaggtcctgggaactccaacaagggagcaaatcagagaaatgaacccaaactacacagaatttaaattccctcaaattaaggcacatccttggactaaggattcgtcaggaacaggacatttcacctcaggagtgcgggtcttccgaccccgaactccaccggaggcaattgcactgtgtagccgtctgctggagtatacaccaactgcccgactaacaccactggaagcttgtgcacattcattttttgatgaattacgggacccaaatgtcaaactaccaaatgggcgagacacacctgcactcttcaacttcaccactcaagaactgtcaagtaatccacctctggctaccatccttattcctcctcatgctcggattcaagcagctgcttcaacccccacaaatgccacagcagcgtcagatgctaatactggagaccgtggacagaccaataatgctgcttctgcatcagcttccaactccacctgaacagtcccgagcagccagctgcacaggaaaaaccaccagttacttgagtgtcactcagcaacactggtcacgtttggaaagaatattaaaaagagaaaaaa

SEQ ID NO: 375471 - DNA, 2160 bp, Homo sapiens
ggcggtgtaaggctgggtgggggaggaaggaggtggaggacgagtaggaggggggaggaggagtggggaagtgcaaggcggctgcgcagacagcgctcctcacacagagcagcccctgacccgggcgaatgcgggcttgtgccgccgccgccgccgccgccgcccgggccaagtgacaaaggaaggaaggaagcgaggaggagccggccccgcagccgctgacagggctctgggctggggcaaagcgcggacacttcctgagcgggcaccgagcagagccgaggggcgggagggcggccgagctgttgccgcggacgggggagggggccccgagggacggaagcggttgccgggttcccatgtccccggcgaatggggaacagtcgaggagccgctgcctggggtctgaagggagctgcctccgccaccgccatggccgctggatccagccgccgcctgcagctgctcctggcgcaatgaggagaggagccgccgccaccgccaccgcccgcctctgactgactcgcgactccgccgccctctagttcgccgggcccctgccgtcagcccgccggatcccgcggcttgccggagctgcagcgtttcccgtcgcatctccgagccaccccctccctccctctccctccctcctacccatccccctttctcttcaagcgtgagactcgtgatccttccgccgcttcccttcttcattgactcggaaaaaaaatccccgaggaaaatataatattcgaagtactcattttcaatcaagtatttgcccccgtttcacgtgatacatatttttttaggatttgccctctcttttctctcctcccaggaaagggaggggaaagaattgtattttttcccaagtcctaaatcatctatatgttaaatatccgtgccgatctgtcttgaaggagaaatatatcgcttgttttgttttttatagtatacaaaaggagtgaaaagccaagaggacgaagtctttttctttttcttctgtgggagaacttaatgctgcatttatcgttaacctaacaccccaacataaagacaaaaggaagaaaaggaggaaggaaggaaaaggtgattcgcgaagagagtgatcatgtcagggcggcccagaaccacctcctttgcggagagctgcaagccggtgcagcagccttcagcttttggcagcatgaaagttagcagagacaaggacggcagcaaggtgacaacagtggtggcaactcctgggcagggtccagacaggccacaagaagtcagctatacagacactaaagtgattggaaatggatcatttggtgtggtatatcaagccaaactttgtgattcaggagaactggtcgccatcaagaaagtattgcaggacaagagatttaagaatcgagagctccagatcatgagaaagctagatcactgtaacatagtccgattgcgttatttcttctactccagtggtgagaagaaagatgaggtctatcttaatctggtgctggactatgttccggaaacagtatacagagttgccagacactatagtcgagccaaacagacgctccctgtgatttatgtcaagttgtatatgtatcagctgttccgaagtttagcctatatccattcctttggaatctgccatcgggatattaaaccgcagaacctcttgttggatcctgatactgctgtattaaaactctgtgactttggaagtgcaaagcagctggtccgaggagaacccaatgtttcgtatatctgttctcggtactatagggcaccagagttgatctttggagccactgattatacctctagtatagatgtatggtctgctggctgtgtgttggctgagctgttactaggacaaccaatatttccaggggatagtggtgtggatcagttggtagaaataatcaagtactttgaaaggaaaacttaattccactaaactcatgtcaggtgattatggtcggcttgctcttcccgtgacctcagcaagatcagaaaggaaaccttagtggccacctgcagtgaacaccttttgggctgtattttttgcctgggttcattgtgtcataagatacttctctgtcgtttaagtgttcgccttcctttgcccccatggtgtcactgtcttatgggacctcaccc

SEQ ID NO: 375472 - DNA, 601 bp, Homo sapiens
  misc_feature (36)..(36): n is a, c, g, or t
  misc_feature (39)..(39): n is a, c, g, or t
ctcccgccgcgtccctcacgtgcgcgtcctttaaanatngttgcacacaggtcctgggaactccaacaagggagcaaatcagagaaatgaacccaaactacacagaatttaaattccctcaaattaaggcacatccttggactaaggtcttccgaccccgaactccaccggaggcaattgcactgtgtagccgtctgctggagtatacaccaactgcccgactaacaccactggaagcttgtgcacattcattttttgatgaattacgggacccaaatgtcaaactaccaaatgggcgagacacacctgcactcttcaacttcaccactcaagaactgtcaagtaatccacctctggctaccatccttattcctcctcatgctcggattcaagcagctgcttcaacccccacaaatgccacagcagcgtcagatgctaatactggagaccgtggacagaccaataatgctgcttctgcatcagcttccaactccacctgaacagtcccgagcagccagctgcacaggaaaaaccaccagttacttgagtgtcactcagcaacactggtcacgtttggaaagaatattaaaaagagaaaaaa

SEQ ID NO: 375473 - DNA, 1638 bp, Homo sapiens
ctcctagaccaggtgatgacgaaaggagcgtcaacttgtcgtccctcaggcccgtcagtgctgggaggggcggtggcgacgcacataccagcatcacctccgccaggccgggccccacgccggccgcggattggctccctccaagggcacgcacgcccggggactcgttggcggcgtggaggggcgccggtggccacgttggtgtcaacctccttcgtgaagctcacacctcccccgccccgggaggggtttgcccgccactgtcgctgaatgattgcatcatcgaaagcagaaaaccacttttgcatccttcggcctctggcgtgcctgccatgacgtcatagctctgcggaggtggaagttggggagctttgaggacctcatggatcccagggggaccaagagaggagctgagaagacagaggtagctgagcctcggaacaaactacctcgtccagcaccttctctgcccacagaccctgccctctactctgggccctttcctttctaccggcgcccttcggaactgggctgcttctccctggatgctcaacgccagtaccatggagatgcccgagccctgcgctactatagcccaccccccactaacggtccaggccccaactttgacctcagagacggatacccggatcgataccagccccgggacgaggaggtccaggaaaggctggaccacctgctgtgctggctcctggaacaccgaggccggttggaggggggtccaggctggctggcagaggccatagtgacgtggcgggggcacctgacaaaactgctgacgacaccgtatgagcggcaggagggctggcagctggcagcctcccggttccagggaacactatacctgagtgaagtggagacaccgaacgctcgggcccagaggcttgctcggccaccgctcctccgggagcttatgtacatgggatacaaatttgagcagtacatgtgtgcagacaaacctggaagctccccagacccctctggggaggttaacaccaacgtggccttctgctctgtgctacgcagccgcctgggaagccaccctctgctcttctcaggggaggtagactgcacagacccccaagccccatccacacagcccccaacctgctatgtggagctcaagacctccaaggagatgcacagccctggccaatggaggagtttctacagacacaagctcctgaaatggtgggctcagtcattcctcccaggggtcccgaatgttgttgctggcttccgtaacccagacggttttgtctcttccctcaagacctttcctaccatgaagatgtttgaatatgtcaggaatgaccgtgacggctggaatccctctgtgtgcatgaacttctgtgccgccttccttagctttgcccagagcacggttgtccaggatgaccccaggctcgttcatctcttctcttgggagcctggcggcccagtcaccgtgtctgtacaccaagatgcaccttacgccttcctgcccatatggtatgtggaagctatgactcaggacctcccatcaccccccaagactccctctcccaaatagtaatgctttagagggaggcagtcatatctctgtgtgcagataataaaagcatatttctaagaggt

SEQ ID NO: 375474 - DNA, 1431 bp, Homo sapiens
ctcctagaccaggtgatgacgaaaggagcgtcaacttgtcgtccctcaggcccgtcagtgctgggaggggcggtggcgacgcacataccagcatcacctccgccaggccgggccccacgccggccgcggattggctccctccaagggcacgcacgcccggggactcgttggcggcgtggaggggcgccggtggccacgttggtgtcaacctccttcgtgaagctcacacctcccccgccccgggaggggtttgcccgccactgtcgctgaatgattgcatcatcgaaagcagaaaaccacttttgcatccttcggcctctggcgtgcctgccatgacgtcatagctctgcggaggtggaagttggggagctttgaggacctcatggatcccagggggaccaagagaggagctgagaagacagaggtagctgagcctcggaacaaactacctcgtccagcaccttctctgcccacagaccctgccctctactctgggccctttcctttctaccggcgcccttcggaactgggctgcttctccctggatgctcaacgccagtaccatggagatgcccgagccctgcgctactatagcccaccccccactaacggtccaggccccaactttgacctcagagacggatacccggatcgataccagccccgggacgaggaggtccaggaaaggctggaccacctgctgtgctggctcctggaacaccgaggccggttggaggggggtccaggctggctggcagaggccatagtgacgtggcgggggcacctgacaaaactgctgacgacaccgtatgagcggcaggagggctggcagctggcagcctcccggttccagggaacactatacctgagtgaagtggagacaccgaacgctcgggcccagaggcttgctcggccaccgctcctccgggagcttatgtacatgggatacaaatttgagcagtacatgtgtgcagacaaacctggaagctccccagacccctctggggaggttaacaccaacgtggccttctgctctgtgctacgcagccgcctgggaagccaccctctgctcttctcagggctcaagacctttcctaccatgaagatgtttgaatatgtcaggaatgaccgtgacggctggaatccctctgtgtgcatgaacttctgtgccgccttccttagctttgcccagagcacggttgtccaggatgaccccaggctcgttcatctcttctcttgggagcctggcggcccagtcaccgtgtctgtacaccaagatgcaccttacgccttcctgcccatatggtatgtggaagctatgactcaggacctcccatcaccccccaagactccctctcccaaatagtaatgctttagagggaggcagtcatatctctgtgtgcagataataaaagcatatttctaagaggt

SEQ ID NO: 375475 - DNA, 569 bp, Homo sapiens
agggatgtacatgggaagcaatagaaccgggcgagtgggcaagcgcgtgggaaaacgacccgggggggtcaggaggtagactgcacagacccccaagccccatccacacagcccccaacctgctatgtggagctcaagacctccaaggagatgcacagccctggccaatggaggagtttctacagacacaagctcctgaaatggtgggctcagtcattcctcaagacctttcctaccatgaagatgtttgaatatgtcaggaatgaccgtgacggctggaatccctctgtgtgcatgaacttctgtgccgccttccttagctttgcccagagcacggttgtccaggatgaccccaggctcgttcatctcttctcttgggagcctggcggcccagtcaccgtgtctgtacaccaagatgcaccttacgccttcctgcccatatggtatgtggaagctatgactcaggacctcccatcaccccccaagactccctctcccaaatagtaatgctttagagggaggcagtcatatctctgtgtgcagataataaaagcatatttctaagaggt

SEQ ID NO: 375476 - DNA, 624 bp, Homo sapiens
ctcctagaccaggtgatgacgaaaggagcgtcaacttgtcgtccctcaggcccgtcagtgctgggaggggcggtggcgacgcacataccagcatcacctccgccaggccgggccccacgccggccgcggattggctccctccaagggcacgcacgcccggggactcgttggcggcgtggaggggcgccggtggccacgttggtgtcaacctccttcgtgaagctcacacctcccccgccccgggaggggtttgcccgccactgtcgctgaatgattgcatcatcgaaagcagaaaaccacttttgcatccttcggcctctggcgtgcctgccatgacgtcatagctctgcggaggtggaagttggggagctttgagtgtttcaacatttgtccatgttcctgtggccacatctaacccactgcttccaactgctgcagaacactctatgggtgcatcccccacactaaccttccctctctcccagtgaagggcaccctggtactaccaacaccatgccaccacaaacaaaggatgggtgtacatgttctctcacagaccagggtgagaatttctttgtgatatatacccaggaatgaaatataagctcagagtatgatatagtt

SEQ ID NO: 375477 - DNA, 1765 bp, Homo sapiens
ctcctagaccaggtgatgacgaaaggagcgtcaacttgtcgtccctcaggcccgtcagtgctgggaggggcggtggcgacgcacataccagcatcacctccgccaggccgggccccacgccggccgcggattggctccctccaagggcacgcacgcccggggactcgttggcggcgtggaggggcgccggtggccacgttggtgtcaacctccttcgtgaagctcacacctcccccgccccgggaggggtttgcccgccactgtcgctgaatgattgcatcatcgaaagcagaaaaccacttttgcatccttcggcctctggcgtgcctgccatgacgtcatagctctgcggaggtggaagttggggagctttgaggacctcatggatcccagggggaccaagagaggagctgagaagacagaggtagctgagcctcggaacaaactacctcgtccagcaccttctctgcccacagaccctgccctctactctgggccctttcctttctaccggcgcccttcggaactgggctgcttctccctggatgctcaacgccagtaccatggagatgcccgagccctgcgctactatagcccaccccccactaacggtccaggccccaactttgacctcagagacggatacccggatcgataccagccccgggacgaggaggtccaggaaaggctggaccacctgctgtgctggctcctggaacaccgaggccggttggaggggggtccaggctggctggcagaggccatagtgacgtggcgggggcacctgacaaaactgctgacgacaccgtatgagcggcaggagggctggcagctggcagcctcccggttccagggaacactatacctgagtgaagtggagacaccgaacgctcgggcccagaggcttgctcggccaccgctcctccgggagcttatgtacatgggatacaaatttgagcagtacatgtgtgcagacaaacctggaagctccccagacccctctggggaggttaacaccaacgtggccttctgctctgtgctacgcagccgcctgggaagccaccctctgctcttctcaggggaggtagactgcacagacccccaagccccatccacacagcccccaacctgctatgtggagctcaagacctccaaggagatgcacagccctggccaatggaggagtttctacaggttcaggatcggggtgggcagggcgagagcttaggcttgaaggctgggaaagggacttggggaggagggtgaaggcagaatggagggtgcacgaggggtcccactgatcccttgcttttcctgtcagacacaagctcctgaaatggtgggctcagtcattcctcccaggggtcccgaatgttgttgctggcttccgtaacccagacggttttgtctcttccctcaagacctttcctaccatgaagatgtttgaatatgtcaggaatgaccgtgacggctggaatccctctgtgtgcatgaacttctgtgccgccttccttagctttgcccagagcacggttgtccaggatgaccccaggctcgttcatctcttctcttgggagcctggcggcccagtcaccgtgtctgtacaccaagatgcaccttacgccttcctgcccatatggtatgtggaagctatgactcaggacctcccatcaccccccaagactccctctcccaaatagtaatgctttagagggaggcagtcatatctctgtgtgcagataataaaagcatatttctaagaggt

SEQ ID NO: 375478 - DNA, 1777 bp, Homo sapiens
ctcctagaccaggtgatgacgaaaggagcgtcaacttgtcgtccctcaggcccgtcagtgctgggaggggcggtggcgacgcacataccagcatcacctccgccaggccgggccccacgccggccgcggattggctccctccaagggcacgcacgcccggggactcgttggcggcgtggaggggcgccggtggccacgttggtgtcaacctccttcgtgaagctcacacctcccccgccccgggaggggtttgcccgccactgtcgctgaatgattgcatcatcgaaagcagaaaaccacttttgcatccttcggcctctggcgtgcctgccatgacgtcatagctctgcggaggtggaagttggggagctttgaggacctcatggatcccagggggaccaagagaggagctgagaagacagaggtagctgagcctcggaacaaactacctcgtccagcaccttctctgcccacagaccctgccctctactctgggccctttcctttctaccggcgcccttcggaactgggctgcttctccctggatgctcaacgccagtaccatggagatgcccgagccctgcgctactatagcccaccccccactaacggtccaggccccaactttgacctcagagacggatacccggatcgataccagccccgggacgaggaggtccaggaaaggctggaccacctgctgtgctggctcctggaacaccgaggccggttggaggggggtccaggctggctggcagaggccatagtgacgtggcgggggcacctgacaaaactgctgacgacaccgtatgagcggcaggagggctggcagctggcagcctcccggttccagggaacactatacctgagtgaagtggagacaccgaacgctcgggcccagaggcttgctcggccaccgctcctccgggagcttatgtacatgggatacaaatttgagcagtacatgtgtgcagacaaacctggaagctccccagacccctctggggaggttaacaccaacgtggccttctgctctgtgctacgcagccgcctgggaagccaccctctgctcttctcaggggaggtagactgcacagacccccaagccccatccacacagcccccaacctgctatgtggagctcaagacctccaaggagatgcacagccctggccaatggaggagtttctacagacacaagctcctgaaatggtgggctcagtcattcctcccaggggtcccgaatgttgttgctggcttccgtaacccagacggttttgtctcttccctcaagacctttcctaccatgaagatgtttgaatatgtcagggtaagggaacgatgttgcagctcccacccgtatccccaaacaccaagaccacaggtctagcatccagggcaacagcctgccttctctcctcccaccacccccactgcccatcttctgcctcctcctctgcctgctccagaatgaccgtgacggctggaatccctctgtgtgcatgaacttctgtgccgccttccttagctttgcccagagcacggttgtccaggatgaccccaggctcgttcatctcttctcttgggagcctggcggcccagtcaccgtgtctgtacaccaagatgcaccttacgccttcctgcccatatggtatgtggaagctatgactcaggacctcccatcaccccccaagactccctctcccaaatagtaatgctttagagggaggcagtcatatctctgtgtgcagataataaaagcatatttctaagaggt

SEQ ID NO: 375479 - DNA, 1990 bp, Homo sapiens
ctcctagaccaggtgatgacgaaaggagcgtcaacttgtcgtccctcaggcccgtcagtgctgggaggggcggtggcgacgcacataccagcatcacctccgccaggccgggccccacgccggccgcggattggctccctccaagggcacgcacgcccggggactcgttggcggcgtggaggggcgccggtggccacgttggtgtcaacctccttcgtgaagctcacacctcccccgccccgggaggggtttgcccgccactgtcgctgaatgattgcatcatcgaaagcagaaaaccacttttgcatccttcggcctctggcgtgcctgccatgacgtcatagctctgcggaggtggaagttggggagctttgaggacctcatggatcccagggggaccaagagaggagctgagaagacagaggtagctgagcctcggaacaaactacctcgtccagcaccttctctgcccacagaccctgccctctactctgggccctttcctttctaccggcgcccttcggaactgggctgcttctccctggatgctcaacgccagtaccatggagatgcccgagccctgcgctactatagcccaccccccactaacggtccaggccccaactttgacctcagagacggatacccggatcgataccagccccgggacgaggaggtccaggaaaggctggaccacctgctgtgctggctcctggaacaccgaggccggttggaggggggtccaggctggctggcagaggccatagtgacgtggcgggggcacctgacaaaactgctgacgacaccgtatgagcggcaggagggctggcagctggcagcctcccggttccagggaacactatacctgagtgaagtggagacaccgaacgctcgggcccagaggcttgctcggccaccgctcctccgggagcttatgtacatgggatacaaatttgagcagtacatgtgtgcaggtgagttgcccctgcttcatagcccccttccccttcccagaggttgagagcccgccacgcctgctgctgcttctctccttgtgcagacaaacctggaagctccccagacccctctggggaggttaacaccaacgtggccttctgctctgtgctacgcagccgcctgggaagccaccctctgctcttctcaggggaggtagactgcacagacccccaagccccatccacacagcccccaacctgctatgtggagctcaagacctccaaggagatgcacagccctggccaatggaggagtttctacaggttcaggatcggggtgggcagggcgagagcttaggcttgaaggctgggaaagggacttggggaggagggtgaaggcagaatggagggtgcacgaggggtcccactgatcccttgcttttcctgtcagacacaagctcctgaaatggtgggctcagtcattcctcccaggggtcccgaatgttgttgctggcttccgtaacccagacggttttgtctcttccctcaagacctttcctaccatgaagatgtttgaatatgtcagggtaagggaacgatgttgcagctcccacccgtatccccaaacaccaagaccacaggtctagcatccagggcaacagcctgccttctctcctcccaccacccccactgcccatcttctgcctcctcctctgcctgctccagaatgaccgtgacggctggaatccctctgtgtgcatgaacttctgtgccgccttccttagctttgcccagagcacggttgtccaggatgaccccaggctcgttcatctcttctcttgggagcctggcggcccagtcaccgtgtctgtacaccaagatgcaccttacgccttcctgcccatatggtatgtggaagctatgactcaggacctcccatcaccccccaagactccctctcccaaatagtaatgctttagagggaggcagtcatatctctgtgtgcagataataaaagcatatttctaagaggt

SEQ ID NO: 375480 - DNA, 1885 bp, Homo sapiens
ctcctagaccaggtgatgacgaaaggagcgtcaacttgtcgtccctcaggcccgtcagtgctgggaggggcggtggcgacgcacataccagcatcacctccgccaggccgggccccacgccggccgcggattggctccctccaagggcacgcacgcccggggactcgttggcggcgtggaggggcgccggtggccacgttggtgtcaacctccttcgtgaagctcacacctcccccgccccgggaggggtttgcccgccactgtcgctgaatgattgcatcatcgaaagcagaaaaccacttttgcatccttcggcctctggcgtgcctgccatgacgtcatagctctgcggaggtggaagttggggagctttgaggtaactggattcttgatctgagcgcagacgtccttcctaacctcactgcatttggaggacctggagggagggtgggtgaagggcaaggaaagaggcaggatgagagcttggccgcggtggcgtctgaggggcctgaatgtttcaaggccagagcctggcgatcaggtggctcgcttagtcctaaaccagtcatccttctccaggcctcctctgtagaatggaaactctgtacccctgcttgtcttaggacctcatggatcccagggggaccaagagaggagctgagaagacagaggtagctgagcctcggaacaaactacctcgtccagcaccttctctgcccacagaccctgccctctactctgggccctttcctttctaccggcgcccttcggaactgggctgcttctccctggatgctcaacgccagtaccatggagatgcccgagccctgcgctactatagcccaccccccactaacggtccaggccccaactttgacctcagagacggatacccggatcgataccagccccgggacgaggaggtccaggaaaggctggaccacctgctgtgctggctcctggaacaccgaggccggttggaggggggtccaggctggctggcagaggccatagtgacgtggcgggggcacctgacaaaactgctgacgacaccgtatgagcggcaggagggctggcagctggcagcctcccggttccagggaacactatacctgagtgaagtggagacaccgaacgctcgggcccagaggcttgctcggccaccgctcctccgggagcttatgtacatgggatacaaatttgagcagtacatgtgtgcagacaaacctggaagctccccagacccctctggggaggttaacaccaacgtggccttctgctctgtgctacgcagccgcctgggaagccaccctctgctcttctcaggggaggtagactgcacagacccccaagccccatccacacagcccccaacctgctatgtggagctcaagacctccaaggagatgcacagccctggccaatggaggagtttctacagacacaagctcctgaaatggtgggctcagtcattcctcccaggggtcccgaatgttgttgctggcttccgtaacccagacggttttgtctcttccctcaagacctttcctaccatgaagatgtttgaatatgtcaggaatgaccgtgacggctggaatccctctgtgtgcatgaacttctgtgccgccttccttagctttgcccagagcacggttgtccaggatgaccccaggctcgttcatctcttctcttgggagcctggcggcccagtcaccgtgtctgtacaccaagatgcaccttacgccttcctgcccatatggtatgtggaagctatgactcaggacctcccatcaccccccaagactccctctcccaaatagtaatgctttagagggaggcagtcatatctctgtgtgcagataataaaagcatatttctaagaggt

SEQ ID NO: 375481 - DNA, 1682 bp, Homo sapiens
ctcctagaccaggtgatgacgaaaggagcgtcaacttgtcgtccctcaggcccgtcagtgctgggaggggcggtggcgacgcacataccagcatcacctccgccaggccgggccccacgccggccgcggattggctccctccaagggcacgcacgcccggggactcgttggcggcgtggaggggcgccggtggccacgttggtgtcaacctccttcgtgaagctcacacctcccccgccccgggaggggtttgcccgccactgtcgctgaatgattgcatcatcgaaagcagaaaaccacttttgcatccttcggcctctggcgtgcctgccatgacgtcatagctctgcggaggtggaagttggggagctttgaggcctcctctgtagaatggaaactctgtacccctgcttgtcttaggacctcatggatcccagggggaccaagagaggagctgagaagacagaggtagctgagcctcggaacaaactacctcgtccagcaccttctctgcccacagaccctgccctctactctgggccctttcctttctaccggcgcccttcggaactgggctgcttctccctggatgctcaacgccagtaccatggagatgcccgagccctgcgctactatagcccaccccccactaacggtccaggccccaactttgacctcagagacggatacccggatcgataccagccccgggacgaggaggtccaggaaaggctggaccacctgctgtgctggctcctggaacaccgaggccggttggaggggggtccaggctggctggcagaggccatagtgacgtggcgggggcacctgacaaaactgctgacgacaccgtatgagcggcaggagggctggcagctggcagcctcccggttccagggaacactatacctgagtgaagtggagacaccgaacgctcgggcccagaggcttgctcggccaccgctcctccgggagcttatgtacatgggatacaaatttgagcagtacatgtgtgcagacaaacctggaagctccccagacccctctggggaggttaacaccaacgtggccttctgctctgtgctacgcagccgcctgggaagccaccctctgctcttctcaggggaggtagactgcacagacccccaagccccatccacacagcccccaacctgctatgtggagctcaagacctccaaggagatgcacagccctggccaatggaggagtttctacagacacaagctcctgaaatggtgggctcagtcattcctcccaggggtcccgaatgttgttgctggcttccgtaacccagacggttttgtctcttccctcaagacctttcctaccatgaagatgtttgaatatgtcaggaatgaccgtgacggctggaatccctctgtgtgcatgaacttctgtgccgccttccttagctttgcccagagcacggttgtccaggatgaccccaggctcgttcatctcttctcttgggagcctggcggcccagtcaccgtgtctgtacaccaagatgcaccttacgccttcctgcccatatggtatgtggaagctatgactcaggacctcccatcaccccccaagactccctctcccaaatagtaatgctttagagggaggcagtcatatctctgtgtgcagataataaaagcatatttctaagaggt

SEQ ID NO: 375482 - DNA, 1904 bp, Homo sapiens
ctcctagaccaggtgatgacgaaaggagcgtcaacttgtcgtccctcaggcccgtcagtgctgggaggggcggtggcgacgcacataccagcatcacctccgccaggccgggccccacgccggccgcggattggctccctccaagggcacgcacgcccggggactcgttggcggcgtggaggggcgccggtggccacgttggtgtcaacctccttcgtgaagctcacacctcccccgccccgggaggggtttgcccgccactgtcgctgaatgattgcatcatcgaaagcagaaaaccacttttgcatccttcggcctctggcgtgcctgccatgacgtcatagctctgcggaggtggaagttggggagctttgaggacctcatggatcccagggggaccaagagaggagctgagaagacagaggtagctgagcctcggaacaaactacctcgtccagcaccttctctgcccacagaccctgccctctactctgggccctttcctttctaccggcgcccttcggaactgggctgcttctccctggatgctcaacgccagtaccatggagatgcccgagccctgcgctactatagcccaccccccactaacggtccaggccccaactttgacctcagagacggatacccggatcgataccagccccgggacgaggaggtccaggaaaggctggaccacctgctgtgctggctcctggaacaccgaggccggttggaggggggtccaggctggctggcagaggccatagtgacgtggcgggggcacctgacaaaactgctgacgacaccgtatgagcggcaggagggctggcagctggcagcctcccggttccagggaacactatacctgagtgaagtggagacaccgaacgctcgggcccagaggcttgctcggccaccgctcctccgggagcttatgtacatgggatacaaatttgagcagtacatgtgtgcagacaaacctggaagctccccagacccctctggggaggttaacaccaacgtggccttctgctctgtgctacgcagccgcctgggaagccaccctctgctcttctcaggggaggtagactgcacagacccccaagccccatccacacagcccccaacctgctatgtggagctcaagacctccaaggagatgcacagccctggccaatggaggagtttctacaggttcaggatcggggtgggcagggcgagagcttaggcttgaaggctgggaaagggacttggggaggagggtgaaggcagaatggagggtgcacgaggggtcccactgatcccttgcttttcctgtcagacacaagctcctgaaatggtgggctcagtcattcctcccaggggtcccgaatgttgttgctggcttccgtaacccagacggttttgtctcttccctcaagacctttcctaccatgaagatgtttgaatatgtcagggtaagggaacgatgttgcagctcccacccgtatccccaaacaccaagaccacaggtctagcatccagggcaacagcctgccttctctcctcccaccacccccactgcccatcttctgcctcctcctctgcctgctccagaatgaccgtgacggctggaatccctctgtgtgcatgaacttctgtgccgccttccttagctttgcccagagcacggttgtccaggatgaccccaggctcgttcatctcttctcttgggagcctggcggcccagtcaccgtgtctgtacaccaagatgcaccttacgccttcctgcccatatggtatgtggaagctatgactcaggacctcccatcaccccccaagactccctctcccaaatagtaatgctttagagggaggcagtcatatctctgtgtgcagataataaaagcatatttctaagaggt

SEQ ID NO: 375483 - DNA, 2050 bp, Homo sapiens
accggggagagagctgagagcgcctgcctactaggcgcccctccacagtgccacagtcccgccctcgtcacgtgacgaatgggccatagcgagtactgtgcacctgcgcaaagccggcccttcgtcaccccgactttcatcacgtgttggggggaagggcggcgtcacggcgtttctgagcctgcgccaaccaaatcaactggctagtcaatctcttacggctccaccctacgcctacatccgggcaaccgttggggcgcacatagttcctctaggtggcggcaaaaaccgaggtgaggcggccgtggccttagcctcgtaaaaattaaaacctgtatgtttcagcgaataatgaaaacgcagtctggatgaaagaccccatgacgcttaatcaggcatccagtacactggctgtggccccgccccgccaggcactcgctccgcctcttcgcccccattggttctaagcgccgcccggcatccctgcgattggctaggccgggcccgtcgcgtccaataggcggtggcgccggctttcccgcggctgttcgctgttccagtgggtcgtggcggtggcggcagcggcggttaggggatgtaacggtcgcccgcctccggcgtgacgatggcggccgtagggtccggaggctatgcgcggaacgatgcaggggagaagctgccctctgtcatggcgggagttccggcgcggaggggccagtcctccccgccccccgccccaccaatctgcctacggcggcggacgcgactctcgacggcctccgaggagacggtgcagaaccgggtgtcactcgagaaggtgcttggcatcacagcccagaacagcagtggcctaacctgtgaccccggcacaggccatgtggcctacctggcaggctgtgtggtggtgattttggaccccaaggagaacaagcagcagcacatctttaacaccgccaggaagtctctcagtgctctggccttctcccctgatgggaagtacatagtgacaggggagaatgggcataggcctgctgtgcgcatctgggatgtggaggagaagaatcaggtggcggagatgctaggccacaagtatggtgtggcgtgtgtggccttctcacccaatatgaagcacatcgtgtccatgggctaccaacatgacatggtgctcaacgtctgggactggaagaaagacatcgtagtggcctccaacaaggtatcttgtagagtcattgccctctccttctcagaggacagcagctattttgtcactgttgggaaccgccatgtgaggttctggttcttggaagtctccactgagacaaaggtgacgagcacagtgccccttgtagggcgctcgggcatcctgggcgagctgcacaacaacatcttctgtggtgtggcctgcggtcggggccggatggcgggcagtaccttctgtgtgtcctactcgggcctcctctgccagttcaatgagaagagggtgctggagaagtggatcaacctgaaggtctccctgtcttcctgcctctgtgtcagccaggagctcatcttctgtggctgcacagatgggatagtccgcatcttccaggcccatagcctgcactacctcgccaacctgcccaagccacactaccttggggtagacgtggcacagggcctggagcccagttccacaggaaggcggaagcagtctacccagatacagtggcactgaccttcgaccccatccaccagtggctgtcctgcgtgtataaggaccacagcatctacatctgggatgtcaaggacatcaacagagtgggcaaggtgtggtcagagctcttccacagctcctacgtttggaacgtggaggtgtatcctgagtttgaagaccagagagcttgtttgccatcaggatcctttctgacttgttcttcagacaacaccattcgcttctggaacttggacagcagccctgattctcactggcagaaaaacatcttcagcaataccctgctgaaggtcgtgtacgtggagaatgacatccagcacctgcaggacatgtcacact

SEQ ID NO: 375484 - DNA, 197 bp, Homo sapiens
gcacaaacagtccagtggaatgagtgctggcatgagcttctctgcacttattcttccagaaagacatcgtagtggcctccaacaaggtatcttgtagagtcattgccctctccttctcagaggacagcagctattttgtcactgttgggaaccgccatgtgaggttctggttcttggaagtctccactgagacaaag

SEQ ID NO: 375485 - DNA, 459 bp, Homo sapiens
catcttctgtggtgtggcctgcggtcggggccggatggcgggcagtaccttctgtgtgtcctactcgggcctcctctgccagttcaatgagaagagggtgctggagaagtggatcaacctgaaggtaccacctccctctctgccatcagctggacagactctttctcgtgatatgtgtctgcaggggtgctcatcagcattgaccacacaggttctgcttatgtgactagtggtgaatgacgcccactctctgagcttaaggttccacatctgtaaaatgggagtactgctgccctccccgcagagctgataaggaagtcacgtgagataacataggcaaggcagtgagcacggtgcttggtaccctgaaatgggctcaaggtgacagttgttttcccatgactatttgatctacttcacatttcttttctcctttgagcactctggctggtagaggat

SEQ ID NO: 375486 - DNA, 5552 bp, Homo sapiens
aagtgggaatttgaatcctgtgggccgttgaatgtggctgctcgcggtcggcgtgccccgacgtacagcgggccgggaaaagtggcactgaggctctggaacttctgcccagctctccttgtaaaatgaatgaaagtaaacctggtgactcacagaaccttgcttgtgttttctgtcgaaaacatgatgactgtcctaataaatacggagaaaagaaaactaaggagaaatggaatctcactgtacattactactgtttgttgatgtcaagtggaatttggcagagaggcaaagaagaagaaggagtttatggttttctaatagaagatatcaggaaggaagtgaatagagcttctaaactgaaatgctgtgtttgcaagaaaaatggtgcttcaattggatgtgttgcaccccgatgtaaacgaagttatcatttcccatgtggacttcagagagaatgtattttccagtttactggcaattttgcgtcattttgttgggaccatcgacctgttcaaataattacatctaataattatagagagtccttaccatgcaccatttgcttggaatttattgagcctattccaagttataacatattacgaagtccttgttgtaagaacgcttggtttcatagagactgtttacaggttcaagcaataaatgcgggagtgtttttctttaggtgtacaatatgcaataatagtgacatctttcagaaagagatgttgagaatgggaattcatattcctgaaaaagatgcttcctgggaattagaggaaaacgcttatcaagagcttctgcagcactatgagcgttgtgatgttcgaagatgtcgttgcaaagaagggcgagactataatgcacctgatagcaaatgggaaataaagcgctgtcagtgttgtggttccagtggcacacatttagcctgctcctcattacggtcatgggagcaaaattgggagtgtttggaatgtaggggtattatctacaattcaggagagttccaaaaagccaaaaaacatgtattacccaattctaataatgtggggattacagattgtttgttggaagagtcatcacctaaattacccagacagtcacctggatcccagagtaaagatctactgaggcaaggcagcaaatttagaagaaatgtatcaacactattaatagagttaggattccaaattaaaaaaaaaactaaaagattgtatatcaacaaagccaatatctggaatagtgccttagatgcattcagaaatcgaaactttaatccttcatatgcaattgaagtagcatatgttattgaaaatgataattttggaagtgagcatcctggatcaaagcaagaatttctgagtctcttaatgcaacatcttgagaactcatcattgtttgaagggtccttgtcaaagaacttgtctctaaattctcaagctctgaaagagaatctttactatgaagctggcaaaatgcttgccatttctttagttcacggtggtccttcacctggtttcttttctaaaaccttgtttaactgccttgtttatggaccagaaaatacccagccaattttagatgatgtttcagactttgatgtggcacagattataatcaggataaatactgcaacaactgtagctgacttaaagtcaataataaatgaatgctataactaccttgagttaattggatgtctcagacttataacgacattaagtgataaatatatgttagtaaaagacatacttggctaccatgtaattcagagagtccacacaccctttgaaagttttaagcagggtctgaaaacccttggtgttttggagaaaattcaggcttatccagaagcattttgtagcatcctgtgtcataaacctgagagtctttctgcaaaaatccttagtgagctttttacagtacacacattacctgatgtgaaagctttggggttttggaacagttacttacaggctgttgaagatggtaaatctacaacaacaatggaagacattcttatttttgcaactggttgcagttccattcctccagctggatttaaacccactccttcaattgagtgtctgcatgtggattttcctgttggaaacaagtgtaataactgtttagcaattcccatcaccaatacatataaagagtttcaagaaaatatggacttcaccataagaaacactctaagactagaaaaggaagaaagttctcattacattggacattaaaatgtttccttgaacaaagagaagcttctttaaaagctgctattgataactctcttttatttcactaaccttttcatcatcactttgaacaaactagttagcttcttgacctaataaaatttatgatatgaatataaaggaatattatagccacttaggctaaaaaaaggttttttttgttaaagcatactagtcaaaattggtgataatttctcattttcttgatatagatacttcataaacctcaatataaatactctcaaaatggttgtatggattttatttaggtatggtagcatggttaataaaagtaaaaactgttttactcacattttttgtaaattaggattacatatagaatgccacaatttctctaggtttattcaattttcaaattattcctcattttattttaaagcattaaatagaaaagctaattggttaaattttgttatataaatcagagtcatatattctgggatttgtgttactatgcatacttttctaggatgtcaccaaattagttgtttaaaatgtttttagattactgatttatattaagatgacccacactgcaattagattatgcctagtgggaagtattatataaaaagcagaattaagctgggcacatgtgcttgtaatctcagttataagggaggctgaggtgggagaatcgagatactcagccagcctggcaatgtagcaaagactccatctcaaaaaaaaaaacagaattgcacaaattttctggaatctatggacattccatgagcttaaacacttttgaggtggataacatttagttgaaaatacctaagaaagtgtgtcttctttaaagccttggctttaatcatgggaaattgttgttgttgttgttgttgtttgtatcctatgtttggtattctgtatgtctgatccataatcattttagatatttgaatgatctctgtggattggtaggtttggccatttgaccattatttattatcaagttggttgtatgctaaggtaagttgacgccatagcattatacagttatcttcattgctcttgaatgatatctgttatataagcaatgtataaataaagtaaaaaggatagaatgaaaaacccattctaatgtcaccactcagagataagtaccgtatttctgtgtatccttctataaactctttacttctgtttcctttattttttaactttaataatgctactaaaagacaatacctaaaagtaactgtactaacaaagtgctaacaatgtgaaaatatatagtcccatagtcatgtccccatatttatactcccacagaagaaaaaattggaaaacaaagtctgatgtccttaatctattaacatatttaaatgatataatggttcagttttccatgaaagtaaatcattatgggaagtaaaatgttttaaccatatttttcttaatacacaaagcaggtgtcagctgttgtattctcacccttcttaagaaaaatcattacattattgatattttttaagtaacagaatagatttgaaagagataatatatctcttaataccaaaggaaaactaaaacataattctagtgtacttttctttgttccctcatgtctttttcaatctgtacactaacatacctagcaaatttgttttactttaacttgaaatatttaagaacattaaacaagacatttctttggctttggttgaatttttttgtctcaccaatagtaattgaaagatcaattatcaaagagtttgaatagctaatataaaccccaaagtcaccatacagtttttattccaaatatgttgataaaaagatatttgtttctttatccaccttatttttattacagctaaaaaccaatacaaaccaataaaacctagttaaagctattttctggtttttagttgcaattaatttcccctagggtagaaattaaagctgattaagtcacacacacatactttgttggggtgggggtggcaggtggagaggcagtgtacttgggttagctacaattaaaaacagtatttcaattcctcatttgacttattttatatatagacagggccttagtgataagatggtgtaaataatttaggatattcatgttttaaagtgaagcataaatatttattttgcaaaatgttttctagtttgaaggatgttccattattaccatttttagattaatctgtatggtcaaggaatatcagagaaacctgtaggttatttattttctgcagtgtcattttgtcaaatggttggtattataattgttcttttcttattaattttataaccagtgcataattcttacattagattttaaaaaagaattatgctataaatctttataaatgtgtacatatatttcttaaatattgcaattgcctaaatgttgtatattttaaggctgttttctcttgctcttaatgttgaggaaaactataaattgatctataatgcatctactgttaatggttttggttagtttgatattcattgtttttaaacactttccaatatggaaactttaacaccttttatacaattctctactattcaagatattctttaaaatatctcaccagaaacttacaattttatactttgtaatttttagtttctgtaatttgaggaagtgactttttttgtttgggttaagtaaaaagcctttgattgattaccagcatgagaattcaccttggtttctattttatgcatttgtaaatttttcccctaattatatggaagctattggaacttttgtattcagtgctaaatactaagtcaaggggagtatattaggtaagttttttcagtgactgtgcctttagcattcagtcattataagaaaatgatcagaacaaaatcattacattataaacatgtaattcttttatatagtgattatcatgtactgcattgttactttaaaataagctattaaactagtttttatggttcaagtaatgcaatacaaagtttcatgcttcaagtaatgcaatacaaaacataacccatttaatgatgaattacttgaatgtatattatctgtggtttaggaaaatttggattgtcttgaagagactcagttttcaagttctgattttgaccattatctcttctaattcataaacatatcccagtacctacactatgccaggtattatgctaggtgatcgtttatatgtcagcctatttcccccccttttaaagactgccagattaaccaaaaagcgtgacatttataacaatgttttataaataaataaatgtgtttatgccactaaaggt

SEQ ID NO: 375487 - DNA, 1194 bp, Homo sapiens
aagtgggaatttgaatcctgtgggccgttgaatgtggctgctcgcggtcggcgtgccccgacgtacagcgggccgggaaaagtggcactgaggctctggaacttctgcccagctctccttgtaaaatgaatgaaagtaaacctggtgactcacagaaccttgcttgtgttttctgtcgaaaacatgatgactgtcctaataaatacggagaaaagaaaactaaggagaaatggaatctcactgtacattactactgtttgttgatgtcaagtggaatttggcagagaggcaaagaagaagaaggagtttatggttttctaatagaagatatcaggaaggaagtgaatagagcttctaaactgaaatgctgtgtttgcaagaaaaatggtgcttcaattggatgtgttgcaccccgatgtaaacgaagttatcatttcccatgtggacttcagagagaatgtattttccagtttactggcaattttgcgtcattttgttgggaccatcgacctgttcaaataattacatctaataattatagagagtccttaccatgcaccatttgcttggaatttattgagcctattccaagttataacatattacgaagtccttgttgtaagaacgcttggtttcatagagactgtttacaggttcaagcaataaatgcgggagtgtttttctttaggtgtacaatatgcaataatagtgacatctttcagaaagagatgttgagaatgggaattcatattcctgaaaaagatgcttcctgggaattagaggaaaacgcttatcaagagcttctgcagcactatgagcgttgtgatgttcgaagatgtcgttgcaaagaagggcgagactataatgcacctgatagcaaatgggaaataaagcgctgtcagtgttgtggttccagtggcacacatttagcctgctcctcattacggtcatgggagcaaaattgggagtgtttggaatgtaggggtattatctacaattcaggagagttccaaaaagccaaaaaacatgtattacccaattctaataatgtggggattacagattgtttgttggaagagtcatcacctaaattacccagacagtcacctggatcccagagtaaagatctactgaggcaaggcagcaaatttagaagaaatgtatcaacactattaatagagttaggattccaaa

SEQ ID NO: 375488 - DNA, 745 bp, Homo sapiens
aagtgggaatttgaatcctgtgggccgttgaatgtggctgctcgcggtcggcgtgccccgacgtacagcgggccgggaaaagtggcactgaggctctggaacttctgcccagctctccttgcttgtgttttctgtcgaaaacatgatgactgtcctaataaatacggagaaaagaaaactaaggagaaatggaatctcactgtacattactactgtttgttgatgtcaagtggaatttggcagagaggcaaagaagaagaaggagtttatggttttctaatagaagatatcaggaaggaagtgaatagagcttctaaactgaaatgctgtgtttgcaagaaaaatggtgcttcaattggatgtgttgcaccccgatgtaaacgaagttatcatttcccatgtggacttcagagagaatgtattttccagtttactggcaattttgcgtcattttgttgggaccatcgacctgttcaaataattacatctaataattatagagagtccttaccatgcaccatttgcttggaatttattgagcctattccaagttataacatattacgaagtccttgttgtaagaacgcttggtttcatagagactgtttacaggttcaagcaataaatgcgggagtgtttttctttaggtgtacaatatgcaataatagtgacatctttcagaaagagatgttgagaatgggaattcatattcctgaaaaaagtgagtaacatttagccttatgat

SEQ ID NO: 375489 - DNA, 794 bp, Homo sapiens
aagtgggaatttgaatcctgtgggccgttgaatgtggctgctcgcggtcggcgtgccccgacgtacagcgggccgggaaaagtggcactgaggctctggaacttctgcccagctctccttgtaaaatgaatgaaagtaaacctggtgactcacagaaccttgcttgtgttttctgtcgaaaacatgatgactgtcctaataaatacggagaaaagaaaactaaggagaaatggaatctcactgtacattactactgtttgttgatgtcaagtggaatttggcagagaggcaaagaagaagaaggagtttatggttttctaatagaagatatcaggaaggaagtgaatagagcttctaaactgtctggaaattaaggaggatggaaaaataagcagctttattcaagaaggtctacaagggaagcacataagaaacatttattcttttagttgaggcaaagaagtggaggcaattatttttgaagatatcaagaaggtaggagagttaatggtaaaaacagaggttctagggcacaaggaagaaccgtgggagaaaggtgagcatgaatctaaggactacgtgagatgttaaacgtgagatattagtatcataattcctaaacttcctggtgatagtgagcttgtggtaaaaggtggtctctaaaggtccccttatggtttggaactacagattgaatatcccttatccaaaatgcttggaaccagaattttagatttgaaatttttttcagatttaggaatatttgcttaccagttgagcacctctaatctgaa

SEQ ID NO: 375490 - DNA, 701 bp, Homo sapiens
agcactaagcacatctacaatcaaggagaggggcaggctttaccttttgaaggaagaagtatgaaagtgtatcactgactgatcaagtagagctaaaaaacattcccttcaatttaaaaaatgttcccgactcttaacaccccagttgagaactactgatcttagatgtattaaagtaaaatgaatgaaagtaaacctggtgactcacagaaccttgcttgtgttttctgtcgaaaacatgatgactgtcctaataaatacggagaaaagaaaactaaggagaaatggaatctcactgtacattactactgtttgttgatgtcaagtggaatttggcagagaggcaaagaagaagaaggagtttatggttttctaatagaagatatcaggaaggaagtgaatagagcttctaaactgtctggaaattaaggaggatggaaaaataagcagctttattcaagaaggtctacaagggaagcacataagaaacatttattcttttagttgaggcaaagaagtggaggcaattatttttgaagatatcaagaaggtaggagagttaatggtaaaaacagaggttctagggcacaaggaagaaccgtgggagaaagacctcagttatttgatttaaggactaccctaaatccaggatgatctcaagatccttaacttaattacatctgcaaagaccgtatttccaa

SEQ ID NO: 375491 - DNA, 5511 bp, Homo sapiens
aagtgggaatttgaatcctgtgggccgttgaatgtggctgctcgcggtcggcgtgccccgacgtacagcgggccgggaaaagtggcactgaggctctggaacttctgcccagctctccttgcttgtgttttctgtcgaaaacatgatgactgtcctaataaatacggagaaaagaaaactaaggagaaatggaatctcactgtacattactactgtttgttgatgtcaagtggaatttggcagagaggcaaagaagaagaaggagtttatggttttctaatagaagatatcaggaaggaagtgaatagagcttctaaactgaaatgctgtgtttgcaagaaaaatggtgcttcaattggatgtgttgcaccccgatgtaaacgaagttatcatttcccatgtggacttcagagagaatgtattttccagtttactggcaattttgcgtcattttgttgggaccatcgacctgttcaaataattacatctaataattatagagagtccttaccatgcaccatttgcttggaatttattgagcctattccaagttataacatattacgaagtccttgttgtaagaacgcttggtttcatagagactgtttacaggttcaagcaataaatgcgggagtgtttttctttaggtgtacaatatgcaataatagtgacatctttcagaaagagatgttgagaatgggaattcatattcctgaaaaagatgcttcctgggaattagaggaaaacgcttatcaagagcttctgcagcactatgagcgttgtgatgttcgaagatgtcgttgcaaagaagggcgagactataatgcacctgatagcaaatgggaaataaagcgctgtcagtgttgtggttccagtggcacacatttagcctgctcctcattacggtcatgggagcaaaattgggagtgtttggaatgtaggggtattatctacaattcaggagagttccaaaaagccaaaaaacatgtattacccaattctaataatgtggggattacagattgtttgttggaagagtcatcacctaaattacccagacagtcacctggatcccagagtaaagatctactgaggcaaggcagcaaatttagaagaaatgtatcaacactattaatagagttaggattccaaattaaaaaaaaaactaaaagattgtatatcaacaaagccaatatctggaatagtgccttagatgcattcagaaatcgaaactttaatccttcatatgcaattgaagtagcatatgttattgaaaatgataattttggaagtgagcatcctggatcaaagcaagaatttctgagtctcttaatgcaacatcttgagaactcatcattgtttgaagggtccttgtcaaagaacttgtctctaaattctcaagctctgaaagagaatctttactatgaagctggcaaaatgcttgccatttctttagttcacggtggtccttcacctggtttcttttctaaaaccttgtttaactgccttgtttatggaccagaaaatacccagccaattttagatgatgtttcagactttgatgtggcacagattataatcaggataaatactgcaacaactgtagctgacttaaagtcaataataaatgaatgctataactaccttgagttaattggatgtctcagacttataacgacattaagtgataaatatatgttagtaaaagacatacttggctaccatgtaattcagagagtccacacaccctttgaaagttttaagcagggtctgaaaacccttggtgttttggagaaaattcaggcttatccagaagcattttgtagcatcctgtgtcataaacctgagagtctttctgcaaaaatccttagtgagctttttacagtacacacattacctgatgtgaaagctttggggttttggaacagttacttacaggctgttgaagatggtaaatctacaacaacaatggaagacattcttatttttgcaactggttgcagttccattcctccagctggatttaaacccactccttcaattgagtgtctgcatgtggattttcctgttggaaacaagtgtaataactgtttagcaattcccatcaccaatacatataaagagtttcaagaaaatatggacttcaccataagaaacactctaagactagaaaaggaagaaagttctcattacattggacattaaaatgtttccttgaacaaagagaagcttctttaaaagctgctattgataactctcttttatttcactaaccttttcatcatcactttgaacaaactagttagcttcttgacctaataaaatttatgatatgaatataaaggaatattatagccacttaggctaaaaaaaggttttttttgttaaagcatactagtcaaaattggtgataatttctcattttcttgatatagatacttcataaacctcaatataaatactctcaaaatggttgtatggattttatttaggtatggtagcatggttaataaaagtaaaaactgttttactcacattttttgtaaattaggattacatatagaatgccacaatttctctaggtttattcaattttcaaattattcctcattttattttaaagcattaaatagaaaagctaattggttaaattttgttatataaatcagagtcatatattctgggatttgtgttactatgcatacttttctaggatgtcaccaaattagttgtttaaaatgtttttagattactgatttatattaagatgacccacactgcaattagattatgcctagtgggaagtattatataaaaagcagaattaagctgggcacatgtgcttgtaatctcagttataagggaggctgaggtgggagaatcgagatactcagccagcctggcaatgtagcaaagactccatctcaaaaaaaaaaacagaattgcacaaattttctggaatctatggacattccatgagcttaaacacttttgaggtggataacatttagttgaaaatacctaagaaagtgtgtcttctttaaagccttggctttaatcatgggaaattgttgttgttgttgttgttgtttgtatcctatgtttggtattctgtatgtctgatccataatcattttagatatttgaatgatctctgtggattggtaggtttggccatttgaccattatttattatcaagttggttgtatgctaaggtaagttgacgccatagcattatacagttatcttcattgctcttgaatgatatctgttatataagcaatgtataaataaagtaaaaaggatagaatgaaaaacccattctaatgtcaccactcagagataagtaccgtatttctgtgtatccttctataaactctttacttctgtttcctttattttttaactttaataatgctactaaaagacaatacctaaaagtaactgtactaacaaagtgctaacaatgtgaaaatatatagtcccatagtcatgtccccatatttatactcccacagaagaaaaaattggaaaacaaagtctgatgtccttaatctattaacatatttaaatgatataatggttcagttttccatgaaagtaaatcattatgggaagtaaaatgttttaaccatatttttcttaatacacaaagcaggtgtcagctgttgtattctcacccttcttaagaaaaatcattacattattgatattttttaagtaacagaatagatttgaaagagataatatatctcttaataccaaaggaaaactaaaacataattctagtgtacttttctttgttccctcatgtctttttcaatctgtacactaacatacctagcaaatttgttttactttaacttgaaatatttaagaacattaaacaagacatttctttggctttggttgaatttttttgtctcaccaatagtaattgaaagatcaattatcaaagagtttgaatagctaatataaaccccaaagtcaccatacagtttttattccaaatatgttgataaaaagatatttgtttctttatccaccttatttttattacagctaaaaaccaatacaaaccaataaaacctagttaaagctattttctggtttttagttgcaattaatttcccctagggtagaaattaaagctgattaagtcacacacacatactttgttggggtgggggtggcaggtggagaggcagtgtacttgggttagctacaattaaaaacagtatttcaattcctcatttgacttattttatatatagacagggccttagtgataagatggtgtaaataatttaggatattcatgttttaaagtgaagcataaatatttattttgcaaaatgttttctagtttgaaggatgttccattattaccatttttagattaatctgtatggtcaaggaatatcagagaaacctgtaggttatttattttctgcagtgtcattttgtcaaatggttggtattataattgttcttttcttattaattttataaccagtgcataattcttacattagattttaaaaaagaattatgctataaatctttataaatgtgtacatatatttcttaaatattgcaattgcctaaatgttgtatattttaaggctgttttctcttgctcttaatgttgaggaaaactataaattgatctataatgcatctactgttaatggttttggttagtttgatattcattgtttttaaacactttccaatatggaaactttaacaccttttatacaattctctactattcaagatattctttaaaatatctcaccagaaacttacaattttatactttgtaatttttagtttctgtaatttgaggaagtgactttttttgtttgggttaagtaaaaagcctttgattgattaccagcatgagaattcaccttggtttctattttatgcatttgtaaatttttcccctaattatatggaagctattggaacttttgtattcagtgctaaatactaagtcaaggggagtatattaggtaagttttttcagtgactgtgcctttagcattcagtcattataagaaaatgatcagaacaaaatcattacattataaacatgtaattcttttatatagtgattatcatgtactgcattgttactttaaaataagctattaaactagtttttatggttcaagtaatgcaatacaaagtttcatgcttcaagtaatgcaatacaaaacataacccatttaatgatgaattacttgaatgtatattatctgtggtttaggaaaatttggattgtcttgaagagactcagttttcaagttctgattttgaccattatctcttctaattcataaacatatcccagtacctacactatgccaggtattatgctaggtgatcgtttatatgtcagcctatttcccccccttttaaagactgccagattaaccaaaaagcgtgacatttataacaatgttttataaataaataaatgtgtttatgccactaaaggt

SEQ ID NO: 375492 - DNA, 5523 bp, Homo sapiens
agcactaagcacatctacaatcaaggagaggggcaggctttaccttttgaaggaagaagtatgaaagtgtatcactgactgatcaagtagagtaaaatgaatgaaagtaaacctggtgactcacagaaccttgcttgtgttttctgtcgaaaacatgatgactgtcctaataaatacggagaaaagaaaactaaggagaaatggaatctcactgtacattactactgtttgttgatgtcaagtggaatttggcagagaggcaaagaagaagaaggagtttatggttttctaatagaagatatcaggaaggaagtgaatagagcttctaaactgaaatgctgtgtttgcaagaaaaatggtgcttcaattggatgtgttgcaccccgatgtaaacgaagttatcatttcccatgtggacttcagagagaatgtattttccagtttactggcaattttgcgtcattttgttgggaccatcgacctgttcaaataattacatctaataattatagagagtccttaccatgcaccatttgcttggaatttattgagcctattccaagttataacatattacgaagtccttgttgtaagaacgcttggtttcatagagactgtttacaggttcaagcaataaatgcgggagtgtttttctttaggtgtacaatatgcaataatagtgacatctttcagaaagagatgttgagaatgggaattcatattcctgaaaaagatgcttcctgggaattagaggaaaacgcttatcaagagcttctgcagcactatgagcgttgtgatgttcgaagatgtcgttgcaaagaagggcgagactataatgcacctgatagcaaatgggaaataaagcgctgtcagtgttgtggttccagtggcacacatttagcctgctcctcattacggtcatgggagcaaaattgggagtgtttggaatgtaggggtattatctacaattcaggagagttccaaaaagccaaaaaacatgtattacccaattctaataatgtggggattacagattgtttgttggaagagtcatcacctaaattacccagacagtcacctggatcccagagtaaagatctactgaggcaaggcagcaaatttagaagaaatgtatcaacactattaatagagttaggattccaaattaaaaaaaaaactaaaagattgtatatcaacaaagccaatatctggaatagtgccttagatgcattcagaaatcgaaactttaatccttcatatgcaattgaagtagcatatgttattgaaaatgataattttggaagtgagcatcctggatcaaagcaagaatttctgagtctcttaatgcaacatcttgagaactcatcattgtttgaagggtccttgtcaaagaacttgtctctaaattctcaagctctgaaagagaatctttactatgaagctggcaaaatgcttgccatttctttagttcacggtggtccttcacctggtttcttttctaaaaccttgtttaactgccttgtttatggaccagaaaatacccagccaattttagatgatgtttcagactttgatgtggcacagattataatcaggataaatactgcaacaactgtagctgacttaaagtcaataataaatgaatgctataactaccttgagttaattggatgtctcagacttataacgacattaagtgataaatatatgttagtaaaagacatacttggctaccatgtaattcagagagtccacacaccctttgaaagttttaagcagggtctgaaaacccttggtgttttggagaaaattcaggcttatccagaagcattttgtagcatcctgtgtcataaacctgagagtctttctgcaaaaatccttagtgagctttttacagtacacacattacctgatgtgaaagctttggggttttggaacagttacttacaggctgttgaagatggtaaatctacaacaacaatggaagacattcttatttttgcaactggttgcagttccattcctccagctggatttaaacccactccttcaattgagtgtctgcatgtggattttcctgttggaaacaagtgtaataactgtttagcaattcccatcaccaatacatataaagagtttcaagaaaatatggacttcaccataagaaacactctaagactagaaaaggaagaaagttctcattacattggacattaaaatgtttccttgaacaaagagaagcttctttaaaagctgctattgataactctcttttatttcactaaccttttcatcatcactttgaacaaactagttagcttcttgacctaataaaatttatgatatgaatataaaggaatattatagccacttaggctaaaaaaaggttttttttgttaaagcatactagtcaaaattggtgataatttctcattttcttgatatagatacttcataaacctcaatataaatactctcaaaatggttgtatggattttatttaggtatggtagcatggttaataaaagtaaaaactgttttactcacattttttgtaaattaggattacatatagaatgccacaatttctctaggtttattcaattttcaaattattcctcattttattttaaagcattaaatagaaaagctaattggttaaattttgttatataaatcagagtcatatattctgggatttgtgttactatgcatacttttctaggatgtcaccaaattagttgtttaaaatgtttttagattactgatttatattaagatgacccacactgcaattagattatgcctagtgggaagtattatataaaaagcagaattaagctgggcacatgtgcttgtaatctcagttataagggaggctgaggtgggagaatcgagatactcagccagcctggcaatgtagcaaagactccatctcaaaaaaaaaaacagaattgcacaaattttctggaatctatggacattccatgagcttaaacacttttgaggtggataacatttagttgaaaatacctaagaaagtgtgtcttctttaaagccttggctttaatcatgggaaattgttgttgttgttgttgttgtttgtatcctatgtttggtattctgtatgtctgatccataatcattttagatatttgaatgatctctgtggattggtaggtttggccatttgaccattatttattatcaagttggttgtatgctaaggtaagttgacgccatagcattatacagttatcttcattgctcttgaatgatatctgttatataagcaatgtataaataaagtaaaaaggatagaatgaaaaacccattctaatgtcaccactcagagataagtaccgtatttctgtgtatccttctataaactctttacttctgtttcctttattttttaactttaataatgctactaaaagacaatacctaaaagtaactgtactaacaaagtgctaacaatgtgaaaatatatagtcccatagtcatgtccccatatttatactcccacagaagaaaaaattggaaaacaaagtctgatgtccttaatctattaacatatttaaatgatataatggttcagttttccatgaaagtaaatcattatgggaagtaaaatgttttaaccatatttttcttaatacacaaagcaggtgtcagctgttgtattctcacccttcttaagaaaaatcattacattattgatattttttaagtaacagaatagatttgaaagagataatatatctcttaataccaaaggaaaactaaaacataattctagtgtacttttctttgttccctcatgtctttttcaatctgtacactaacatacctagcaaatttgttttactttaacttgaaatatttaagaacattaaacaagacatttctttggctttggttgaatttttttgtctcaccaatagtaattgaaagatcaattatcaaagagtttgaatagctaatataaaccccaaagtcaccatacagtttttattccaaatatgttgataaaaagatatttgtttctttatccaccttatttttattacagctaaaaaccaatacaaaccaataaaacctagttaaagctattttctggtttttagttgcaattaatttcccctagggtagaaattaaagctgattaagtcacacacacatactttgttggggtgggggtggcaggtggagaggcagtgtacttgggttagctacaattaaaaacagtatttcaattcctcatttgacttattttatatatagacagggccttagtgataagatggtgtaaataatttaggatattcatgttttaaagtgaagcataaatatttattttgcaaaatgttttctagtttgaaggatgttccattattaccatttttagattaatctgtatggtcaaggaatatcagagaaacctgtaggttatttattttctgcagtgtcattttgtcaaatggttggtattataattgttcttttcttattaattttataaccagtgcataattcttacattagattttaaaaaagaattatgctataaatctttataaatgtgtacatatatttcttaaatattgcaattgcctaaatgttgtatattttaaggctgttttctcttgctcttaatgttgaggaaaactataaattgatctataatgcatctactgttaatggttttggttagtttgatattcattgtttttaaacactttccaatatggaaactttaacaccttttatacaattctctactattcaagatattctttaaaatatctcaccagaaacttacaattttatactttgtaatttttagtttctgtaatttgaggaagtgactttttttgtttgggttaagtaaaaagcctttgattgattaccagcatgagaattcaccttggtttctattttatgcatttgtaaatttttcccctaattatatggaagctattggaacttttgtattcagtgctaaatactaagtcaaggggagtatattaggtaagttttttcagtgactgtgcctttagcattcagtcattataagaaaatgatcagaacaaaatcattacattataaacatgtaattcttttatatagtgattatcatgtactgcattgttactttaaaataagctattaaactagtttttatggttcaagtaatgcaatacaaagtttcatgcttcaagtaatgcaatacaaaacataacccatttaatgatgaattacttgaatgtatattatctgtggtttaggaaaatttggattgtcttgaagagactcagttttcaagttctgattttgaccattatctcttctaattcataaacatatcccagtacctacactatgccaggtattatgctaggtgatcgtttatatgtcagcctatttcccccccttttaaagactgccagattaaccaaaaagcgtgacatttataacaatgttttataaataaataaatgtgtttatgccactaaaggt

SEQ ID NO: 375493 - DNA, 5495 bp, Homo sapiens
aagtgggaatttgaatcctgtgggccgttgaatgtggctgctcgcggtcggcgtgccccgacgtacagcgggccgggaaaagtggcactgaggctctggaacttctgcccagctctccttgtaaaatgaatgaaagtaaacctggtgactcacagaaccttgcttgtgttttctgtcgaaaacatgatgactgtcctaataaatacggagaaaagaaaactaaggagaaatggaatctcactgtacattactactgtttgttgatgtcaagtggaatttggcagagaggcaaagaagaagaaggagtttatggttttctaatagaagatatcaggaaggaagtgaatagagcttctaaactgaaacgaagttatcatttcccatgtggacttcagagagaatgtattttccagtttactggcaattttgcgtcattttgttgggaccatcgacctgttcaaataattacatctaataattatagagagtccttaccatgcaccatttgcttggaatttattgagcctattccaagttataacatattacgaagtccttgttgtaagaacgcttggtttcatagagactgtttacaggttcaagcaataaatgcgggagtgtttttctttaggtgtacaatatgcaataatagtgacatctttcagaaagagatgttgagaatgggaattcatattcctgaaaaagatgcttcctgggaattagaggaaaacgcttatcaagagcttctgcagcactatgagcgttgtgatgttcgaagatgtcgttgcaaagaagggcgagactataatgcacctgatagcaaatgggaaataaagcgctgtcagtgttgtggttccagtggcacacatttagcctgctcctcattacggtcatgggagcaaaattgggagtgtttggaatgtaggggtattatctacaattcaggagagttccaaaaagccaaaaaacatgtattacccaattctaataatgtggggattacagattgtttgttggaagagtcatcacctaaattacccagacagtcacctggatcccagagtaaagatctactgaggcaaggcagcaaatttagaagaaatgtatcaacactattaatagagttaggattccaaattaaaaaaaaaactaaaagattgtatatcaacaaagccaatatctggaatagtgccttagatgcattcagaaatcgaaactttaatccttcatatgcaattgaagtagcatatgttattgaaaatgataattttggaagtgagcatcctggatcaaagcaagaatttctgagtctcttaatgcaacatcttgagaactcatcattgtttgaagggtccttgtcaaagaacttgtctctaaattctcaagctctgaaagagaatctttactatgaagctggcaaaatgcttgccatttctttagttcacggtggtccttcacctggtttcttttctaaaaccttgtttaactgccttgtttatggaccagaaaatacccagccaattttagatgatgtttcagactttgatgtggcacagattataatcaggataaatactgcaacaactgtagctgacttaaagtcaataataaatgaatgctataactaccttgagttaattggatgtctcagacttataacgacattaagtgataaatatatgttagtaaaagacatacttggctaccatgtaattcagagagtccacacaccctttgaaagttttaagcagggtctgaaaacccttggtgttttggagaaaattcaggcttatccagaagcattttgtagcatcctgtgtcataaacctgagagtctttctgcaaaaatccttagtgagctttttacagtacacacattacctgatgtgaaagctttggggttttggaacagttacttacaggctgttgaagatggtaaatctacaacaacaatggaagacattcttatttttgcaactggttgcagttccattcctccagctggatttaaacccactccttcaattgagtgtctgcatgtggattttcctgttggaaacaagtgtaataactgtttagcaattcccatcaccaatacatataaagagtttcaagaaaatatggacttcaccataagaaacactctaagactagaaaaggaagaaagttctcattacattggacattaaaatgtttccttgaacaaagagaagcttctttaaaagctgctattgataactctcttttatttcactaaccttttcatcatcactttgaacaaactagttagcttcttgacctaataaaatttatgatatgaatataaaggaatattatagccacttaggctaaaaaaaggttttttttgttaaagcatactagtcaaaattggtgataatttctcattttcttgatatagatacttcataaacctcaatataaatactctcaaaatggttgtatggattttatttaggtatggtagcatggttaataaaagtaaaaactgttttactcacattttttgtaaattaggattacatatagaatgccacaatttctctaggtttattcaattttcaaattattcctcattttattttaaagcattaaatagaaaagctaattggttaaattttgttatataaatcagagtcatatattctgggatttgtgttactatgcatacttttctaggatgtcaccaaattagttgtttaaaatgtttttagattactgatttatattaagatgacccacactgcaattagattatgcctagtgggaagtattatataaaaagcagaattaagctgggcacatgtgcttgtaatctcagttataagggaggctgaggtgggagaatcgagatactcagccagcctggcaatgtagcaaagactccatctcaaaaaaaaaaacagaattgcacaaattttctggaatctatggacattccatgagcttaaacacttttgaggtggataacatttagttgaaaatacctaagaaagtgtgtcttctttaaagccttggctttaatcatgggaaattgttgttgttgttgttgttgtttgtatcctatgtttggtattctgtatgtctgatccataatcattttagatatttgaatgatctctgtggattggtaggtttggccatttgaccattatttattatcaagttggttgtatgctaaggtaagttgacgccatagcattatacagttatcttcattgctcttgaatgatatctgttatataagcaatgtataaataaagtaaaaaggatagaatgaaaaacccattctaatgtcaccactcagagataagtaccgtatttctgtgtatccttctataaactctttacttctgtttcctttattttttaactttaataatgctactaaaagacaatacctaaaagtaactgtactaacaaagtgctaacaatgtgaaaatatatagtcccatagtcatgtccccatatttatactcccacagaagaaaaaattggaaaacaaagtctgatgtccttaatctattaacatatttaaatgatataatggttcagttttccatgaaagtaaatcattatgggaagtaaaatgttttaaccatatttttcttaatacacaaagcaggtgtcagctgttgtattctcacccttcttaagaaaaatcattacattattgatattttttaagtaacagaatagatttgaaagagataatatatctcttaataccaaaggaaaactaaaacataattctagtgtacttttctttgttccctcatgtctttttcaatctgtacactaacatacctagcaaatttgttttactttaacttgaaatatttaagaacattaaacaagacatttctttggctttggttgaatttttttgtctcaccaatagtaattgaaagatcaattatcaaagagtttgaatagctaatataaaccccaaagtcaccatacagtttttattccaaatatgttgataaaaagatatttgtttctttatccaccttatttttattacagctaaaaaccaatacaaaccaataaaacctagttaaagctattttctggtttttagttgcaattaatttcccctagggtagaaattaaagctgattaagtcacacacacatactttgttggggtgggggtggcaggtggagaggcagtgtacttgggttagctacaattaaaaacagtatttcaattcctcatttgacttattttatatatagacagggccttagtgataagatggtgtaaataatttaggatattcatgttttaaagtgaagcataaatatttattttgcaaaatgttttctagtttgaaggatgttccattattaccatttttagattaatctgtatggtcaaggaatatcagagaaacctgtaggttatttattttctgcagtgtcattttgtcaaatggttggtattataattgttcttttcttattaattttataaccagtgcataattcttacattagattttaaaaaagaattatgctataaatctttataaatgtgtacatatatttcttaaatattgcaattgcctaaatgttgtatattttaaggctgttttctcttgctcttaatgttgaggaaaactataaattgatctataatgcatctactgttaatggttttggttagtttgatattcattgtttttaaacactttccaatatggaaactttaacaccttttatacaattctctactattcaagatattctttaaaatatctcaccagaaacttacaattttatactttgtaatttttagtttctgtaatttgaggaagtgactttttttgtttgggttaagtaaaaagcctttgattgattaccagcatgagaattcaccttggtttctattttatgcatttgtaaatttttcccctaattatatggaagctattggaacttttgtattcagtgctaaatactaagtcaaggggagtatattaggtaagttttttcagtgactgtgcctttagcattcagtcattataagaaaatgatcagaacaaaatcattacattataaacatgtaattcttttatatagtgattatcatgtactgcattgttactttaaaataagctattaaactagtttttatggttcaagtaatgcaatacaaagtttcatgcttcaagtaatgcaatacaaaacataacccatttaatgatgaattacttgaatgtatattatctgtggtttaggaaaatttggattgtcttgaagagactcagttttcaagttctgattttgaccattatctcttctaattcataaacatatcccagtacctacactatgccaggtattatgctaggtgatcgtttatatgtcagcctatttcccccccttttaaagactgccagattaaccaaaaagcgtgacatttataacaatgttttataaataaataaatgtgtttatgccactaaaggt

SEQ ID NO: 375494 - DNA, 3998 bp, Homo sapiens
aagtgggaatttgaatcctgtgggccgttgaatgtggctgctcgcggtcggcgtgccccgacgtacagcgggccgggaaaagtggcactgaggctctggaacttctgcccagctctccttgtaaaatgaatgaaagtaaacctggtgactcacagaaccttgcttgtgttttctgtcgaaaacatgatgactgtcctaataaatacggagaaaagaaaactaaggagaaatggaatctcactgtacattactactgtttgttgatgtcaagtggaatttggcagagaggcaaagaagaagaaggagtttatggttttctaatagaagatatcaggaaggaagtgaatagagcttctaaactgaaatgctgtgtttgcaagaaaaatggtgcttcaattggatgtgttgcaccccgatgtaaacgaagttatcatttcccatgtggacttcagagagaatgtattttccagtttactggcaattttgcgtcattttgttgggaccatcgacctgttcaaataattacatctaataattatagagagtccttaccatgcaccatttgcttggaatttattgagcctattccaagttataacatattacgaagtccttgttgtaagaacgcttggtttcatagagactgtttacaggttcaagcaataaatgcgggagtgtttttctttaggtgtacaatatgcaataatagtgacatctttcagaaagagatgttgagaatgggaattcatattcctgaaaaagatgcttcctgggaattagaggaaaacgcttatcaagagcttctgcagcactatgagcgttgtgatgttcgaagatgtcgttgcaaagaagggcgagactataatgcacctgatagcaaatgggaaataaagcgctgtcagtgttgtggttccagtggcacacatttagcctgctcctcattacggtcatgggagcaaaattgggagtgtttggaatgtaggggtattatctacaattcaggagagttccaaaaagccaaaaaacatgtattacccaattctaataatgtggggattacagattgtttgttggaagagtcatcacctaaattacccagacagtcacctggatcccagagtaaagatctactgaggcaaggcagcaaatttagaagaaatgtatcaacactattaatagagttaggattccaaattaaaaaaaaaactaaaagattgtatatcaacaaagccaatatctggaatagtgccttagatgcattcagaaatcgaaactttaatccttcatatgcaattgaagtagcatatgttattgaaaatgataattttggaagtgagcatcctggatcaaagcaagaatttctgagtctcttaatgcaacatcttgagaactcatcattgtttgaagggtccttgtcaaagaacttgtctctaaattctcaagctctgaaagagaatctttactatgaagctggcaaaatgcttgccatttctttagttcacggtggtccttcacctggtttcttttctaaaaccttgtttaactgccttgtttatggaccagaaaatacccagccaattttagatgatgtttcagactttgatgtggcacagattataatcaggataaatactgcaacaactgtagctgacttaaagtcaataataaatgaatgctataactaccttgagttaattggatgtctcagacttataacgacattaagtgataaatatatgttagtaaaagacatacttggctaccatgtaattcagagagtccacacaccctttgaaagttttaagcagggtctgaaaacccttggtgttttggagaaaattcaggcttatccagaagcattttgtagcatcctgtgtcataaacctgagagtctttctgcaaaaatccttagtgagctttttacagtacacacattacctgatgtgaaagctttggggttttggaacagttacttacaggctgttgaagatggtaaatctacaacaacaatggaagacattcttatttttgcaactggttgcagttccattcctccagctggatttaaacccactccttcaattgagtgtctgcatgtggattttcctgttggaaacaagtgtaataactgtttagcaattcccatcaccaatacatataaagagtttcaagaaaatatggacttcaccataagaaacactctaagactagaaaaggaagaaagttctcattacattggacattaaaatgtttccttgaacaaagagaagcttctttaaaagctgctattgataactctcttttatttcactaaccttttcatcatcactttgaacaaactagttagcttcttgacctaataaaatttatgatatgaatataaaggaatattatagccacttaggctaaaaaaaggttttttttgttaaagcatactagtcaaaattggtgataatttctcattttcttgatatagatacttcataaacctcaatataaatactctcaaaatggttgtatggattttatttaggtatggtagcatggttaataaaagtaaaaactgttttactcacattttttgtaaattaggattacatatagaatgccacaatttctctaggtttattcaattttcaaattattcctcattttattttaaagcattaaatagaaaagctaattggttaaattttgttatataaatcagagtcatatattctgggatttgtgttactatgcatacttttctaggatgtcaccaaattagttgtttaaaatgtttttagattactgatttatattaagatgacccacactgcaattagattatgcctagtgggaagtattatataaaaagcagaattaagctgggcacatgtgcttgtaatctcagttataagggaggctgaggtgggagaatcgagatactcagccagcctggcaatgtagcaaagactccatctcaaaaaaaaaaacagaattgcacaaattttctggaatctatggacattccatgagcttaaacacttttgaggtggataacatttagttgaaaatacctaagaaagtgtgtcttctttaaagccttggctttaatcatgggaaattgttgttgttgttgttgttgtttgtatcctatgtttggtattctgtatgtctgatccataatcattttagatatttgaatgatctctgtggattggtaggtttggccatttgaccattatttattatcaagttggttgtatgctaaggtaagttgacgccatagcattatacagttatcttcattgctcttgaatgatatctgttatataagcaatgtataaataaagtaaaaaggatagaatgaaaaacccattctaatgtcaccactcagagataagtaccgtatttctgtgtatccttctataaactctttacttctgtttcctttattttttaactttaataatgctactaaaagacaatacctaaaagtaactgtactaacaaagtgctaacaatgtgaaaatatatagtcccatagtcatgtccccatatttatactcccacagaagaaaaaattggaaaacaaagtctgatgtccttaatctattaacatatttaaatgatataatggttcagttttccatgaaagtaaatcattatgataggtaaatcattatggggaaggtaacaatgtgttttaacgccaataatttttcttaaataacacaaaggcaggggtgtcaaggcgtggtattctcacccctttcttaagaacaaatcattgcacttatcgactattttctaacggtaacacagaatagattcgagagagactagtcgttcccctaataccaagggaaacacttgcagcataactctagggttctctctatggtcctaaggtcttaagtgtggaactacattgcttagacactggtagtctcacgtggacattcgcacttacagacatctgggctgggaacacggccaagcatgagacccgg

SEQ ID NO: 375495 - DNA, 2865 bp, Homo sapiens
  misc_feature (74)..(74): n is a, c, g, or t
cccgaaaggcggccctgtatataactacccccatagggggtagggggccagggccccccccgaaagctttccanaagggtcgataggggtgttggtgccattcttttctgcaagatctttcaggtattcctgccgggtccgagttgcctttgaaaggtaaaatagcttaaagcattaatatctaaacaaatcaatctgttaatagtagtcacaaaatatgcttaatatagaaacccacattcatgtttttaagaaaaaagtgtaaattgtattccatctcaaaaaaaaaaacagaattgcacaaattttctggaatctatggacattccatgagcttaaacacttttgaggtggataacatttagttgaaaatacctaagaaagtgtgtcttctttaaagccttggctttaatcatgggaaattgttgttgttgttgttgttgtttgtatcctatgtttggtattctgtatgtctgatccataatcattttagatatttgaatgatctctgtggattggtaggtttggccatttgaccattatttattatcaagttggttgtatgctaaggtaagttgacgccatagcattatacagttatcttcattgctcttgaatgatatctgttatataagcaatgtataaataaagtaaaaaggatagaatgaaaaacccattctaatgtcaccactcagagataagtaccgtatttctgtgtatccttctataaactctttacttctgtttcctttattttttaactttaataatgctactaaaagacaatacctaaaagtaactgtactaacaaagtgctaacaatgtgaaaatatatagtcccatagtcatgtccccatatttatactcccacagaagaaaaaattggaaaacaaagtctgatgtccttaatctattaacatatttaaatgatataatggttcagttttccatgaaagtaaatcattatgggaagtaaaatgttttaaccatatttttcttaatacacaaagcaggtgtcagctgttgtattctcacccttcttaagaaaaatcattacattattgatattttttaagtaacagaatagatttgaaagagataatatatctcttaataccaaaggaaaactaaaacataattctagtgtacttttctttgttccctcatgtctttttcaatctgtacactaacatacctagcaaatttgttttactttaacttgaaatatttaagaacattaaacaagacatttctttggctttggttgaatttttttgtctcaccaatagtaattgaaagatcaattatcaaagagtttgaatagctaatataaaccccaaagtcaccatacagtttttattccaaatatgttgataaaaagatatttgtttctttatccaccttatttttattacagctaaaaaccaatacaaaccaataaaacctagttaaagctattttctggtttttagttgcaattaatttcccctagggtagaaattaaagctgattaagtcacacacacatactttgttggggtgggggtggcaggtggagaggcagtgtacttgggttagctacaattaaaaacagtatttcaattcctcatttgacttattttatatatagacagggccttagtgataagatggtgtaaataatttaggatattcatgttttaaagtgaagcataaatatttattttgcaaaatgttttctagtttgaaggatgttccattattaccatttttagattaatctgtatggtcaaggaatatcagagaaacctgtaggttatttattttctgcagtgtcattttgtcaaatggttggtattataattgttcttttcttattaattttataaccagtgcataattcttacattagattttaaaaaagaattatgctataaatctttataaatgtgtacatatatttcttaaatattgcaattgcctaaatgttgtatattttaaggctgttttctcttgctcttaatgttgaggaaaactataaattgatctataatgcatctactgttaatggttttggttagtttgatattcattgtttttaaacactttccaatatggaaactttaacaccttttatacaattctctactattcaagatattctttaaaatatctcaccagaaacttacaattttatactttgtaatttttagtttctgtaatttgaggaagtgactttttttgtttgggttaagtaaaaagcctttgattgattaccagcatgagaattcaccttggtttctattttatgcatttgtaaatttttcccctaattatatggaagctattggaacttttgtattcagtgctaaatactaagtcaaggggagtatattaggtaagttttttcagtgactgtgcctttagcattcagtcattataagaaaatgatcagaacaaaatcattacattataaacatgtaattcttttatatagtgattatcatgtactgcattgttactttaaaataagctattaaactagtttttatggttcaagtaatgcaatacaaagtttcatgcttcaagtaatgcaatacaaaacataacccatttaatgatgaattacttgaatgtatattatctgtggtttaggaaaatttggattgtcttgaagagactcagttttcaagttctgattttgaccattatctcttctaattcataaacatatcccagtacctacactatgccaggtattatgctaggtgatcgtttatatgtcagcctatttcccccccttttaaagactgccagattaaccaaaaagcgtgacatttataacaatgttttataaataaataaatgtgtttatgccactaaaggt

SEQ ID NO: 375496 - DNA, 786 bp, Homo sapiens
aagtgggaatttgaatcctgtgggccgttgaatgtggctgctcgcggtcggcgtgccccgacgtacagcgggccgggaaaagtggcactgaggctctggaacttctgcccagctctccttgtaaaatgaatgaaagtaaacctggtgactcacagaaccttgcttgtgttttctgtcgaaaacatgatgactgtcctaataaatacggagaaaagaaaactaaggagaaatggaatctcactgtacattactactgtttgttgatgtcaagtggaatttggcagagaggcaaagaagaagaaggagtttatggttttctaatagaagatatcaggaaggaagtgaatagagcttctaaactgaaatgctgtgtttgcaagaaaaatggtgcttcaattggatgtgttgcaccccgatgtaaacgaagttatcatttcccatgtggacttcagagagaatgtattttccagtttactggcaattttgcgtcattttgttgggaccatcgacctgttcaaataattacatctaataattatagagagtccttaccatgcaccatttgcttggaatttattgagcctattccaagttataacatattacgaagtccttgttgtaagaacgcttggtttcatagagactgtttacaggttcaagcaataaatgcgggagtgtttttctttaggtgtacaatatgcaataatagtgacatctttcagaaagagatgttgagaatgggaattcatattcctgaaaaaagtgagtaacatttagccttatgat

SEQ ID NO: 375497 - DNA, 2574 bp, Homo sapiens
aagtgggaatttgaatcctgtgggccgttgaatgtggctgctcgcggtcggcgtgccccgacgtacagcgggccgggaaaagtggcactgaggctctggaacttctgcccagctctccttgtaaaatgaatgaaagtaaacctggtgactcacagaaccttgcttgtgttttctgtcgaaaacatgatgactgtcctaataaatacggagaaaagaaaactaaggagaaatggaatctcactgtacattactactgtttgttgatgtcaagtggaatttggcagagaggcaaagaagaagaaggagtttatggttttctaatagaagatatcaggaaggaagtgaatagagcttctaaactgaaatgctgtgtttgcaagaaaaatggtgcttcaattggatgtgttgcaccccgatgtaaacgaagttatcatttcccatgtggacttcagagagaatgtattttccagtttactggcaattttgcgtcattttgttgggaccatcgacctgttcaaataattacatctaataattatagagagtccttaccatgcaccatttgcttggaatttattgagcctattccaagttataacatattacgaagtccttgttgtaagaacgcttggtttcatagagactgtttacaggttcaagcaataaatgcgggagtgtttttctttaggtgtacaatatgcaataatagtgacatctttcagaaagagatgttgagaatgggaattcatattcctgaaaaagatgcttcctgggaattagaggaaaacgcttatcaagagcttctgcagcactatgagcgttgtgatgttcgaagatgtcgttgcaaagaagggcgagactataatgcacctgatagcaaatgggaaataaagcgctgtcagtgttgtggttccagtggcacacatttagcctgctcctcattacggtcatgggagcaaaattgggagtgtttggaatgtaggggtattatctacaattcaggagagttccaaaaagccaaaaaacatgtattacccaattctaataatgtggggattacagattgtttgttggaagagtcatcacctaaattacccagacagtcacctggatcccagagtaaagatctactgaggcaaggcagcaaatttagaagaaatgtatcaacactattaatagagttaggattccaaattaaaaaaaaaactaaaagattgtatatcaacaaagccaatatctggaatagtgccttagatgcattcagaaatcgaaactttaatccttcatatgcaattgaagtagcatatgttattgaaaatgataattttggaagtgagcatcctggatcaaagcaagaatttctgagtctcttaatgcaacatcttgagaactcatcattgtttgaagggtccttgtcaaagaacttgtctctaaattctcaagctctgaaagagaatctttactatgaagctggcaaaatgcttgccatttctttagttcacggtggtccttcacctggtttcttttctaaaaccttgtttaactgccttgtttatggaccagaaaatacccagccaattttagatgatgtttcagactttgatgtggcacagattataatcaggataaatactgcaacaactgtagctgacttaaagtcaataataaatgaatgctataactaccttgagttaattggatgtctcagacttataacgacattaagtgataaatatatgttagtaaaagacatacttggctaccatgtaattcagagagtccacacaccctttgaaagttttaagcagggtctgaaaacccttggtgttttggagaaaattcaggcttatccagaagcattttgtagcatcctgtgtcataaacctgagagtctttctgcaaaaatccttagtgagctttttacagtacacacattacctgatgtgaaagctttggggttttggaacagttacttacaggctgttgaagatggtaaatctacaacaacaatggaagacattcttatttttgcaactggttgcagttccattcctccagctggatttaaacccactccttcaattgagtgtctgcatgtggattttcctgttggaaacaagtgtaataactgtttagcaattcccatcaccaatacatataaagagtttcaagaaaatatggacttcaccataagaaacactctaagactagaaaaggaagaaagttctcattacattggacattaaaatgtttccttgaacaaagagaagcttctttaaaagctgctattgataactctcttttatttcactaaccttttcatcatcactttgaacaaactagttagcttcttgacctaataaaatttatgatatgaatataaaggaatattatagccacttaggctaaaaaaaggttttttttgttaaagcatactagtcaaaattggtgataatttctcattttcttgatatagatacttcataaacctcaatataaatactctcaaaatggttgtatggattttatttaggtatggtagcatggttaataaaagtaaaaactgttttactc

SEQ ID NO: 375498 - DNA, 2507 bp, Homo sapiens
aagtgggaatttgaatcctgtgggccgttgaatgtggctgctcgcggtcggcgtgccccgacgtacagcgggccgggaaaagtggcactgaggctctggaacttctgcccagctctccttgtaaaatgaatgaaagtaaacctggtgactcacagaaccttgcttgtgttttctgtcgaaaacatgatgactgtcctaataaatacggagaaaagaaaactaaggagaaatggaatctcactgtacattactactgtttgttgatgtcaagtggaatttggcagagaggcaaagaagaagaaggagtttatggttttctaatagaagatatcaggaaggaagtgaatagagcttctaaactgaaatgctgtgtttgcaagaaaaatggtgcttcaattggatgtgttgcaccccgatgtaaacgaagttatcatttcccatgtggacttcagagagaatgtattttccagtttactggcaattttgcgtcattttgttgggaccatcgacctgttcaaataattacatctaataattatagagagtccttaccatgcaccatttgcttggaatttattgagcctattccaagttataacatattacgaagtccttgttgtaagaacgcttggtttcatagagactgtttacaggttcaagcaataaatgcgggagtgtttttctttaggtgtacaatatgcaataatagtgacatctttcagaaagagatgttgagaatgggaattcatattcctgaaaaagatgcttcctgggaattagaggaaaacgcttatcaagagcttctgcagcactatgagcgttgtgatgttcgaagatgtcgttgcaaagaagggcgagactataatgcacctgatagcaaatgggaaataaagcgctgtcagtgttgtggttccagtggcacacatttagcctgctcctcattacggtcatgggagcaaaattgggagtgtttggaatgtaggggtattatctacaattcaggagagttccaaaaagccaaaaaacatgtattacccaattctaataatgtggggattacagattgtttgttggaagagtcatcacctaaattacccagacagtcacctggatcccagagtaaagatctactgaggcaaggcagcaaatttagaagaaatgtatcaacactattaatagagttaggattccaaattaaaaaaaaaactaaaagattgtatatcaacaaagccaatatctggaatagtgccttagatgcattcagaaatcgaaactttaatccttcatatgcaattgaagtagcatatgttattgaaaatgataattttggaagtgagcatcctggatcaaagcaagaatttctgagtctcttaatgcaacatcttgagaactcatcattgtttgaagggtccttgtcaaagaacttgtctctaaattctcaagctctgaaagagaatctttactatgaagctggcaaaatgcttgccatttctttagttcacggtggtccttcacctggtttcttttctaaaaccttgtttaactgccttgtttatggaccagaaaatacccagccaattttagatgatgtttcagactttgatgtggcacagattataatcaggataaatactgcaacaactgtagctgacttaaagtcaataataaatgaatgctataactaccttgagttaattggatgtctcagacttataacgacattaagtgataaatatatgttagtaaaagacatacttggctaccatgtaattcagagagtccacacaccctttgaaagttttaagcagggtctgaaaacccttggtgttttggagaaaattcaggcttatccagaagcattttgtagcatcctgtgtcataaacctgagagtctttctgcaaaaatccttagtgagctttttacagtacacacattacctgatgtgaaagctttggggttttggaacagttacttacaggctgttgaagatggtaaatctacaacaacaatggaagacattcttatttttgcaactggttgcagttccattcctccagctggatttaaacccactccttcaattgagtgtctgcatgtggattttcctgttggaaacaagtgtaataactgtttagcaattcccatcaccaatacatataaagagtttcaagaaaatatggacttcaccataagaaacactctaagactagaaaaggaagaaagttctcattacattggacattaaaatgtttccttgaacaaagagaagcttctttaaaagctgctattgataactctcttttatttcactaaccttttcatcatcactttgaacaaactagttagcttcttgacctaataaaatttatgatatgaatataaaggaatattatagccacttaggctaaaaaaaggttttttttgttaaagcatactagtcaaaattggtgataatttctcattttcttgatatagatacttcataaacctcaatataaatactctc

SEQ ID NO: 375499 - DNA, 4944 bp, Homo sapiens
aagtgggaatttgaatcctgtgggccgttgaatgtggctgctcgcggtcggcgtgccccgacgtacagcgggccgggaaaagtggcactgaggctctggaacttctgcccagctctccttgtaaaatgaatgaaagtaaacctggtgactcacagaaccttgcttgtgttttctgtcgaaaacatgatgactgtcctaataaatacggagaaaagaaaactaaggagaaatggaatctcactgtacattactactgtttgttgatgtcaagtggaatttggcagagaggcaaagaagaagaaggagtttatggttttctaatagaagatatcaggaaggaagtgaatagagcttctaaactgaaatgctgtgtttgcaagaaaaatggtgcttcaattggatgtgttgcaccccgatgtaaacgaagttatcatttcccatgtggacttcagagagaatgtattttccagtttactggcaattttgcgtcattttgttgggaccatcgacctgttcaaataattacatctaataattatagagagtccttaccatgcaccatttgcttggaatttattgagcctattccaagttataacatattacgaagtccttgttgtaagaacgcttggtttcatagagactgtttacaggttcaagcaataaatgcgggagtgtttttctttaggtgtacaatatgcaataatagtgacatctttcagaaagagatgttgagaatgggaattcatattcctgaaaaagatgcttcctgggaattagaggaaaacgcttatcaagagcttctgcagcactatgagcgttgtgatgttcgaagatgtcgttgcaaagaagggcgagactataatgcacctgatagcaaatgggaaataaagcgctgtcagtgttgtggttccagtggcacacatttagcctgctcctcattacggtcatgggagcaaaattgggagtgtttggaatgtaggggtattatctacaattcaggagagttccaaaaagccaaaaaacatgtattacccaattctaataatgtggggattacagattgtttgttggaagagtcatcacctaaattacccagacagtcacctggatcccagagtaaagatctactgaggcaaggcagcaaatttagaagaaatgtatcaacactattaatagagttaggattccaaattaaaaaaaaaactaaaagattgtatatcaacaaagccaatatctggaatagtgccttagatgcattcagaaatcgaaactttaatccttcatatgcaattgaagtagcatatgttattgaaaatgataattttggaagtgagcatcctggatcaaagcaagaatttctgagtctcttaatgcaacatcttgagaactcatcattgtttgaagggtccttgtcaaagaacttgtctctaaattctcaagctctgaaagagaatctttactatgaagctggcaaaatgcttgccatttctttagttcacggtggtccttcacctggtttcttttctaaaaccttgtttaactgccttgtttatggaccagaaaatacccagccaattttagatgatgtttcagactttgatgtggcacagattataatcaggataaatactgcaacaactgtagctgacttaaagtcaataataaatgaatgctataactaccttgagttaattggatgtctcagacttataacgacattaagtgataaatatatgttagtaaaagacatacttggctaccatgtaattcagagagtccacacaccctttgaaagttttaagcagggtctgaaaacccttggtgttttggagaaaattcaggcttatccagaagcattttgtagcatcctgtgtcataaacctgagagtctttctgcaaaaatccttagtgagctttttacagtacacacattacctgatgtgaaagctttggggttttggaacagttacttacaggctgttgaagatggtaaatctacaacaacaatggaagacattcttatttttgcaactggttgcagttccattcctccagctggatttaaacccactccttcaattgagtgtctgcatgtggattttcctgttggaaacaagtgtaataactgtttagcaattcccatcaccaatacatataaagagtttcaagaaaatatggacttcaccataagaaacactctaagactagaaaaggaagaaagttctcattacattggacattaaaatgtttccttgaacaaagagaagcttctttaaaagctgctattgataactctcttttatttcactaaccttttcatcatcactttgaacaaactagttagcttcttgacctaataaaatttatgatatgaatataaaggaatattatagccacttaggctaaaaaaaggttttttttgttaaagcatactagtcaaaattggtgataatttctcattttcttgatatagatacttcataaacctcaatataaatactctcaaaatggttgtatggattttatttaggtatggtagcatggttaataaaagtaaaaactgttttactcacattttttgtaaattaggattacatatagaatgccacaatttctctaggtttattcaattttcaaattattcctcattttattttaaagcattaaatagaaaagctaattggttaaattttgttatataaatcagagtcatatattctgggatttgtgttactatgcatacttttctaggatgtcaccaaattagttgtttaaaatgtttttagattactgatttatattaagatgacccacactgcaattagattatgcctagtgggaagtattatataaaaagcagaattaagctgggcacatgtgcttgtaatctcagttataagggaggctgaggtgggagaatcgagatactcagccagcctggcaatgtagcaaagactccatctcaaaaaaaaaaacagaattgcacaaattttctggaatctatggacattccatgagcttaaacacttttgaggtggataacatttagttgaaaatacctaagaaagtgtgtcttctttaaagccttggctttaatcatgggaaattgttgttgttgttgttgttgtttgtatcctatgtttggtattctgtatgtctgatccataatcattttagatatttgaatgatctctgtggattggtaggtttggccatttgaccattatttattatcaagttggttgtatgctaaggtaagttgacgccatagcattatacagttatcttcattgctcttgaatgatatctgttatataagcaatgtataaataaagtaaaaaggatagaatgaaaaacccattctaatgtcaccactcagagataagtaccgtatttctgtgtatccttctataaactctttacttctgtttcctttattttttaactttaataatgctactaaaagacaatacctaaaagtaactgtactaacaaagtgctaacaatgtgaaaatatatagtcccatagtcatgtccccatatttatactcccacagaagaaaaaattggaaaacaaagtctgatgtccttaatctattaacatatttaaatgatataatggttcagttttccatgaaagtaaatcattatgggaagtaaaatgttttaaccatatttttcttaatacacaaagcaggtgtcagctgttgtattctcacccttcttaagaaaaatcattacattattgatattttttaagtaacagaatagatttgaaagagataatatatctcttaataccaaaggaaaactaaaacataattctagtgtacttttctttgttccctcatgtctttttcaatctgtacactaacatacctagcaaatttgttttactttaacttgaaatatttaagaacattaaacaagacatttctttggctttggttgaatttttttgtctcaccaatagtaattgaaagatcaattatcaaagagtttgaatagctaatataaaccccaaagtcaccatacagtttttattccaaatatgttgataaaaagatatttgtttctttatccaccttatttttattacagctaaaaaccaatacaaaccaataaaacctagttaaagctattttctggtttttagttgcaattaatttcccctagggtagaaattaaagctgattaagtcacacacacatactttgttggggtgggggtggcaggtggagaggcagtgtacttgggttagctacaattaaaaacagtatttcaattcctcatttgacttattttatatatagacagggccttagtgataagatggtgtaaataatttaggatattcatgttttaaagtgaagcataaatatttattttgcaaaatgttttctagtttgaaggatgttccattattaccatttttagattaatctgtatggtcaaggaatatcagagaaacctgtaggttatttattttctgcagtgtcattttgtcaaatggttggtattataattgttcttttcttattaattttataaccagtgcataattcttacattagattttaaaaaagaattatgctataaatctttataaatgtgtacatatatttcttaaatattgcaattgcctaaatgttgtatattttaaggctgttttctcttgctcttaatgttgaggaaaactataaattgatctataatgcatctactgttaatggttttggttagtttgatattcattgtttttaaacactttccaatatggaaactttaacaccttttatacaattctctactattcaagatattctttaaaatatctcaccagaaacttacaattttatactttgtaatttttagtttctgtaatttgaggaagtgactttttttgtttgggttaagtaaaaagcctttgattgattacca

SEQ ID NO: 375500 - DNA, 5636 bp, Homo sapiens
aagtgggaatttgaatcctgtgggccgttgaatgtggctgctcgcggtcggcgtgccccgacgtacagcgggccgggaaaagtggcactgaggctctggaacttctgcccagctctccttgctaaaaaacattcccttcaatttaaaaaatgttcccgactcttaacaccccagttgagaactactgatcttagatgtattaaagtaaaatgaatgaaagtaaacctggtgactcacagaaccttgcttgtgttttctgtcgaaaacatgatgactgtcctaataaatacggagaaaagaaaactaaggagaaatggaatctcactgtacattactactgtttgttgatgtcaagtggaatttggcagagaggcaaagaagaagaaggagtttatggttttctaatagaagatatcaggaaggaagtgaatagagcttctaaactgaaatgctgtgtttgcaagaaaaatggtgcttcaattggatgtgttgcaccccgatgtaaacgaagttatcatttcccatgtggacttcagagagaatgtattttccagtttactggcaattttgcgtcattttgttgggaccatcgacctgttcaaataattacatctaataattatagagagtccttaccatgcaccatttgcttggaatttattgagcctattccaagttataacatattacgaagtccttgttgtaagaacgcttggtttcatagagactgtttacaggttcaagcaataaatgcgggagtgtttttctttaggtgtacaatatgcaataatagtgacatctttcagaaagagatgttgagaatgggaattcatattcctgaaaaagatgcttcctgggaattagaggaaaacgcttatcaagagcttctgcagcactatgagcgttgtgatgttcgaagatgtcgttgcaaagaagggcgagactataatgcacctgatagcaaatgggaaataaagcgctgtcagtgttgtggttccagtggcacacatttagcctgctcctcattacggtcatgggagcaaaattgggagtgtttggaatgtaggggtattatctacaattcaggagagttccaaaaagccaaaaaacatgtattacccaattctaataatgtggggattacagattgtttgttggaagagtcatcacctaaattacccagacagtcacctggatcccagagtaaagatctactgaggcaaggcagcaaatttagaagaaatgtatcaacactattaatagagttaggattccaaattaaaaaaaaaactaaaagattgtatatcaacaaagccaatatctggaatagtgccttagatgcattcagaaatcgaaactttaatccttcatatgcaattgaagtagcatatgttattgaaaatgataattttggaagtgagcatcctggatcaaagcaagaatttctgagtctcttaatgcaacatcttgagaactcatcattgtttgaagggtccttgtcaaagaacttgtctctaaattctcaagctctgaaagagaatctttactatgaagctggcaaaatgcttgccatttctttagttcacggtggtccttcacctggtttcttttctaaaaccttgtttaactgccttgtttatggaccagaaaatacccagccaattttagatgatgtttcagactttgatgtggcacagattataatcaggataaatactgcaacaactgtagctgacttaaagtcaataataaatgaatgctataactaccttgagttaattggatgtctcagacttataacgacattaagtgataaatatatgttagtaaaagacatacttggctaccatgtaattcagagagtccacacaccctttgaaagttttaagcagggtctgaaaacccttggtgttttggagaaaattcaggcttatccagaagcattttgtagcatcctgtgtcataaacctgagagtctttctgcaaaaatccttagtgagctttttacagtacacacattacctgatgtgaaagctttggggttttggaacagttacttacaggctgttgaagatggtaaatctacaacaacaatggaagacattcttatttttgcaactggttgcagttccattcctccagctggatttaaacccactccttcaattgagtgtctgcatgtggattttcctgttggaaacaagtgtaataactgtttagcaattcccatcaccaatacatataaagagtttcaagaaaatatggacttcaccataagaaacactctaagactagaaaaggaagaaagttctcattacattggacattaaaatgtttccttgaacaaagagaagcttctttaaaagctgctattgataactctcttttatttcactaaccttttcatcatcactttgaacaaactagttagcttcttgacctaataaaatttatgatatgaatataaaggaatattatagccacttaggctaaaaaaaggttttttttgttaaagcatactagtcaaaattggtgataatttctcattttcttgatatagatacttcataaacctcaatataaatactctcaaaatggttgtatggattttatttaggtatggtagcatggttaataaaagtaaaaactgttttactcacattttttgtaaattaggattacatatagaatgccacaatttctctaggtttattcaattttcaaattattcctcattttattttaaagcattaaatagaaaagctaattggttaaattttgttatataaatcagagtcatatattctgggatttgtgttactatgcatacttttctaggatgtcaccaaattagttgtttaaaatgtttttagattactgatttatattaagatgacccacactgcaattagattatgcctagtgggaagtattatataaaaagcagaattaagctgggcacatgtgcttgtaatctcagttataagggaggctgaggtgggagaatcgagatactcagccagcctggcaatgtagcaaagactccatctcaaaaaaaaaaacagaattgcacaaattttctggaatctatggacattccatgagcttaaacacttttgaggtggataacatttagttgaaaatacctaagaaagtgtgtcttctttaaagccttggctttaatcatgggaaattgttgttgttgttgttgttgtttgtatcctatgtttggtattctgtatgtctgatccataatcattttagatatttgaatgatctctgtggattggtaggtttggccatttgaccattatttattatcaagttggttgtatgctaaggtaagttgacgccatagcattatacagttatcttcattgctcttgaatgatatctgttatataagcaatgtataaataaagtaaaaaggatagaatgaaaaacccattctaatgtcaccactcagagataagtaccgtatttctgtgtatccttctataaactctttacttctgtttcctttattttttaactttaataatgctactaaaagacaatacctaaaagtaactgtactaacaaagtgctaacaatgtgaaaatatatagtcccatagtcatgtccccatatttatactcccacagaagaaaaaattggaaaacaaagtctgatgtccttaatctattaacatatttaaatgatataatggttcagttttccatgaaagtaaatcattatgggaagtaaaatgttttaaccatatttttcttaatacacaaagcaggtgtcagctgttgtattctcacccttcttaagaaaaatcattacattattgatattttttaagtaacagaatagatttgaaagagataatatatctcttaataccaaaggaaaactaaaacataattctagtgtacttttctttgttccctcatgtctttttcaatctgtacactaacatacctagcaaatttgttttactttaacttgaaatatttaagaacattaaacaagacatttctttggctttggttgaatttttttgtctcaccaatagtaattgaaagatcaattatcaaagagtttgaatagctaatataaaccccaaagtcaccatacagtttttattccaaatatgttgataaaaagatatttgtttctttatccaccttatttttattacagctaaaaaccaatacaaaccaataaaacctagttaaagctattttctggtttttagttgcaattaatttcccctagggtagaaattaaagctgattaagtcacacacacatactttgttggggtgggggtggcaggtggagaggcagtgtacttgggttagctacaattaaaaacagtatttcaattcctcatttgacttattttatatatagacagggccttagtgataagatggtgtaaataatttaggatattcatgttttaaagtgaagcataaatatttattttgcaaaatgttttctagtttgaaggatgttccattattaccatttttagattaatctgtatggtcaaggaatatcagagaaacctgtaggttatttattttctgcagtgtcattttgtcaaatggttggtattataattgttcttttcttattaattttataaccagtgcataattcttacattagattttaaaaaagaattatgctataaatctttataaatgtgtacatatatttcttaaatattgcaattgcctaaatgttgtatattttaaggctgttttctcttgctcttaatgttgaggaaaactataaattgatctataatgcatctactgttaatggttttggttagtttgatattcattgtttttaaacactttccaatatggaaactttaacaccttttatacaattctctactattcaagatattctttaaaatatctcaccagaaacttacaattttatactttgtaatttttagtttctgtaatttgaggaagtgactttttttgtttgggttaagtaaaaagcctttgattgattaccagcatgagaattcaccttggtttctattttatgcatttgtaaatttttcccctaattatatggaagctattggaacttttgtattcagtgctaaatactaagtcaaggggagtatattaggtaagttttttcagtgactgtgcctttagcattcagtcattataagaaaatgatcagaacaaaatcattacattataaacatgtaattcttttatatagtgattatcatgtactgcattgttactttaaaataagctattaaactagtttttatggttcaagtaatgcaatacaaagtttcatgcttcaagtaatgcaatacaaaacataacccatttaatgatgaattacttgaatgtatattatctgtggtttaggaaaatttggattgtcttgaagagactcagttttcaagttctgattttgaccattatctcttctaattcataaacatatcccagtacctacactatgccaggtattatgctaggtgatcgtttatatgtcagcctatttcccccccttttaaagactgccagattaaccaaaaagcgtgacatttataacaatgttttataaataaataaatgtgtttatgccactaaaggt

SEQ ID NO: 375501 - DNA, 5084 bp, Homo sapiens
actttctgttgtcatggcactcattgtctataaggggaaatagatcactagacagtatactacattatgtgttaataaatgctatagtacagcctgggcaacatggcgaaacactgtctatataaaaaataagccagttgtggtggtatgtgcctgcagaacagctacttgggaggctgaggcagggagaatcgcttgaacccggcaggcggaggttgcagtgacctgagattgcaccactgtactccagcctgggcgaaagagcaagactgcgtctcaagaacaaaaaaagagatgcttcctgggaattagaggaaaacgcttatcaagagcttctgcagcactatgagcgttgtgatgttcgaagatgtcgttgcaaagaagggcgagactataatgcacctgatagcaaatgggaaataaagcgctgtcagtgttgtggttccagtggcacacatttagcctgctcctcattacggtcatgggagcaaaattgggagtgtttggaatgtaggggtattatctacaattcaggagagttccaaaaagccaaaaaacatgtattacccaattctaataatgtggggattacagattgtttgttggaagagtcatcacctaaattacccagacagtcacctggatcccagagtaaagatctactgaggcaaggcagcaaatttagaagaaatgtatcaacactattaatagagttaggattccaaattaaaaaaaaaactaaaagattgtatatcaacaaagccaatatctggaatagtgccttagatgcattcagaaatcgaaactttaatccttcatatgcaattgaagtagcatatgttattgaaaatgataattttggaagtgagcatcctggatcaaagcaagaatttctgagtctcttaatgcaacatcttgagaactcatcattgtttgaagggtccttgtcaaagaacttgtctctaaattctcaagctctgaaagagaatctttactatgaagctggcaaaatgcttgccatttctttagttcacggtggtccttcacctggtttcttttctaaaaccttgtttaactgccttgtttatggaccagaaaatacccagccaattttagatgatgtttcagactttgatgtggcacagattataatcaggataaatactgcaacaactgtagctgacttaaagtcaataataaatgaatgctataactaccttgagttaattggatgtctcagacttataacgacattaagtgataaatatatgttagtaaaagacatacttggctaccatgtaattcagagagtccacacaccctttgaaagttttaagcagggtctgaaaacccttggtgttttggagaaaattcaggcttatccagaagcattttgtagcatcctgtgtcataaacctgagagtctttctgcaaaaatccttagtgagctttttacagtacacacattacctgatgtgaaagctttggggttttggaacagttacttacaggctgttgaagatggtaaatctacaacaacaatggaagacattcttatttttgcaactggttgcagttccattcctccagctggatttaaacccactccttcaattgagtgtctgcatgtggattttcctgttggaaacaagtgtaataactgtttagcaattcccatcaccaatacatataaagagtttcaagaaaatatggacttcaccataagaaacactctaagactagaaaaggaagaaagttctcattacattggacattaaaatgtttccttgaacaaagagaagcttctttaaaagctgctattgataactctcttttatttcactaaccttttcatcatcactttgaacaaactagttagcttcttgacctaataaaatttatgatatgaatataaaggaatattatagccacttaggctaaaaaaaggttttttttgttaaagcatactagtcaaaattggtgataatttctcattttcttgatatagatacttcataaacctcaatataaatactctcaaaatggttgtatggattttatttaggtatggtagcatggttaataaaagtaaaaactgttttactcacattttttgtaaattaggattacatatagaatgccacaatttctctaggtttattcaattttcaaattattcctcattttattttaaagcattaaatagaaaagctaattggttaaattttgttatataaatcagagtcatatattctgggatttgtgttactatgcatacttttctaggatgtcaccaaattagttgtttaaaatgtttttagattactgatttatattaagatgacccacactgcaattagattatgcctagtgggaagtattatataaaaagcagaattaagctgggcacatgtgcttgtaatctcagttataagggaggctgaggtgggagaatcgagatactcagccagcctggcaatgtagcaaagactccatctcaaaaaaaaaaacagaattgcacaaattttctggaatctatggacattccatgagcttaaacacttttgaggtggataacatttagttgaaaatacctaagaaagtgtgtcttctttaaagccttggctttaatcatgggaaattgttgttgttgttgttgttgtttgtatcctatgtttggtattctgtatgtctgatccataatcattttagatatttgaatgatctctgtggattggtaggtttggccatttgaccattatttattatcaagttggttgtatgctaaggtaagttgacgccatagcattatacagttatcttcattgctcttgaatgatatctgttatataagcaatgtataaataaagtaaaaaggatagaatgaaaaacccattctaatgtcaccactcagagataagtaccgtatttctgtgtatccttctataaactctttacttctgtttcctttattttttaactttaataatgctactaaaagacaatacctaaaagtaactgtactaacaaagtgctaacaatgtgaaaatatatagtcccatagtcatgtccccatatttatactcccacagaagaaaaaattggaaaacaaagtctgatgtccttaatctattaacatatttaaatgatataatggttcagttttccatgaaagtaaatcattatgggaagtaaaatgttttaaccatatttttcttaatacacaaagcaggtgtcagctgttgtattctcacccttcttaagaaaaatcattacattattgatattttttaagtaacagaatagatttgaaagagataatatatctcttaataccaaaggaaaactaaaacataattctagtgtacttttctttgttccctcatgtctttttcaatctgtacactaacatacctagcaaatttgttttactttaacttgaaatatttaagaacattaaacaagacatttctttggctttggttgaatttttttgtctcaccaatagtaattgaaagatcaattatcaaagagtttgaatagctaatataaaccccaaagtcaccatacagtttttattccaaatatgttgataaaaagatatttgtttctttatccaccttatttttattacagctaaaaaccaatacaaaccaataaaacctagttaaagctattttctggtttttagttgcaattaatttcccctagggtagaaattaaagctgattaagtcacacacacatactttgttggggtgggggtggcaggtggagaggcagtgtacttgggttagctacaattaaaaacagtatttcaattcctcatttgacttattttatatatagacagggccttagtgataagatggtgtaaataatttaggatattcatgttttaaagtgaagcataaatatttattttgcaaaatgttttctagtttgaaggatgttccattattaccatttttagattaatctgtatggtcaaggaatatcagagaaacctgtaggttatttattttctgcagtgtcattttgtcaaatggttggtattataattgttcttttcttattaattttataaccagtgcataattcttacattagattttaaaaaagaattatgctataaatctttataaatgtgtacatatatttcttaaatattgcaattgcctaaatgttgtatattttaaggctgttttctcttgctcttaatgttgaggaaaactataaattgatctataatgcatctactgttaatggttttggttagtttgatattcattgtttttaaacactttccaatatggaaactttaacaccttttatacaattctctactattcaagatattctttaaaatatctcaccagaaacttacaattttatactttgtaatttttagtttctgtaatttgaggaagtgactttttttgtttgggttaagtaaaaagcctttgattgattaccagcatgagaattcaccttggtttctattttatgcatttgtaaatttttcccctaattatatggaagctattggaacttttgtattcagtgctaaatactaagtcaaggggagtatattaggtaagttttttcagtgactgtgcctttagcattcagtcattataagaaaatgatcagaacaaaatcattacattataaacatgtaattcttttatatagtgattatcatgtactgcattgttactttaaaataagctattaaactagtttttatggttcaagtaatgcaatacaaagtttcatgcttcaagtaatgcaatacaaaacataacccatttaatgatgaattacttgaatgtatattatctgtggtttaggaaaatttggattgtcttgaagagactcagttttcaagttctgattttgaccattatctcttctaattcataaacatatcccagtacctacactatgccaggtattatgctaggtgatcgtttatatgtcagcctatttcccccccttttaaagactgccagattaaccaaaaagcgtgacatttataacaatgttttataaataaataaatgtgtttatgccactaaaggt

SEQ ID NO: 375502 - DNA, 2969 bp, Homo sapiens
  misc_feature (124)..(124): n is a, c, g, or t
gctccagacccactcgtctgataggcctccgctggtaagtgcttccacatgccgcacatgtgcctactctctttcctcgggcactttggaggcacggtgcctctacactcgctaaagggttctnccggcataattggcaacccgggttctccctcccgactgttaagccgcgccgtggattgtaaacgtccccgtaaggcgaattggtacccgcgcccccctgcgagtgtttttcttcattctctcattctttttagaaggtaaaatagcttaaagcattaatatctaaacaaatcaatctgttaatagtagtcacaaaatatgcttaatatagaaacccacattcatgtttttaagaaaaaagtgtaaattgtattccatctcaaaaaaaaaaacagaattgcacaaattttctggaatctatggacattccatgagcttaaacacttttgaggtggataacatttagttgaaaatacctaagaaagtgtgtcttctttaaagccttggctttaatcatgggaaattgttgttgttgttgttgttgtttgtatcctatgtttggtattctgtatgtctgatccataatcattttagatatttgaatgatctctgtggattggtaggtttggccatttgaccattatttattatcaagttggttgtatgctaaggtaagttgacgccatagcattatacagttatcttcattgctcttgaatgatatctgttatataagcaatgtataaataaagtaaaaaggatagaatgaaaaacccattctaatgtcaccactcagagataagtaccgtatttctgtgtatccttctataaactctttacttctgtttcctttattttttaactttaataatgctactaaaagacaatacctaaaagtaactgtactaacaaagtgctaacaatgtgaaaatatatagtcccatagtcatgtccccatatttatactcccacagaagaaaaaattggaaaacaaagtctgatgtccttaatctattaacatatttaaatgatataatggttcagttttccatgaaagtaaatcattatgggaagtaaaatgttttaaccatatttttcttaatacacaaagcaggtgtcagctgttgtattctcacccttcttaagaaaaatcattacattattgatattttttaagtaacagaatagatttgaaagagataatatatctcttaataccaaaggaaaactaaaacataattctagtgtacttttctttgttccctcatgtctttttcaatctgtacactaacatacctagcaaatttgttttactttaacttgaaatatttaagaacattaaacaagacatttctttggctttggttgaatttttttgtctcaccaatagtaattgaaagatcaattatcaaagagtttgaatagctaatataaaccccaaagtcaccatacagtttttattccaaatatgttgataaaaagatatttgtttctttatccaccttatttttattacagctaaaaaccaatacaaaccaataaaacctagttaaagctattttctggtttttagttgcaattaatttcccctagggtagaaattaaagctgattaagtcacacacacatactttgttggggtgggggtggcaggtggagaggcagtgtacttgggttagctacaattaaaaacagtatttcaattcctcatttgacttattttatatatagacagggccttagtgataagatggtgtaaataatttaggatattcatgttttaaagtgaagcataaatatttattttgcaaaatgttttctagtttgaaggatgttccattattaccatttttagattaatctgtatggtcaaggaatatcagagaaacctgtaggttatttattttctgcagtgtcattttgtcaaatggttggtattataattgttcttttcttattaattttataaccagtgcataattcttacattagattttaaaaaagaattatgctataaatctttataaatgtgtacatatatttcttaaatattgcaattgcctaaatgttgtatattttaaggctgttttctcttgctcttaatgttgaggaaaactataaattgatctataatgcatctactgttaatggttttggttagtttgatattcattgtttttaaacactttccaatatggaaactttaacaccttttatacaattctctactattcaagatattctttaaaatatctcaccagaaacttacaattttatactttgtaatttttagtttctgtaatttgaggaagtgactttttttgtttgggttaagtaaaaagcctttgattgattaccagcatgagaattcaccttggtttctattttatgcatttgtaaatttttcccctaattatatggaagctattggaacttttgtattcagtgctaaatactaagtcaaggggagtatattaggtaagttttttcagtgactgtgcctttagcattcagtcattataagaaaatgatcagaacaaaatcattacattataaacatgtaattcttttatatagtgattatcatgtactgcattgttactttaaaataagctattaaactagtttttatggttcaagtaatgcaatacaaagtttcatgcttcaagtaatgcaatacaaaacataacccatttaatgatgaattacttgaatgtatattatctgtggtttaggaaaatttggattgtcttgaagagactcagttttcaagttctgattttgaccattatctcttctaattcataaacatatcccagtacctacactatgccaggtattatgctaggtgatcgtttatatgtcagcctatttcccccccttttaaagactgccagattaaccaaaaagcgtgacatttataacaatgttttataaataaataaatgtgtttatgccactaaaggt

SEQ ID NO: 375503 - DNA, 970 bp, Homo sapiens
aagtgggaatttgaatcctgtgggccgttgaatgtggctgctcgcggtcggcgtgccccgacgtacagcgggccgggaaaagtggcactgaggctctggaacttctgcccagctctccttgtaaaatgaatgaaagtaaacctggtgactcacagaaccttgcttgtgttttctgtcgaaaacatgatgactgtcctaataaatacggagaaaagaaaactaaggagaaatggaatctcactgtacattactactgtttgttgatgtcaagtggaatttggcagagaggcaaagaagaagaaggagtttatggttttctaatagaagatatcaggaaggaagtgaatagagcttctaaactgaaatgctgtgtttgcaagaaaaatggtgcttcaattggatgtgttgcaccccgatgtaaacgaagttatcatttcccatgtggacttcagagagaatgtattttccagtttactggcaattttgcgtcattttgttgggaccatcgacctgttcaaataattacatctaataattatagagagtccttaccatgcaccatttgcttggaatttattgagcctattccaagttataacatattacgaagtccttgttgtaagaacgcttggtttcatagagactgtttacagcaaatgggaaataaagcgctgtcagtgttgtggttccagtggcacacatttagcctgctcctcattacggtcatgggagcaaaattgggagtgtttggaatgtaggggtattatctacaattcaggagagttccaaaaagccaaaaaacatgtattacccaattctaataatgtggggattacagattgtttgttggaagagtcatcacctaaattacccagacagtcacctggatcccagagtaaagatctactgaggcaaggcagcaaatttagaagaaatgtatcaacactattaatagagttaggattccaaa

SEQ ID NO: 375504 - DNA, 174 bp, Homo sapiens
gcggccgcctactactactactactgctcgaattcaagcttctaacgatgtacggggacatgaacgttattatattgtcgaattcctactgacaacattataactgtatgggagcttaactttataaggaaatgtattttgacactggtatcttattaaagtattctgatccta

SEQ ID NO: 375505 - DNA, 2016 bp, Homo sapiens
caactaggtatttctaacgccagcacactatttacaagatggacttacctggcagacttgcccaggtcaccaagcagtggcctttttctgagatgctcactttattatccctatttttaaagtacacaattgttttacctgttctgaaatgttcttaaattttgtaggatttttttcctccccaccttcaatgacttctaatttatattatccataggtttctctccctccttctccttctcacacacaactgtccatactaacaagtttggtgcatgtctgttcttctgtagggagaagctttagcttcattttactaaaaagattcctcgttattgttgttgccaaagagaaacaaaaatgattttgctttccaagcttggtttgtggcgtctccctcgcagagcccttctcgtttcttttttaaactaatcaccatattgtaaatttcagggtttttttttttgtttaagctgactctttgctctaattttggaaaaaaagaaatgtgaagggtcaactccaacgtatgtggttatctgtgaaagttgcacagcgtggcttttcctaaactggtgtttttcccccgcatttggtggattttttattattattcaaaaacataactgagttttttaaaagaggagaaaatttatatctgggttaagtgtttatcatatatatgggtactttgtaatatctaaaaacttagaaacggaaatggaatcctgctcacaaaatcactttaagatcttttcgaagctgttaatttttcttagtgttgtggacactgcagacttgtccagtgctcccacggcctgtacggacactgtggaaggcctccctctgtcggctttttgccatctgtgatatgccataggtgtgacaatccgagcagtggagtcattcagcgggagcactgcgcgctatcccctcacattctctatgtactatgtatgtatgtattattattattgctgccaagagggtctgatggcacgttgtggggtcggggggtggggcggggaagtgctctaacttttcttaaggttttgttgctagcccttcaagtgcactgagctatgtgactcggatggtctttcacacggcacatttggacatttccagaactaccatgagatggtttagacgggaattcatgcaaatgaggggtcaaaaatggtatagtgaccccgtccacgtcctccaagctcacgaccttggagccccgtggagctggactgaggaggaggctgcacagcgggagagcagctggtccagaccagccctgcagcccccactcagccggcagccagatggccccgcaaggcctccagggatggcccctagccacaggccctggctgaggtctctgggtcggtcagtgacatgtaggtaggaagcactgaaaatagtgttcccagagcactttgcaactccctgggtaagagggacgacacctctggtttttcaataccaattacatggaacttttctgtaatgggtacaatgaagaagtttctaaaaacacacacaaagcacattgggccaactatttagtaagcccggatagacttattgccaaaaacaaaaaatagctttcaaaagaaatttaagttctatgagaaattccttagtcatggtgttgcgtaaatcatattttagctgcacggcattaccccacacagggtggcagaacttgaagggttactgacgtgtaaatgctggtatttgatttcctgtgtgtgttgccctggcattaagggcattttacccttgcagttttactaaaacactgaaaaatattccaagcttcatattaaccctacctgtcaacgtaacgatttcatgaacgttattatattgtcgaattcctactgacaacattataactgtatgggagcttaactttataaggaaatgtattttgacactggtatcttattaaagtattctgatcctaaaaaaaaaaaaggggggggcaaatccggggccatactccccttttaagggccc

SEQ ID NO: 375506 - DNA, 1907 bp, Homo sapiens
caactaggtatttctaacgccagcacactatttacaagatggacttacctggcagacttgcccaggtcaccaagcagtggcctttttctgagatgctcactttattatccctatttttaaagtacacaattgttttacctgttctgaaatgttcttaaattttgtaggatttttttcctccccaccttcaatgacttctaatttatattatccataggtttctctccctccttctccttctcacacacaactgtccatactaacaagtttggtgcatgtctgttcttctgtagggagaagctttagcttcattttactaaaaagattcctcgttattgttgttgccaaagagaaacaaaaatgattttgctttccaagcttggtttgtggcgtctccctcgcagagcccttctcgtttcttttttaaactaatcaccatattgtaaatttcagggtttttttttttgtttaagctgactctttgctctaattttggaaaaaaagaaatgtgaagggtcaactccaacgtatgtggttatctgtgaaagttgcacagcgtggcttttcctaaactggtgtttttcccccgcatttggtggattttttattattattcaaaaacataactgagttttttaaaagaggagaaaatttatatctgggttaagtgtttatcatatatatgggtactttgtaatatctaaaaatgttaatttttcttagtgttgtggacactgcagacttgtccagtgctcccacggcctgtacggacactgtggaaggcctccctctgtcggctttttgccatctgtgatatgccataggtgtgacaatccgagcagtggagtcattcagcgggagcactgcgcgctatcccctcacattctctatgtactatgtatgtatgtattattattattgctgccaagagggtctgatggcacgttgtggggtcggggggtggggcggggaagtgctctaacttttcttaaggttttgttgctagcccttcaagtgcactgagctatgtgactcggatggtctttcacacggcacatttggacatttccagaactaccatgagatggtttagacgggaattcatgcaaatgaggggtcaaaaatggtatagtgaccccgtccacgtcctccaagctcacgaccttggagccccgtggagctggactgaggaggaggctgcacagcgggagagcagctggtccagaccagccctgcagcccccactcagccggcagccagatggccccgcaaggcctccagggatggcccctagccacaggccctggctgaggtctctgggtcggtcagtgacatgtaggtaggaagcactgaaaatagtgttcccagagcactttgcaactccctgggtaagagggacgacacctctggtttttcaataccaattacatggaacttttctgtaatgggtacaatgaagaagtttctaaaaacacacacaaagcacattgggccaactatttagtaagcccggatagacttattgccaaaaacaaaaaatagctttcaaaagaaatttaagttctatgagaaattccttagtcatggtgttgcgtaaatcatattttagctgcacggcattaccccacacagggtggcagaacttgaagggttactgacgtgtaaatgctggtatttgatttcctgtgtgtgttgccctggcattaagggcattttacccttgcagttttactaaaacactgaaaaatattccaagcttcatattaaccctacctgtcaacgtaacgatttcatgaacgttattatattgtcgaattcctactgacaacattataactgtatgggagcttaactttataaggaaatgtattttgacactggtatcttattaaagtattctgatccta

SEQ ID NO: 375507 - DNA, 1962 bp, Homo sapiens
caactaggtatttctaacgccagcacactatttacaagatggacttacctggcagacttgcccaggtcaccaagcagtggcctttttctgagatgctcactttattatccctatttttaaagtacacaattgttttacctgttctgaaatgttcttaaattttgtaggatttttttcctccccaccttcaatgacttctaatttatattatccataggtttctctccctccttctccttctcacacacaactgtccatactaacaagtttggtgcatgtctgttcttctgtagggagaagctttagcttcattttactaaaaagattcctcgttattgttgttgccaaagagaaacaaaaatgattttgctttccaagcttggtttgtggcgtctccctcgcagagcccttctcgtttcttttttaaactaatcaccatattgtaaatttcagggtttttttttttgtttaagctgactctttgctctaattttggaaaaaaagaaatgtgaagggtcaactccaacgtatgtggttatctgtgaaagttgcacagcgtggcttttcctaaactggtgtttttcccccgcatttggtggattttttattattattcaaaaacataactgagttttttaaaagaggagaaaatttatatctgggttaagtgtttatcatatatatgggtactttgtaatatctaaaaacttagaaacggaaatggaatcctgctcacaaaatcactttaagatcttttcgaagctgttaatttttcttagtgttgtggacactgcagacttgtccagtgctcccacggcctgtacggacactgtggaaggcctccctctgtcggctttttgccatctgtgatatgccataggtgtgacaatccgagcagtggagtcattcagcgggagcactgcgcgctatcccctcacattctctatgtactatgtatgtatgtattattattattgctgccaagagggtctgatggcacgttgtggggtcggggggtggggcggggaagtgctctaacttttcttaaggttttgttgctagcccttcaagtgcactgagctatgtgactcggatggtctttcacacggcacatttggacatttccagaactaccatgagatggtttagacgggaattcatgcaaatgaggggtcaaaaatggtatagtgaccccgtccacgtcctccaagctcacgaccttggagccccgtggagctggactgaggaggaggctgcacagcgggagagcagctggtccagaccagccctgcagcccccactcagccggcagccagatggccccgcaaggcctccagggatggcccctagccacaggccctggctgaggtctctgggtcggtcagtgacatgtaggtaggaagcactgaaaatagtgttcccagagcactttgcaactccctgggtaagagggacgacacctctggtttttcaataccaattacatggaacttttctgtaatgggtacaatgaagaagtttctaaaaacacacacaaagcacattgggccaactatttagtaagcccggatagacttattgccaaaaacaaaaaatagctttctattttagctgcacggcattaccccacacagggtggcagaacttgaagggttactgacgtgtaaatgctggtatttgatttcctgtgtgtgttgccctggcattaagggcattttacccttgcagttttactaaaacactgaaaaatattccaagcttcatattaaccctacctgtcaacgtaacgatttcatgaacgttattatattgtcgaattcctactgacaacattataactgtatgggagcttaactttataaggaaatgtattttgacactggtatcttattaaagtattctgatcctaaaaaaaaaaaaggggggggcaaatccggggccatactccccttttaagggccc

SEQ ID NO: 375508 - DNA, 1602 bp, Homo sapiens
caactaggtatttctaacgccagcacactatttacaagatggacttacctggcagacttgcccaggtcaccaagcagtggcctttttctgagatgctcactttattatccctatttttaaagtacacaattgttttacctgttctgaaatgttcttaaattttgtaggatttttttcctccccaccttcaatgacttctaatttatattatccataggtttctctccctccttctccttctcacacacaactgtccatactaacaagtttggtgcatgtctgttcttctgtagggagaagctttagcttcattttactaaaaagattcctcgttattgttgttgccaaagagaaacaaaaatgattttgctttccaagcttggtttgtggcgtctccctcgcagagcccttctcgtttcttttttaaactaatcaccatattgtaaatttcagggtttttttttttgtttaagctgactctttgctctaattttggaaaaaaagaaatgtgaagggtcaactccaacgtatgtggttatctgtgaaagttgcacagcgtggcttttcctaaactggtgtttttcccccgcatttggtggattttttattattattcaaaaacataactgagttttttaaaagaggagaaaatttatatctgggttaagtgtttatcatatatatgggtactttgtaatatctaaaaacttagaaacggaaatggaatcctgctcacaaaatcactttaagatcttttcgaagctgttaatttttcttagtgttgtggacactgcagacttgtccagtgctcccacggcctgtacggacactgtggaaggcctccctctgtcggctttttgccatctgtgatatgccataggtgtgacaatccgagcagtggagtcattcagcgggagcactgcgcgctatcccctcacattctctatgtactatgtatgtatgtattattattattgctgccaagagggtctgatggcacgttgtggggtcggggggtggggcggggaagtgctctaacttttcttaaggttttgttgctagcccttcaagtgcactgagctatgtgactcggatggtctttcacacggcacatttggacatttccagaactaccatgagatggtttagacgggaattcatgcaaatgaggggtcaaaaatggtatagtgaccccgtccacgtcctccaagctcacgaccttggagccccgtggagctggactgaggaggaggctgcacagcgggagagcagctggtccagaccagccctgcagcccccactcagccggcagccagatggccccgcaaggcctccagggatggcccctagccacaggccctggctgaggtctctgggtcggtcagtgacatgtaggtaggaagcactgaaaatagtgttcccagagcactttgcaactccctgggtaagagggacgacacctctggtttttcaataccaattacatggaacttttctgtaatgggtacaatgaagaagtttctaaaaacacacacaaacacacacacacaacacacacacacacacacacacacacacacacacaaatgctatcccagaaac

SEQ ID NO: 375509 - DNA, 1308 bp, Homo sapiens
caactaggtatttctaacgccagcacactatttacaagatggacttacctggcagacttgcccaggtcaccaagcagtggcctttttctgagatgctcactttattatccctatttttaaagtacacaattgttttacctgttctgaaatgttcttaaattttgtaggatttttttcctccccaccttcaatgacttctaatttatattatccataggtttctctccctccttctccttctcacacacaactgtccatactaacaagtttggtgcatgtctgttcttctgtagggagaagctttagcttcattttactaaaaagattcctcgttattgttgttgccaaagagaaacaaaaatgattttgctttccaagcttggtttgtggcgtctccctcgcagagcccttctcgtttcttttttaaactaatcaccatattgtaaatttcagggtttttttttttgtttaagctgactctttgctctaattttggaaaaaaagaaatgtgaagggtcaactccaacgtatgtggttatctgtgaaagttgcacagcgtggcttttcctaaactggtgtttttcccccgcatttggtggattttttattattattcaaaaacataactgagttttttaaaagaggagaaaatttatatctgggttaagtgtttatcatatatatgggtactttgtaatatctaaaaacttagaaacggaaatggaatcctgctcacaaaatcactttaagatcttttcgaagctgttaatttttcttagtgttgtggacactgcagacttgtccagtgctcccacggcctgtacggacactgtggaaggcctccctctgtcggctttttgccatctgtgatatgccataggtgtgacaatccgagcagtggagtcattcagcgggagcactgcgcgctatcccctcacattctctatgtactatgtatgtatgtattattattattgctgccaagagggtctgatggcacgttgtggggtcggggggtggggcggggaagtgctctaactcccttcttactttctctcttatcctctttcattccacctcattctcttactctctatccctttcaaacccttacatcttcatcctctcataacctaccactcatcaccctacactttaatccatactagttcactctcctaactgttcctcttatccctttcatcttgtaccaatataattaccttatacccgctttctacttcactgtcctcctatctgtacatagttatatcactttgttcttacctttcgttgttccttactcac

SEQ ID NO: 375510 - DNA, 2138 bp, Homo sapiens
caactaggtatttctaacgccagcacactatttacaagatggacttacctggcagacttgcccaggtcaccaagcagtggcctttttctgagatgctcactttattatccctatttttaaagtacacaattgttttacctgttctgaaatgttcttaaattttgtaggatttttttcctccccaccttcaatgacttctaatttatattatccataggtttctctccctccttctccttctcacacacaactgtccatactaacaagtttggtgcatgtctgttcttctgtagggagaagctttagcttcattttactaaaaagattcctcgttattgttgttgccaaagagaaacaaaaatgattttgctttccaagcttggtttgtggcgtctccctcgcagagcccttctcgtttcttttttaaactaatcaccatattgtaaatttcagggtttttttttttgtttaagctgactctttgctctaattttggaaaaaaagaaatgtgaagggtcaactccaacgtatgtggttatctgtgaaagttgcacagcgtggcttttcctaaactggtgtttttcccccgcatttggtggattttttattattattcaaaaacataactgagttttttaaaagaggagaaaatttatatctgggttaagtgtttatcatatatatgggtactttgtaatatctaaaaacttagaaacggaaatggaatcctgctcacaaaatcactttaagatcttttcgaagctgttaatttttcttagtgttgtggacactgcagacttgtccagtgctcccacggcctgtacggacactgtggaaggcctccctctgtcggctttttgccatctgtgatatgccataggtgtgacaatccgagcagtggagtcattcagcgggagcactgcgcgctatcccctcacattctctatgtactatgtatgtatgtattattattattgctgccaagagggtctgatggcacgttgtggggtcggggggtggggcggggaagtgctctaacttttcttaaggttttgttgctagcccttcaagtgcactgagctatgtgactcggatggtctttcacacggcacatttggacatttccagaactaccatgagatggtttagacgggaattcatgcaaatgaggggtcaaaaatggtatagtgaccccgtccacgtcctccaagctcacgaccttggagccccgtggagctggactgaggaggaggctgcacagcgggagagcagctggtccagaccagccctgcagcccccactcagccggcagccagatggccccgcaaggcctccagggatggcccctagccacaggccctggctgaggtctctgggtcggtcagtgacatgtaggtaggaagcactgaaaatagtgttcccagagcactttgcaactccctgggtaagagggacgacacctctggtttttcaataccaattacatggaacttttctgtaatgggtacaatgaagaagtttctaaaaacacacacaaagcacattgggccaactatttagtaagcccggatagacttattgccaaaaacaaaaaatagctttcaaaagaaatttaagttctatgagaaattccttagtcatggtgttgcgtaaatcatattttagctgcacggcattaccccacacagggtggcagaacttgaagggttactgacgtgtaaatgctggtatttgatttcctgtgtgtgttgccctggcattaagggcattttacccttgcagttttactaaaacactgaaaaatattccaagcttcatattaaccctacctgtcaacgtaacgatttcatgaacgttattatattgtcgaattcctactgacaacattataactgtatgggagcttaactttataaggaaatgtattttgacactggtatcttattaaagtattctgatcctaaaaaatattccaagcttcatattaaccctacctgtccacgtaccgatttcatgaaccttatcatcttgtcgaattcctcctgacaacattataactgtatggcagcttcacttcataaggaactctacttcgacactggtatatcactacagcatttcgatcataacacaacaac

SEQ ID NO: 375511 - DNA, 1963 bp, Homo sapiens
caactaggtatttctaacgccagcacactatttacaagatggacttacctggcagacttgcccaggtcaccaagcagtggcctttttctgagatgctcactttattatccctatttttaaagtacacaattgttttacctgttctgaaatgttcttaaattttgtaggatttttttcctccccaccttcaatgacttctaatttatattatccataggtttctctccctccttctccttctcacacacaactgtccatactaacaagtttggtgcatgtctgttcttctgtagggagaagctttagcttcattttactaaaaagattcctcgttattgttgttgccaaagagaaacaaaaatgattttgctttccaagcttggtttgtggcgtctccctcgcagagcccttctcgtttcttttttaaactaatcaccatattgtaaatttcagggtttttttttttgtttaagctgactctttgctctaattttggaaaaaaagaaatgtgaagggtcaactccaacgtatgtggttatctgtgaaagttgcacagcgtggcttttcctaaactggtgtttttcccccgcatttggtggattttttattattattcaaaaacataactgagttttttaaaagaggagaaaatttatatctgggttaagtgtttatcatatatatgggtactttgtaatatctaaaaacttagaaacggaaatggaatcctgctcacaaaatcactttaagatcttttcgaagctgttaatttttcttagtgttgtggacactgcagacttgtccagtgctcccacggcctgtacggacactgtggaaggcctccctctgtcggctttttgccatctgtgatatgccataggtgtgacaatccgagcagtggagtcattcagcgggagcactgcgcgctatcccctcacattctctatgtactatgtatgtatgtattattattattgctgccaagagggtctgatggcacgttgtggggtcggggggtggggcggggaagtgctctaacttttcttaaggttttgttgctagcccttcaagtgcactgagctatgtgactcggatggtctttcacacggcacatttggacatttccagaactaccatgagatggtttagacgggaattcatgcaaatgaggggtcaaaaatggtatagtgaccccgtccacgtcctccaagctcacgaccttggagccccgtggagctggactgaggaggaggctgcacagcgggagagcagctggtccagaccagccctgcagcccccactcagccggcagccagatggccccgcaaggcctccagggatggcccctagccacaggccctggctgaggtctctgggtcggtcagtgacatgtaggtaggaagcactgaaaatagtgttcccagagcactttgcaactccctgggtaagagggacgacacctctggtttttcaataccaattacatggaacttttctgtaatgggtacaatgaagaagtttctaaaaacacacacaaagcacattgggccaactatttagtaagcccggatagacttattgccaaaaacaaaaaatagctttcaaaagaaatttaagttctatgagaaattccttagtcatggtgttgcgtaaatcatattttagctgcacggcattaccccacacagggtggcagaacttgaagggttactgacgtgtaaatgctggtatttgatttcctgtgtgtgttgccctggcattaagggcattttacccttgcagttttactaaaacactgaaaaatattccaagcttcatattaaccctacctgtcaacgtaacgatttcatgaacgttattatattgtcgaattcctactgacaacattataactgtatgggagcttaactttataaggaaatgtattttgacactggtatcttattaaagtattctgatccta

SEQ ID NO: 375512 - DNA, 202 bp, Homo sapiens
tcctctacaaccaagaacaaaatcagaatacctcctttaaccacttgtattaaacatagtactggaaaccttagccagagaaaatagggatgaaaaagaaataaacggcatcctaattgaaaagggagaagtaaaattgtccgtttgtacatgacatgatctcatatgttgaaatccctaaagtctccaccaaaaaccatta

SEQ ID NO: 375513 - DNA, 338 bp, Homo sapiens
aaattggttgatttttgcatctaaaaactactgaagcacatttaaaatgaagctacagatcaggttcccagtccatgcttcacactgaacttgctatttgacaatgaattttcacatgacttttcaacatctcccttttctcacatgtaaaattaagagaatagcatctttttacctgctcattgtgaggttgaagagatattatgtgggaaatcactctaaaattagaaggcactgagcatattttgggcatacttcagatgttattcatactctaatttagaagtttaaaaaattaaaatctataaatcaagaaagatgactaaagagaatcattg

SEQ ID NO: 375514 - DNA, 372 bp, Homo sapiens
acagcattccagcagcaggacaggactcaaatccacatttgtctggcagcactgttgacctccacatgagacagcttctcttagtgaagcaagatgggagaacacagcccataggtgtagatggagctgggcagtctctcctgaagacgtttagggctcagcatagtcctgcatcctccacagggcagtgcatcgaggcaggaagcctgctgcaggcaatgttttttctccagcagttctgtttctggaatgctgagtttggtgctcatgcctgtaatcccagcactttgggaggccaaggcaggaggattgcttgaggccaggagttcaagaccagcctggcaaaataatgagacccccccaatctttaca

SEQ ID NO: 375515 - DNA, 358 bp, Homo sapiens
agtggaggaaaagataactgtaaaattttattcaaagcccaatggaatgaatcccataaaaaaaataataagaggcttcagggagtcagaaaaagatttactgtagcttgggaattaggaaaactgccctcatgtgttttcctctacatttgctcatgatctcccacctccatccttggtcctattccagtttactgataaaacataattgagtcaaaaaatatatcatcagcttcagtcccgttgataaagatggtctttcttctaaatctaaaatccacccaaatctggatacaatgcaatagcttctaggaccattatgtctctgtttctcaagttggtctatttaaaaaacaaa

SEQ ID NO: 375516 - DNA, 210 bp, Homo sapiens
ttaatcccagtctcacagatacaaaacagccagtatgaaatcacttccacacatcagaatgtggtatgacacacagagacaaaagcaaaaggctggatatggctaactccatcaacctaataactcacaagtagggtttcaaaaatttggttaaaaaaaaaataaaattggccaggtgcagtggctcatgcctgtaatcccctgcactgt

SEQ ID NO: 375517 - DNA, 410 bp, Homo sapiens
caataatttattggacattttaaaataactaaaagagtatgactggattgtttgtaacacaaagaaaggataaatgctgatgtgattattatgcattgtatgcctgtatcaaaatatctcacataatccataaatagatacaccgactatacccacagaaataaaaactaggagaggaaaagaaattctaactacaacattggtaataactcattcacaatttgataataaagtaatatagaattgtaaagtacattttcactcttttaaaaaatacagcaaagagaattttaattttttaatttattagtaataacaacttgagaattgcatagtattaaggcatcaattctaggagtgtgggctgaggacccttttggggtgcctatgagggcaatactattttacag

SEQ ID NO: 375518 - DNA, 222 bp, Homo sapiens
ccgagattgcaccattgcactccagcctgggtgacaagagtgaaactctgtctcaaaaaaaaaaaaaaaaaaaaagattttggcagcaggctcacgacctttctctcccccatgttctgccaactgccagctgggtaactccagtgtccaggaagacagtcctcctgatgcactaactcttccgatctttagtttcggcctcaatgttttcacgtagcctat

SEQ ID NO: 375519 - DNA, 115 bp, Homo sapiens
ccatttttaggatgataaagtagagcctagatacagtaagtaagttgtcagagatcaccaaggtaatgagtattagaatcaggttttgttgtatttttgctcgttcgttttaaca

SEQ ID NO: 375520 - DNA, 538 bp, Homo sapiens
tgagcagaagcttttaaactcaatataatgcaatttgtccacttttgcattggttgcctgtacttgtggggtattactcaagagatctttgcccaggccaatgtcctggagagtttccccaatgttatcttttagtaacttcatggtttgaggtcttagatttaagtctaatccattttgatttgatctttgtatatggctaggaaaacatttaaggtttctttgtaaacatttttctagaaatgaaaaataggttctttgtactgcatatttataggcatgtaaagtgctttgcattttgttaaaatggctacattcaaggccagtgttcttgactgtcacggaaggtgtaaatactttagtgatcgtctgctcaaacctcccatcccaaagaaggaatactatcgtcaacagttgtgaaatgatataaacttttgcttaaaatgaacacctcattattttataaggtagcatatgccattgtcagactatttgtttaagaaaattattccaacctaaggctttaggaaaaaaaaaa

SEQ ID NO: 375521 - DNA, 457 bp, Homo sapiens
aaggcactggcaccgtggcgcctggtgcacataggcgttcatagaacgtgctgagggacctgtcactgcacttgtctcttctcaacactggggccagcagctcctggggccctgggccggggctttcccgtcagcagtgagcccctctgtaagattcgctgaggttgcctgggcaacataggccgggtcccaaagcatgttgctgctgtcggagtccaggaaagtcctggtccctgatcagggagcgagcagagcaaggcagtcctggggccctgggcccactcagcgggagccaggactccccggagagctcaccttgcagagtggctggacctgagctgggagtgacagtgcttggtgccgcttccgctcctgaatgttgctcctacgtggagctgcaaatccagcccagccttcagtctgctccgctctctggctgcggcctttcccagcttca

SEQ ID NO: 375522 - DNA, 1176 bp, Homo sapiens
cctgcgccggacgcgggctgatttccgcctccgggtggcgcttcccggtgtcgtgttctggaagcttagcggtcaccatggagctgctgggagagtacgtcgggcaggaagggaagccgcagaagctgcgggtgtcctgtgaggcgccgggtgacggcgaccctttccagggcctgttgtctggcgtggcccagatgaaggacatggtaacggaattattcgaccctctggtacagggggaagtgcagcaccgggtggcggcggctccagacgaggacttggacggtgatgatgaagatgatgcagaagatgaaaataacattgataacagaactaacttcgatggaccatctgcaaaacggccaaaaacaccgtcttaacaatagccttcatgacatttaaaagatggctgttgtatccttattgtcacactaggacatttaaggaagacttatgctctaatttggaaaaagcatttgtgttgttctcctgggacaattttgtcaaagagaaaactggtttttctgtttctagcaaagatagtaaaggcttagaaataaaatctgttttcttgagaaataaatttcagaccctggaaggaaaatagaacacttcataatgtataaaatcctctaagttggcaactgaatttttatcattgttttctatttttaaaataatcattgatttgtgtgatgtctacatcttttaacttctggttctgttataaagagtacatgtcacggttcataggcagtaacatttcagagaactgacatgaacaagtagtgaaaattgggcattaaatataaaaataacagttcttcataaacagaaggaaaataaggaaatagaaataccgacgagaaaggagagtccttgaaagagacccaaggaaaccctgaattcatacccacgtcaaatatgcacatatcctgagatgatgccactttgatgaatgtgcattagtctgatttatcatgtaccttaagagagccagatggggtatgtttttgtgctgtgatatggtatttatacaggtacaaatataaggccttaagtaaacaatctgcattgattacaatttggatatttcctctcctcctgtagccatactttgattttgctttaaaaagattattgaatccttttaaaaatatatattcctaaaatatg

SEQ ID NO: 375523 - DNA, 839 bp, Homo sapiens
cctgcgccggacgcgggctgatttccgcctccgggtggcgcttcccggtgtcgtgttctggaagcttagcggtcaccatggagctgctgggagagtacgtcgggcaggaagggaagccgcagaagctgcgggtgtcctgtgaggcgccgggtgacggcgaccctttccagggcctgttgtctggcgtggcccagatgaaggacatggtaacggaattattcgaccctctggtacagggggaagtgcagcaccgggtggcggcggctccagacgaggacttggacggtgatgatgaagatgatgcagaagatgaaaataacattgataacagaactaacttcgatggaccatctgcaaaacggccaaaaacaccgtcttaacaatagccttcatgacatttaaaagatggctgttgtatccttattgtcacactaggacatttaaggaagacttatgctctaatttggaaaaagcatttgtgttgttctcctgggacaattttgtcaaagagaaaactggtttttctgtttctagcaaagatagtaaaggcttagaaataaaatctgttttcttgagaaataaatttcagaccctggaaggaaaatagaacacttcataatgtataaaatcctctaagttggcaactgaatttttatcattgttttctatttttaaaataatcattgatttgtgtgatgtctacatcttttaacttctggttctgttataaagagtacatgtcacggttcataggcagtaacatttcagagaactgacatgaacaagtagtgaaaattgggcattaaatataaaaataacagttcttcataaacagaagg

SEQ ID NO: 375524 - DNA, 445 bp, Homo sapiens
ccctttccagggcctgttgtctggcgtggcccagatgaaggacatggtaacggaattattcgaccctctggtacagggggaagtgcagcaccgggtggcggcggctccagacgaggacttggacggtgagctctgagacggtgctgcagtgaccggaggacggggcgggcgcccaggggaaattggcttggggagcccgtgtagagtggcagacttggacaaagtgagcctcgaggaaagaagaattgcatctaaaaatttttggcgggctaggcgaagtggggctcacgcctgtaatcccagcactttgggagggcgaggcaggaggatcacttgaggtcaggagttccagaacagccagggcaacatatcgagaccccgtttctattattatttttaaaataatttaaaaaataaaaattgttggcatttatcactatattta

SEQ ID NO: 375525 - DNA, 1097 bp, Homo sapiens
cctgcgccggacgcgggctgatttccgcctccgggtggcgcttcccggtgtcgtgttctggaagcttagcggtcaccatggagctgctgggagagtacgtcgggcaggaagggaagccgcagaagctgcgggtgtcctgtgaggcgccgggtgacggcgaccctttccagggcctgttgtctggcgtggcccagatgaaggacatggtgatgatgaagatgatgcagaagatgaaaataacattgataacagaactaacttcgatggaccatctgcaaaacggccaaaaacaccgtcttaacaatagccttcatgacatttaaaagatggctgttgtatccttattgtcacactaggacatttaaggaagacttatgctctaatttggaaaaagcatttgtgttgttctcctgggacaattttgtcaaagagaaaactggtttttctgtttctagcaaagatagtaaaggcttagaaataaaatctgttttcttgagaaataaatttcagaccctggaaggaaaatagaacacttcataatgtataaaatcctctaagttggcaactgaatttttatcattgttttctatttttaaaataatcattgatttgtgtgatgtctacatcttttaacttctggttctgttataaagagtacatgtcacggttcataggcagtaacatttcagagaactgacatgaacaagtagtgaaaattgggcattaaatataaaaataacagttcttcataaacagaaggaaaataaggaaatagaaataccgacgagaaaggagagtccttgaaagagacccaaggaaaccctgaattcatacccacgtcaaatatgcacatatcctgagatgatgccactttgatgaatgtgcattagtctgatttatcatgtaccttaagagagccagatggggtatgtttttgtgctgtgatatggtatttatacaggtacaaatataaggccttaagtaaacaatctgcattgattacaatttggatatttcctctcctcctgtagccatactttgattttgctttaaaaagattattgaatccttttaaaaatatatattcctaaaatatg

SEQ ID NO: 375526 - DNA, 1121 bp, Homo sapiens
cctgcgccggacgcgggctgatttccgcctccgggtggcgcttcccggtgtcgtgttctggaagcttagcggtcaccatggagctgctgggagagtacgtcgggcaggaagggaagccgcagaagctgcgggtgtcctgtgaggcgccgggtgacggcgaccctttccagggcctgttgtctggcgtggcccagatgaaggacatggtaacggaattattcgaccctctggtacagggggaagtgcagcaccgggtggcggcggctccagacgaggacttggacggtgatgatgaagatgatgcagaagatgaaaataacattgataacagaactaacttcgatggaccatctgcaaaacggccaaaaacaccgtcttaacaatagccttcatgacatttaaaagatggctgttgtatccttattgtcacactaggacatttaaggaagacttatgctctaatttggaaaaagcatttgtgttgttctcctgggacaattttgtcaaagagaaaactggtttttctgtttctagcaaagatagtaaaggcttagaaataaaatctgttttcttgagaaataaatttcagaccctggaaggaaaatagaacacttcataatgtataaaatcctctaagttggcaactgaatttttatcattgttttctatttttaaaataatcattgatttgtgtgatgtctacatcttttaacttctggttctgttataaagagtacatgtcacggttcataggcagtaacatttcagagaactgacatgaacaagtagtgaaaattgggcattaaatataaaaataacagttcttcataaacagaaggggaaaccctgaattcatacccacgtcaaatatgcacatatcctgagatgatgccactttgatgaatgtgcattagtctgatttatcatgtaccttaagagagccagatggggtatgtttttgtgctgtgatatggtatttatacaggtacaaatataaggccttaagtaaacaatctgcattgattacaatttggatatttcctctcctcctgtagccatactttgattttgctttaaaaagattattgaatccttttaaaaatatatattcctaaaatatg

SEQ ID NO: 375527 - DNA, 1059 bp, Homo sapiens
attatttccatgtgtgagaggggagggatgcgatggctcagggagaggccgcttgggcttttctgcctcccactggaaatgtctgtgtctcggttgtccagtaattatggcccagtgttcagtcagtcagagggtttcagctggatcttctaaatacgaagccaggccaggtgtggtggctcacacatgtaatcccaacactttgggaggccaaggtcggtggatcacttgaggccaggagtttgagaccagcttggccaacatggtgaaaccctatctgtactaaaaatacaaaaattaggtgggtgtggtggtgtgcacctgtagttgtagctactcgggaggctgagacacaagtatcacttgaacccaggagatgaggttgcagtgagcccacatcatgccactgcactccggcctgggcgacagagtgaggctctgtctcaaaaaacaacaccaacaaaaacaacaaaccacaacgaacaaacaacaaacagcaccgagaggcgcagcagcaaaagaatcgtccacaggaggcgcccccccatatggggtcaaccaaggcatagaacaacagcaggaagcccatcaagacaacggaggcgaacacacgccagagaccacgccgacgtagagcacaacaagcaggagcgaggcaacgccgtgaccaagagaaagataagcagagcaccaccaacaggggggaggacacaacaaggaacaagacacacaccaagagcgaaagacgcgcgccaggcacaagcaaaaccacgagcacgcgtacaggggacaagcagacggacaatgggagccggcgcacacgctcgccacgcaaacagcagccctcagggcacagattcaacgggagaacgagaaggaagcaagacggaacagagcccagaaacgcacaggagaagaaccaagagagcacagcacgaggagcagcgacgacacacacacgcagggaaacgggagcaacgcgcaaaggagcggcacgcggcgagcaaccagagcgagcgacacgcacacacgacgagcgagggagagaaccgacgcact

SEQ ID NO: 375528 - DNA, 6496 bp, Homo sapiens
  misc_feature (10)..(10): n is a, c, g, or t
  misc_feature (86)..(86): n is a, c, g, or t
  misc_feature (728)..(728): n is a, c, g, or t
  misc_feature (770)..(770): n is a, c, g, or t
  misc_feature (853)..(853): n is a, c, g, or t
  misc_feature (1085)..(1085): n is a, c, g, or t
  misc_feature (1091)..(1091): n is a, c, g, or t
  misc_feature (1137)..(1137): n is a, c, g, or t
  misc_feature (1457)..(1457): n is a, c, g, or t
gaattccttnaacctgggaggcaggggctgcagtgagcagagatcgcaccactgcacttcagcctgggcgacagagcaagactctntcttaaaaacaaacaaacaaacaaaaacacacaaaaaaaatttaaattggagaatgagaatatacaagcatctccattccacagccataaactgattgataaattaaactgtataaatgaatagcaaatggttacatcatgagtcatgaatacagatgatttattcacaatagccatgtaatatgtgggatttaaaaggaactggtacatttatttctactgataccaaaatcttttaaatctatcattgattgaggaaaacaacttggttagacttagtgtccaatatggtagtatttatgaaaaatattaaatcaagaatagaaaaattgcatataaagccagagatagacctcaaattttttttttttttttttagatggagtcttgctcttgtcacccaggttctggagtgcaatggcgtgatcatggctcactgcaacttccgccccctgggttcaagtaattctcctgcctcagccggtatagctgggattataggcatgcgccactacactcagctaacttttgtatttttagtagagacagggtttcaccatgttggccaggctggtctcgaactcctgaccttgtgatctgcccacctcggcctcccaaagtgctgggattataggcgtgacnactgcactggccgacctcaaatttttatgcctggagattagnaaagggcatggaataatgaaggggaacttttattttattttgtttttgagatagggtctcagtctgttgtccaggctggggcncagtggtgcaatcatggctcactgcagcctcaacctcgaggtctcaagtgatcctcccacctcagcctcctaagtagctgggaccacaagcacatggcaccacacctggctaatttttaaattttctgtagagatggggtctcactatgttgtccaagctggtctcaaactcctgggctcaagtgatcctcctgcctcagcctctgaaggtgttgggattacaggcgtgacnaccacncctggcctaattttattcattaaatatgttagaattaagtgttttnccttgagacctgtgagttttttcagtgaaaaaatattcaaaaggtttgtcagtatgtccataaaaaagaagataggaggggagggacaggacccaggagggcagcctacagcctgctctccccgttctgtcctggggcggagtctgtactgcgagttgagcttttcccaaggcgcatgttactcctggagccaagcctagcagtgcagccgcacagtcagggtggggtgggccaggcggagaagcaggctgcagagggggcagggtggtggcctggggatctcagggaagggctatgggagcacggcggtgtcctcagtnctggggcttcaggggccttggtaccgcgagttgactcttgggggcaggaggtcactccatgcaggggcagcaggtgctggccaccacattgtccagcaaggtggcagcagaggcctcctaggtcccttcctaggaaaggagcctgggctgccctgatgagtctcctgtctctctctctcccgcaggatgaagatgagacgctacaagctctttctcatgttctgtatggccggcctgtgcctcatctccttcctgcacttcttcaagaccctgtcctatgtcaccttcccccgagaactggcctccctcagccctaacctggtgtccagctttttctggaacaatgccccggtcacgccccaggccagccccgagccaggaggccctgacctgctgcgtacccactctactcccactcgcccctgctgcagccgctgccgcccagcaaggcggccgaggagctccaccgggtggacttggtgctgcccgaggacaccaccgagtatttcgtgcgcaccaaggccggcggcgtctgcttcaaacccggcaccaagatgctggagaggccgcccccgggacggccggaggagaagcctgagggggccaacggctcctcggcccggcggccaccccggtacctcctgagcgcccgggagcgcacggggggccgaggcgcccggcgcaagtgggtggagtgcgtgtgcctgcccggctggcacggacccagctgcggcgtgcccactgtggtgcagtactccaacctgcccaccaaggagcggctggtgcccagggaggtgccgcgccgcgtcatcaacgccatcaacgtcaaccacgagttcgacctgctggacgtgcgcttccacgagctgggcgacgtggtggacgcctttgtggtgtgcgagtccaacttcacggcttatggggagccgcggccgctcaagttccgggagatgctgaccaatggcaccttcgagtacatccgccacaaggtgctctatgtcttcctggaccacttcccgcccggcggccggcaggacggctggatcgccgacgactacctgcgcaccttcctcacccaggacggcgtctcgcggctgcgcaacctgcggcccgacgacgtcttcatcattgacgatgcggacgagatcccggcccgtgacggcgtccttttcctcaagctctacgatggctggaccgagcccttcgccttccacatgcgcaagtcgctctacggcttcttctggaagcagccgggcaccctggaggtggtgtcaggctgcacggtggacatgctgcaggcagtgtatgggctggacggcatccgcctgcgccgccgccagtactacaccatgcccaacttcagacagtatgagaaccgcaccggccacatcctggtgcagtggtcgctgggcagccccctgcacttcgccggctggcactgctcctggtgcttcacgcccgagggcatctacttcaagctcgtgtccgcccagaatggcgacttcccacgctggggtgactacgaggacaagcgggacctgaactacatccgcggcctgatccgcaccgggggctggttcgacggcacgcagcaggagtacccgcctgcagaccccagcgagcacatgtatgcgcccaagtacctgctgaagaactacgaccggttccactacctgctggacaacccctaccaggagcccaggagcacggcggcgggcgggtggcgccacaggggtcccgagggaaggccgcccgcccggggcaaactggacgaggcggaagtctagagctgcatgatctgatagggtttgtgacagggcgggggtggcggcggcccctagcgctatctccctgcctcctgccggctccttggttcttgaggggaccaggagtgggtggggagtgggggtgggggtagggtttccctactgaagcccttgtgaatcaagggtcaggcctttgagctcagaaaatatccctcctgttgggagagggcgcaggccgtgacgtctgggtggcccttatgactgccaagactgctgtggccaggaggtgccactggagtgtgcgtggtggtccctgggtagcgggggagggtaggcaggattggggaagagagcctgcaggatctcaccaggcagcctctggggggtggccaggccggaaaaagcccaccatttggcatccctgggccttgggctccgtgtgggagaccggcctgccaggaggacccagggctctgtaagtagatgcatttgggtccaggaggaagcgtggacacctcgtagggaagagatgaaaaagccacatcctaccaagaggaggtgctgagggatgctttgcagtgtagtcagaagtgctgggccagatggagacagaactccaccccctgccgcaaaggacaggacctggctgccctgggatgctggtgcctgagtctgtctctgtgcacccctcaggctgtcgtgagccaacacaggggcctggagaaccctgaggagctttccttttggttctaaacccggcgttgacgttccttctccctttcacattgctgtcttgtggactgtgcactcagtccttgcaaggccaagagtccagttgtaggtgtggccttgagggggaagtggggaggagaagactgacatgagtcctctgcacggatccgtctctccctccccatcaccccttccttctgacacccagtcccagctgtccactgtcccaggtgcagtcactgttgtgcccttccttggggcaggctggctgggggccagaaaggggccatgaggctgtcttgggcccaaaaagggacaataaggccagttgtatgcttcctgttcctcatagcttgccttggtggggatgtctttgttggagttgattctgagctgctgtgattaggagaccctgaaatacagtggtttaagcaagatggaagcttgtttctaattagtctagattgagatggcccagagctggtagggcagctctgcgtttcttcatacgcaccttccaattctgggtacacagcggctgctccagcgcccaccctcctgtgtgcatccaagcctgggggaagcagaaatagacaagagggcacacccactttttgctaaaggcatgagccagaattggcaggctcacctctgctggcctctcattggctgggactcagtcacatggccacaagcagctgctagggaacctgggaagtgtagtcttcagcggggccgccatgtgcctggcctcaccttgggagttatcttattgatggaggagaagagaatggatatgggggaccagtagcatctctgggagagggggagggagcagcaataactcagtcgtcggatccagctctcattgtcagagtttccggaacagcttgctcctgtttccctcactgtgcagcccagggctgggggcagtgaggagcttgcagctctgtgggaaggggaaacaccccctcccctcggcccctcagacgctacccaatgatgccggtttgcagagttggcctgtggaatggctcatgtttgtgcgtgtgtgtgtgtatatttatgggcatgggtgcatgcttggtgtgtatttgtacatgtctgtattgctgtgtccctgtaaatacatgcttgtgtatggatggaagaggccaggcccaggcctggcctcttcctcgggcctgtggccacacctcctgcagctccccaaaatgactgaggcagaaagcccttggggagcctagaaagcaaagctaaaggggatgcagggtctgtctgtctgtctgtctttcagtctgaggaatgagaatcctgacctgagggctgtgcagctgagagcccactacctccccagcccctctcggccccagcccattcatcccacctgtcccctcccccccacctccagtggggctttctccagatgtcttatggttgggggtttcctgatgggccaggagaggagggcatcttcttgcgacagcactgtctgggttaagtgcccagtgagggcatggtgtggggagctggcctcagaggagccgctggtgggcaagcgtgaagtgggctgaggggctctgagccactttgctcccatctaggggactgccccccatggaactcctttgaagtcacagcagccttcctttctgtttgctcttggggctgagaggtggctcaaacactcggggtccctatggctctgggtcaatctaggccaggctgcaccccatggacagggagtctcagggctcctgatcatgcccaggccctggcctggggcctccctccttggcagctttcccacccccacgcccctggcatcctcagttgctatgggatgcccctccagggcaccagctcagggctaagcgaaggaagataggagcagctcagagctgccaggctctgccttcctcacagacctggtggggcaggtcctgttcacagcagcaggagtgaaggcctggccatcggtggagagggcagctgtcagagggctgggggccagggcacaggattgaagagtttcacatatcatcacagcatacactgggaatttggtgggggcagaagaacccagggccactccctcaatatgaagggaaaccaagctgaatgtgaccaccggcacactgctgccatgtcccatgtccacctttctccccgggaataactggccctgagacccctagacccaaggaggcctgtccatgccaagcatccgggaagcatggctggccttatccacccatgggtcacgtcggttcccaggggcagcatgggagatctttgggggcaacagggagagtctgggtggggagacgggacttgtccaagcagaaggcaggaccctgggaaatgcataatgtaaggacatcaataatagtattattttttttgtaagggaaaatcaatatgtacattctgaaatcattttctctgtaaatggttggatttcatttcacccttaaagggatgcttaaaggagaagataatattaataataaaaacagctacaaagtctgaaaaaaaaaa

SEQ ID NO: 375529 - DNA, 5196 bp, Homo sapiens
gagcggccgcgccgggtccccgggacggggtggaagtgggggtggggggaggggatcggggccgggccggggccgcgctgcctgcgatgccgggcgcccgccgcagccgctgccgccggagcccgggatggggcgagaggctgcggcggacgccagcatctccccgccggggaccccgggggccgcggagccgccgccgccgctgctgccgccgttgctgagacccagcgggcgatggatggagtcttgctcttgtcacccaggttctggagtgcaatggcgtgatcatggctcactgcaacttccgccccctgggttcaagtaattctcctgcctcagccggatgaagatgagacgctacaagctctttctcatgttctgtatggccggcctgtgcctcatctccttcctgcacttcttcaagaccctgtcctatgtcaccttcccccgagaactggcctccctcagccctaacctggtgtccagctttttctggaacaatgccccggtcacgccccaggccagccccgagccaggaggccctgacctgctgcgtacccactctactcccactcgcccctgctgcagccgctgccgcccagcaaggcggccgaggagctccaccgggtggacttggtgctgcccgaggacaccaccgagtatttcgtgcgcaccaaggccggcggcgtctgcttcaaacccggcaccaagatgctggagaggccgcccccgggacggccggaggagaagcctgagggggccaacggctcctcggcccggcggccaccccggtacctcctgagcgcccgggagcgcacggggggccgaggcgcccggcgcaagtgggtggagtgcgtgtgcctgcccggctggcacggacccagctgcggcgtgcccactgtggtgcagtactccaacctgcccaccaaggagcggctggtgcccagggaggtgccgcgccgcgtcatcaacgccatcaacgtcaaccacgagttcgacctgctggacgtgcgcttccacgagctgggcgacgtggtggacgcctttgtggtgtgcgagtccaacttcacggcttatggggagccgcggccgctcaagttccgggagatgctgaccaatggcaccttcgagtacatccgccacaaggtgctctatgtcttcctggaccacttcccgcccggcggccggcaggacggctggatcgccgacgactacctgcgcaccttcctcacccaggacggcgtctcgcggctgcgcaacctgcggcccgacgacgtcttcatcattgacgatgcggacgagatcccggcccgtgacggcgtccttttcctcaagctctacgatggctggaccgagcccttcgccttccacatgcgcaagtcgctctacggcttcttctggaagcagccgggcaccctggaggtggtgtcaggctgcacggtggacatgctgcaggcagtgtatgggctggacggcatccgcctgcgccgccgccagtactacaccatgcccaacttcagacagtatgagaaccgcaccggccacatcctggtgcagtggtcgctgggcagccccctgcacttcgccggctggcactgctcctggtgcttcacgcccgagggcatctacttcaagctcgtgtccgcccagaatggcgacttcccacgctggggtgactacgaggacaagcgggacctgaactacatccgcggcctgatccgcaccgggggctggttcgacggcacgcagcaggagtacccgcctgcagaccccagcgagcacatgtatgcgcccaagtacctgctgaagaactacgaccggttccactacctgctggacaacccctaccaggagcccaggagcacggcggcgggcgggtggcgccacaggggtcccgagggaaggccgcccgcccggggcaaactggacgaggcggaagtctagagctgcatgatctgatagggtttgtgacagggcgggggtggcggcggcccctagcgctatctccctgcctcctgccggctccttggttcttgaggggaccaggagtgggtggggagtgggggtgggggtagggtttccctactgaagcccttgtgaatcaagggtcaggcctttgagctcagaaaatatccctcctgttgggagagggcgcaggccgtgacgtctgggtggcccttatgactgccaagactgctgtggccaggaggtgccactggagtgtgcgtggtggtccctgggtagcgggggagggtaggcaggattggggaagagagcctgcaggatctcaccaggcagcctctggggggtggccaggccggaaaaagcccaccatttggcatccctgggccttgggctccgtgtgggagaccggcctgccaggaggacccagggctctgtaagtagatgcatttgggtccaggaggaagcgtggacacctcgtagggaagagatgaaaaagccacatcctaccaagaggaggtgctgagggatgctttgcagtgtagtcagaagtgctgggccagatggagacagaactccaccccctgccgcaaaggacaggacctggctgccctgggatgctggtgcctgagtctgtctctgtgcacccctcaggctgtcgtgagccaacacaggggcctggagaaccctgaggagctttccttttggttctaaacccggcgttgacgttccttctccctttcacattgctgtcttgtggactgtgcactcagtccttgcaaggccaagagtccagttgtaggtgtggccttgagggggaagtggggaggagaagactgacatgagtcctctgcacggatccgtctctccctccccatcaccccttccttctgacacccagtcccagctgtccactgtcccaggtgcagtcactgttgtgcccttccttggggcaggctggctgggggccagaaaggggccatgaggctgtcttgggcccaaaaagggacaataaggccagttgtatgcttcctgttcctcatagcttgccttggtggggatgtctttgttggagttgattctgagctgctgtgattaggagaccctgaaatacagtggtttaagcaagatggaagcttgtttctaattagtctagattgagatggcccagagctggtagggcagctctgcgtttcttcatacgcaccttccaattctgggtacacagcggctgctccagcgcccaccctcctgtgtgcatccaagcctgggggaagcagaaatagacaagagggcacacccactttttgctaaaggcatgagccagaattggcaggctcacctctgctggcctctcattggctgggactcagtcacatggccacaagcagctgctagggaacctgggaagtgtagtcttcagcggggccgccatgtgcctggcctcaccttgggagttatcttattgatggaggagaagagaatggatatgggggaccagtagcatctctgggagagggggagggagcagcaataactcagtcgtcggatccagctctcattgtcagagtttccggaacagcttgctcctgtttccctcactgtgcagcccagggctgggggcagtgaggagcttgcagctctgtgggaaggggaaacaccccctcccctcggcccctcagacgctacccaatgatgccggtttgcagagttggcctgtggaatggctcatgtttgtgcgtgtgtgtgtgtatatttatgggcatgggtgcatgcttggtgtgtatttgtacatgtctgtattgctgtgtccctgtaaatacatgcttgtgtatggatggaagaggccaggcccaggcctggcctcttcctcgggcctgtggccacacctcctgcagctccccaaaatgactgaggcagaaagcccttggggagcctagaaagcaaagctaaaggggatgcagggtctgtctgtctgtctgtctttcagtctgaggaatgagaatcctgacctgagggctgtgcagctgagagcccactacctccccagcccctctcggccccagcccattcatcccacctgtcccctcccccccacctccagtggggctttctccagatgtcttatggttgggggtttcctgatgggccaggagaggagggcatcttcttgcgacagcactgtctgggttaagtgcccagtgagggcatggtgtggggagctggcctcagaggagccgctggtgggcaagcgtgaagtgggctgaggggctctgagccactttgctcccatctaggggactgccccccatggaactcctttgaagtcacagcagccttcctttctgtttgctcttggggctgagaggtggctcaaacactcggggtccctatggctctgggtcaatctaggccaggctgcaccccatggacagggagtctcagggctcctgatcatgcccaggccctggcctggggcctccctccttggcagctttcccacccccacgcccctggcatcctcagttgctatgggatgcccctccagggcaccagctcagggctaagcgaaggaagataggagcagctcagagctgccaggctctgccttcctcacagacctggtggggcaggtcctgttcacagcagcaggagtgaaggcctggccatcggtggagagggcagctgtcagagggctgggggccagggcacaggattgaagagtttcacatatcatcacagcatacactgggaatttggtgggggcagaagaacccagggccactccctcaatatgaagggaaaccaagctgaatgtgaccaccggcacactgctgccatgtcccatgtccacctttctccccgggaataactggccctgagacccctagacccaaggaggcctgtccatgccaagcatccgggaagcatggctggccttatccacccatgggtcacgtcggttcccaggggcagcatgggagatctttgggggcaacagggagagtctgggtggggagacgggacttgtccaagcagaaggcaggaccctgggaaatgcataatgtaaggacatcaataatagtattattttttttgtaagggaaaatcaatatgtacattctgaaatcattttctctgtaaatggttggatttcatttcacccttaaagggatgcttaaaggagaagataatattaataataaaaacagctacaaagtctgaaaaaaaaaa

SEQ ID NO: 375530 - DNA, 5092 bp, Homo sapiens
gagcggccgcgccgggtccccgggacggggtggaagtgggggtggggggaggggatcggggccgggccggggccgcgctgcctgcgatgccgggcgcccgccgcagccgctgccgccggagcccgggatggggcgagaggctgcggcggacgccagcatctccccgccggggaccccgggggccgcggagccgccgccgccgctgctgccgccgttgctgagacccagcgggcgatgggatgaagatgagacgctacaagctctttctcatgttctgtatggccggcctgtgcctcatctccttcctgcacttcttcaagaccctgtcctatgtcaccttcccccgagaactggcctccctcagccctaacctggtgtccagctttttctggaacaatgccccggtcacgccccaggccagccccgagccaggaggccctgacctgctgcgtacccactctactcccactcgcccctgctgcagccgctgccgcccagcaaggcggccgaggagctccaccgggtggacttggtgctgcccgaggacaccaccgagtatttcgtgcgcaccaaggccggcggcgtctgcttcaaacccggcaccaagatgctggagaggccgcccccgggacggccggaggagaagcctgagggggccaacggctcctcggcccggcggccaccccggtacctcctgagcgcccgggagcgcacggggggccgaggcgcccggcgcaagtgggtggagtgcgtgtgcctgcccggctggcacggacccagctgcggcgtgcccactgtggtgcagtactccaacctgcccaccaaggagcggctggtgcccagggaggtgccgcgccgcgtcatcaacgccatcaacgtcaaccacgagttcgacctgctggacgtgcgcttccacgagctgggcgacgtggtggacgcctttgtggtgtgcgagtccaacttcacggcttatggggagccgcggccgctcaagttccgggagatgctgaccaatggcaccttcgagtacatccgccacaaggtgctctatgtcttcctggaccacttcccgcccggcggccggcaggacggctggatcgccgacgactacctgcgcaccttcctcacccaggacggcgtctcgcggctgcgcaacctgcggcccgacgacgtcttcatcattgacgatgcggacgagatcccggcccgtgacggcgtccttttcctcaagctctacgatggctggaccgagcccttcgccttccacatgcgcaagtcgctctacggcttcttctggaagcagccgggcaccctggaggtggtgtcaggctgcacggtggacatgctgcaggcagtgtatgggctggacggcatccgcctgcgccgccgccagtactacaccatgcccaacttcagacagtatgagaaccgcaccggccacatcctggtgcagtggtcgctgggcagccccctgcacttcgccggctggcactgctcctggtgcttcacgcccgagggcatctacttcaagctcgtgtccgcccagaatggcgacttcccacgctggggtgactacgaggacaagcgggacctgaactacatccgcggcctgatccgcaccgggggctggttcgacggcacgcagcaggagtacccgcctgcagaccccagcgagcacatgtatgcgcccaagtacctgctgaagaactacgaccggttccactacctgctggacaacccctaccaggagcccaggagcacggcggcgggcgggtggcgccacaggggtcccgagggaaggccgcccgcccggggcaaactggacgaggcggaagtctagagctgcatgatctgatagggtttgtgacagggcgggggtggcggcggcccctagcgctatctccctgcctcctgccggctccttggttcttgaggggaccaggagtgggtggggagtgggggtgggggtagggtttccctactgaagcccttgtgaatcaagggtcaggcctttgagctcagaaaatatccctcctgttgggagagggcgcaggccgtgacgtctgggtggcccttatgactgccaagactgctgtggccaggaggtgccactggagtgtgcgtggtggtccctgggtagcgggggagggtaggcaggattggggaagagagcctgcaggatctcaccaggcagcctctggggggtggccaggccggaaaaagcccaccatttggcatccctgggccttgggctccgtgtgggagaccggcctgccaggaggacccagggctctgtaagtagatgcatttgggtccaggaggaagcgtggacacctcgtagggaagagatgaaaaagccacatcctaccaagaggaggtgctgagggatgctttgcagtgtagtcagaagtgctgggccagatggagacagaactccaccccctgccgcaaaggacaggacctggctgccctgggatgctggtgcctgagtctgtctctgtgcacccctcaggctgtcgtgagccaacacaggggcctggagaaccctgaggagctttccttttggttctaaacccggcgttgacgttccttctccctttcacattgctgtcttgtggactgtgcactcagtccttgcaaggccaagagtccagttgtaggtgtggccttgagggggaagtggggaggagaagactgacatgagtcctctgcacggatccgtctctccctccccatcaccccttccttctgacacccagtcccagctgtccactgtcccaggtgcagtcactgttgtgcccttccttggggcaggctggctgggggccagaaaggggccatgaggctgtcttgggcccaaaaagggacaataaggccagttgtatgcttcctgttcctcatagcttgccttggtggggatgtctttgttggagttgattctgagctgctgtgattaggagaccctgaaatacagtggtttaagcaagatggaagcttgtttctaattagtctagattgagatggcccagagctggtagggcagctctgcgtttcttcatacgcaccttccaattctgggtacacagcggctgctccagcgcccaccctcctgtgtgcatccaagcctgggggaagcagaaatagacaagagggcacacccactttttgctaaaggcatgagccagaattggcaggctcacctctgctggcctctcattggctgggactcagtcacatggccacaagcagctgctagggaacctgggaagtgtagtcttcagcggggccgccatgtgcctggcctcaccttgggagttatcttattgatggaggagaagagaatggatatgggggaccagtagcatctctgggagagggggagggagcagcaataactcagtcgtcggatccagctctcattgtcagagtttccggaacagcttgctcctgtttccctcactgtgcagcccagggctgggggcagtgaggagcttgcagctctgtgggaaggggaaacaccccctcccctcggcccctcagacgctacccaatgatgccggtttgcagagttggcctgtggaatggctcatgtttgtgcgtgtgtgtgtgtatatttatgggcatgggtgcatgcttggtgtgtatttgtacatgtctgtattgctgtgtccctgtaaatacatgcttgtgtatggatggaagaggccaggcccaggcctggcctcttcctcgggcctgtggccacacctcctgcagctccccaaaatgactgaggcagaaagcccttggggagcctagaaagcaaagctaaaggggatgcagggtctgtctgtctgtctgtctttcagtctgaggaatgagaatcctgacctgagggctgtgcagctgagagcccactacctccccagcccctctcggccccagcccattcatcccacctgtcccctcccccccacctccagtggggctttctccagatgtcttatggttgggggtttcctgatgggccaggagaggagggcatcttcttgcgacagcactgtctgggttaagtgcccagtgagggcatggtgtggggagctggcctcagaggagccgctggtgggcaagcgtgaagtgggctgaggggctctgagccactttgctcccatctaggggactgccccccatggaactcctttgaagtcacagcagccttcctttctgtttgctcttggggctgagaggtggctcaaacactcggggtccctatggctctgggtcaatctaggccaggctgcaccccatggacagggagtctcagggctcctgatcatgcccaggccctggcctggggcctccctccttggcagctttcccacccccacgcccctggcatcctcagttgctatgggatgcccctccagggcaccagctcagggctaagcgaaggaagataggagcagctcagagctgccaggctctgccttcctcacagacctggtggggcaggtcctgttcacagcagcaggagtgaaggcctggccatcggtggagagggcagctgtcagagggctgggggccagggcacaggattgaagagtttcacatatcatcacagcatacactgggaatttggtgggggcagaagaacccagggccactccctcaatatgaagggaaaccaagctgaatgtgaccaccggcacactgctgccatgtcccatgtccacctttctccccgggaataactggccctgagacccctagacccaaggaggcctgtccatgccaagcatccgggaagcatggctggccttatccacccatgggtcacgtcggttcccaggggcagcatgggagatctttgggggcaacagggagagtctgggtggggagacgggacttgtccaagcagaaggcaggaccctgggaaatgcataatgtaaggacatcaataatagtattattttttttgtaagggaaaatcaatatgtacattctgaaatcattttctctgtaaatggttggatttcatttcacccttaaagggatgcttaaaggagaagataatattaataataaaaacagctacaaagtctgaaaaaaaaaa

SEQ ID NO: 375531 - DNA, 259 bp, Homo sapiens
agtggtagattctgggacctcatgcatttaacatcaatgcaggctttctccggggatttatcctgttggagctcacctgtgacaacagtaaatccagcaagttaccagatggactatgttgtccaagacattgagactgtgagtgaaactttgcaatctaatacctggcatttttgaccactaagatcaatgaaaggcacaccattcaatgaccactaagatcaatgaaaggcactcattcaatatgccaagaccaagc

SEQ ID NO: 375532 - DNA, 690 bp, Homo sapiens
tgaagctccttggtcaagagcaatttagaggccaggattgcatcactaacaaattccttggatggtttgtgcttacattacttaacttccttagtttataaacgtatatacacttactgaccttatccttttgttgagaaaaatgatgcgagaaaaagtaatatccacaacatcaaaataatggttgtgtaatggttttaaagagcacatcacagagagtgttcttttcaaatcactgtgaaattctctaaagcatatccaagcaaagttttgactgtcaacattctctttccttaagagtcatgattcccaaactgctccaatagaacaccagaccaaggtgccggatctacagaatcaaagagtggtagtattttccaaatttacacaaaacttctctcatgatcaggcacagtggctcatgcctgtaatcccagcactttgggaggccaaggccggaggatcacttgagcccaggaattcaagaccagcctgggcaatgtggcaaaaccccatctctactaaaaatacagaaaattaggtggcggtgggggtgtgcacttgtagtcccagtgactcaggaggctcaggtgggagaatcacctgatgccaggaagtcgaggctgcagtgagcactgatggtgccactgcactctagcctgggagaaagagtgacactttatctcaaaa

SEQ ID NO: 375533 - DNA, 558 bp, Homo sapiens
gagtgcctaaaaaaagctctaaaaatagcaaatcagtgcatggacccctctctacaagtgcagctttttatagaaattctgaacagatatatctatttttatgaaaaggaaaatgatgcggtaacaattcaggttttaaaccagcttatccaaaagattcgagaagacctcccgaatcttgaatccagtgaagaaacagagcagattaacaaacattttcataacacactggagcatttgcgcttgcggcgggaatcaccagaatccgaggggccaatttatgaaggtctcatcctttaaaaaggaaatagctcaccatactcctttccatgtacatccagtgagggttttattacgctaggtttcccttccatagattgtgcctttcagaaatgctgaggtaggtttcccatttcttacctgtgatgtgttttacccagcacctccggacactcaccttcaggaccttaataaaattattcacttggtaagtgttcaagtctttctgatcaccccaagtagcatgactgatctgcaatttaaaattcctgtgatctg

SEQ ID NO: 375534 - DNA, 540 bp, Homo sapiens
gagtgcctaaaaaaagctctaaaaatagcaaatcagtgcatggacccctctctacaagtgcagctttttatagaaattctgaacagatatatctatttttatgaaaaggaaaatgatgcggtaacaattcaggttttaaaccagcttatccaaaagattcgagaagacctcccgaatcttgaatccagtgaagaaacagagcagattaacaaacattttcataacacactggagcatttgcgcttgcggcgggaatcaccagaatccgaggggccaatttatgaaggtctcatcctttaaaaaggaaatagctcaccatactcctttccatgtacatccagtgagggttttattacgctaggtttcccttccatagattgtgcctttcagaaatgctgaggtaggtttcccatttcttacctgtgatgtgttttacccagcacctccggacactcaccttcaggaccttaataaaattattcacttggtaagtgttcaagtctttctgaccaccccgcatgacccgccgcatgggggatc

SEQ ID NO: 375535 - DNA, 313 bp, Homo sapiens
caagtaaatttttttcaaaaaggatcatggttgttgtctgccctgagctttttcatgcttgagaaggtctgcctgttacatacatatatatgaacagtttagctaactgtaacattcttgttcatactttcattctgagtttgtagatttccctctctctcttctggaatggggtgtagatatggacaattctgagaacaagttcccacctagtattgtgtattagctatttattgctgcagaacagtttttcccaaaactgggcagctaaaaacaacacatacttactatcccacagtttctgtgggtcaga

SEQ ID NO: 375536 - DNA, 328 bp, Homo sapiens
ttatagacacatgcatataatttaaaagtcaaatagcccaaaaagacttataatgaaaaacatattcccccaaattccatcccactccccagaggcaagtgtcttctggcatttaccttaatttttctagacaatgtgaattatccagttaggatattccttcttgacttcttgtaaggtaactggattgagcactcctatatcaaccactcccccagcttcactttggcaccctaatcacccccatgtagttacaactgaacttttaaatagttattgtttacattatgactatggaaaaaatagttcactacagttctttcatatg

SEQ ID NO: 375537 - DNA, 1758 bp, Homo sapiens
  misc_feature (490)..(490): n is a, c, g, or t
attaatccctgagacaaaggtactgaaggcaagtggctgaagaacaggcttgattggacagatgacttggagatgttcactggacagggacagccttgtgaagatctttgtgaatacccgacctcgcaagctccagagactacaataattcacttgccctaggttccaaagccagcaagtggaaaacggagactggaattccgcccacaggactccaaagcctgtgcagcaacaccccactcccccggcaggatcaccagcaggacgcgcgggagccaggaagtaagatccgtacctccaaggctcccatgggcccaagcctccgcatcaacagactgggagggattacgtggggtcccagggccggctctgaggcgggaaaactttctggaggcggcggcctcaggccggagcgggcgcacaccgactggaggggtcggattcagggatgtgggtggaccgcatttccccatcttccccgccgcgcacntcctctggtgcaatctccacaccccgcgccggcccgcctgcaacgcgccctggcactcaccggtgggcgaaatttccccgcctccacgtgagagccagctccgccgtgacccggaagtccacttcgagtcgccggcccaccctctcgggttccggcttcttccgggtcgcggccttccggcgaacgcggttaccgtgggaaaccgcggccatggcggcaccgcggcaaatccccagccacatagtgcgcctcaagcccagctgctctacagactcgtcgttcacccggacgccggtgcccaccgtgtctctcgcgtcccgcgagctgcctgtctcgtcgtggcaggtcaccgagccgtcaagcaagaatctgtgggagcagatctgcaagggttgcgccagtagaggaaatgctttttcatggcttcagtgcagagcactattttccggtttcccatttcaccatgatctcacgtacaccctgtcctcaagataaatcggaaacaatcaacccaaaaacatgttctcccaaagaatatttggaaactttcatctttcctgttctgcttcccggaatggctagcctgcttcaccaagcgaagaaagaaaaatgttttgagaggaaaagaaccaaattcattgcctgtgattttctgactgagtggttatacaagtaagttgttcgtgtctgactattcagtgatcctaagaattcagtcgtgttaatttgcaagcagaatagcaacaactgacttgaattcttgcttattgttttcttgtcaatcaaacatatggcatcatgaccagccaaaatccaaagagggcaggggagccattcacagaatttttctccattccatttgtggaggagcggctaaagcaacacccacggccgccaatcccactctcgctcctgctgacagaagaggaagcagccctctacattcaatccttctggagagcctgtgtggtaagaatcatatgcgactgtggtatttgatttaatggggaacttttgtgaggtggagggtccagggtaaaccttagatgagttaggaacaggatattatagctaacatccagacctcagaaatacgattctctgtaaaatgggtcttaaaaagtgatttagaatttttactgaaactggctgggcatagtagctcatggctgtaatcccagaactttgcaggggccaaggtgggaggatcacttgagcccaggagttcaagaccagcctgggcaacatgacgaaacctcgtatctgcc

SEQ ID NO: 375538 - DNA, 910 bp, Homo sapiens
cgatgaggacatgagagtagtggagcaggaacgatagataaaatagcgagatgagaaggagacgtaaggagagtagcagtggatagaaatgtgttagaaaatatacgaaagatgagaaaaagagaaggaagacaagagaagagaaatacggaggatgagagatagaaaggaagaacaacgtgggaatagaatgaaagcaagagattagagaggtgcggtaggaaggtatggtcgaagaatagagtaaggtgaaggaagaaagaagagatgagtagagaaagggtaaagaaataacgtagatagatggtcatgagaatgtggaaacgggaggtcgagacgagggatatgataagacgtatatagacaaagagtaaacatcgagataatttaaaaagcattgaggtgagagctgtgaaacgaaaagtacaagtttgaatagaaaagcacgtcttcacttcaacctccacctccagtgggagaatcaaggtagaatgaataaccagacacggaacaatttgtgcttacaatgagagattttgatcacagatgctctcctcccgggtcgttttccccaaacgagtcttgtttacacacgcagatcttaaacagaggtgccatttaattttgtctttaaaccttgctccacggggggcagctggctgctacagtctcttggcaaagatgtctcttgatacttttcaggtgtagtcattagaaaaagaacagctctctcccttctcctctcactcccgcctccgcccccattatgaaggcgttcagcccactctcaaccttaaaagccaaaataaaacaaaaccctaagtgcgataacatatcagatttaaaaggggggaaaaaggtctcattaaatgaggcttcccatggctcaaagatggctctgttcttatgc

SEQ ID NO: 375539 - DNA, 534 bp, Homo sapiens
tgccttaaccgtctgggaatgcagcccaataggtctcagcctcattttacccagcccctattcaagatggagttgctctggttcacgtgcctctgacatttccaataaggatggacctatctggagggtacaggagcctggtttatgtgaaccatgaaaagcagcttcctgagaggaaaagaaccaaattcattgcctgtgattttctgactgagtggttatacaaccaaaatccaaagagggcaggggagccattcacagaatttttctccattccatttgtggaggagcggctaaagcaacagtgagtatgacacaaggctttgaataatttattcctaatttaagattgtgttaataatacttttcttccatctaagagaacaaactgatgtgatccatccaggactctgggccagtcatatttgtgactcctgtctctagttattcttagcctaggctaaccttatcctaatcaggccagtaatttcattcaagaagcactccagaaataaaatagaaaacttaaaaaaa

SEQ ID NO: 375540 - DNA, 3535 bp, Homo sapiens
  misc_feature (490)..(490): n is a, c, g, or t
attaatccctgagacaaaggtactgaaggcaagtggctgaagaacaggcttgattggacagatgacttggagatgttcactggacagggacagccttgtgaagatctttgtgaatacccgacctcgcaagctccagagactacaataattcacttgccctaggttccaaagccagcaagtggaaaacggagactggaattccgcccacaggactccaaagcctgtgcagcaacaccccactcccccggcaggatcaccagcaggacgcgcgggagccaggaagtaagatccgtacctccaaggctcccatgggcccaagcctccgcatcaacagactgggagggattacgtggggtcccagggccggctctgaggcgggaaaactttctggaggcggcggcctcaggccggagcgggcgcacaccgactggaggggtcggattcagggatgtgggtggaccgcatttccccatcttccccgccgcgcacntcctctggtgcaatctccacaccccgcgccggcccgcctgcaacgcgccctggcactcaccggtgggcgaaatttccccgcctccacgtgagagccagctccgccgtgacccggaagtccacttcgagtcgccggcccaccctctcgggttccggcttcttccgggtcgcggccttccggcgaacgcggttaccgtgggaaaccgcggccatggcggcaccgcggcaaatccccagccacatagtgcgcctcaagcccagctgctctacagactcgtcgttcacccggacgccggtgcccaccgtgtctctcgcgtcccgcgagctgcctgtctcgtcgtggcaggtcaccgagccgtcaagcaagaatctgtgggagcagatctgcaaggagtatgaagctgagcagcctccctttccagaaggatataaagtcaaacaggagcctgtgattacggttgcgccagtagaggaaatgctttttcatggcttcagtgcagagcactattttccggtttcccatttcaccatgatctcacgtacaccctgtcctcaagataaatcggaaacaatcaacccaaaaacatgttctcccaaagaatatttggaaactttcatctttcctgttctgcttcccggaatggctagcctgcttcaccaagcgaagaaagaaaaatgttttgagaggaaaagaaccaaattcattgcctgtgattttctgactgagtggttatacaagtaagttgttcgtgtctgactattcagtgatcctaagaattcagtcgtgttaatttgcaagcagaatagcaacaactgacttgaattcttgcttattgttttcttgtcaatcaaacatatggcatcatgaccagccaaaatccaaagagggcaggggagccattcacagaatttttctccattccatttgtggaggagcggctaaagcaacacccacggccgccaatcccactctcgctcctgctgacagaagaggaagcagccctctacattcaatccttctggagagcctgtgtggttcgctgtgatcctgagattcaagaactgcgtcagtggcagaagaaacttcgcgaggccaagcacattcaccagcaagtcaaaattttctgggccaagcaagaacaaaaagtgaaatgcaaaatggaggacgatgcagtacctgcagccaagatgaaaattccatcatcttaaccatagctaagacgtatctttgcccattcgagcacaagttaccttgtgcaaggaaaatgtccaaatgatgctctctctcttgtgatttctttaacaagacttggaacatgtgcaaatggaatcttttctgtacaagataggattcattgcaaacaagctttaatgcaaatagtttagaaaagaaaggaccagtcttcactttctgcattatccccacattttattcattcatccagattacttcttcagtgcctcaggagtattcttctacaccagctgctgttaaaatgtacaatgaactctagtcccaaggaatacagaagtgctcttattaccagttttcccacttgtggccgcctttgcaaagatccatattctaatttaagtccccaacctctgaatttggttttaagtttacctagtgactgactactctctttataaaaaagaccttatacttaatgatcatttccaaaggagaccactccttaacttttactgcaaacccaacaagatgagacacttaaacccagacagatgtaacaaaggatttttgttgtctaagtcccaaagtattatatagaaagttcctgcttttatgggtaaacttattaccttaatatgttctgtggtttgctgttaaccaagattctcccatttaaaatgccacagaccgaccctcaaggcagatccgaaagcctagtagttagttgcactgggttgttttgacaagctaccacacgtcttaagtaaatagtaaagcctttatttttgtgttaagaacagcattttgaaaataaaacctatctgcccatgctttacagccttttaaatttgtaatatttatatagtcgtttatggtacatattgattgtcttgaaatttctttaacttcttttttataagtatgcaacagtcagccgggggaagataaaggtacattataaaacacacattaatgcatttaataaatatatattatctatcaaaagtgagccttagctcttcatcagttaataaaaagcacctgctgagaactcctgtaagctggtatcatcattgcatcattggattataaaagccacaatgctccctttcaacttggggtttggcctgaggcgttcaactcagccttggccaaccgagaccaccacccgagttcacccttgttcagtgggtcctgacggcatctgggctaaaaaaaaaaaaaaaaaaaagcactgggcgcccagcttccaacaaccagatcttcaactctggaatccctggagatgcacagaacttcccagtttgtaagctgtcagagctgactcccttctcttcccaccctccacctccagtggggagaaatccaggctagaatgacaattttctattaaaaggggggacaagagtggctgttatagacccaaagcgattttaataaccagacacggaacaatttgtgcttacaatgagagattttgatcacagatgctctcctcccgggtcgttttccccaaacgagtcttgtttacacacgcagatcttaaacagaggtgccatttaattttgtctttaaaccttgctccacggggggcagctggctgctacagtctcttggcaaagatgtctcttgatacttttcaggtgtagtcattagaaaaagaacagctctctcccttctcctctcactcccgcctccgcccccattatgaaggcgttcagcccactctcaaccttaaaagccaaaataaaacaaaaccctaagtgcgataacatatcagatttaaaaggggggaaaaaggtctcattaaatgaggcttcccatggctcaaagatggctctgttcttatgc

SEQ ID NO: 375541 - DNA, 3482 bp, Homo sapiens
  misc_feature (490)..(490): n is a, c, g, or t
attaatccctgagacaaaggtactgaaggcaagtggctgaagaacaggcttgattggacagatgacttggagatgttcactggacagggacagccttgtgaagatctttgtgaatacccgacctcgcaagctccagagactacaataattcacttgccctaggttccaaagccagcaagtggaaaacggagactggaattccgcccacaggactccaaagcctgtgcagcaacaccccactcccccggcaggatcaccagcaggacgcgcgggagccaggaagtaagatccgtacctccaaggctcccatgggcccaagcctccgcatcaacagactgggagggattacgtggggtcccagggccggctctgaggcgggaaaactttctggaggcggcggcctcaggccggagcgggcgcacaccgactggaggggtcggattcagggatgtgggtggaccgcatttccccatcttccccgccgcgcacntcctctggtgcaatctccacaccccgcgccggcccgcctgcaacgcgccctggcactcaccggtgggcgaaatttccccgcctccacgtgagagccagctccgccgtgacccggaagtccacttcgagtcgccggcccaccctctcgggttccggcttcttccgggtcgcggccttccggcgaacgcggttaccgtgggaaaccgcggccatggcggcaccgcggcaaatccccagccacatagtgcgcctcaagcccagctgctctacagactcgtcgttcacccggacgccggtgcccaccgtgtctctcgcgtcccgcgagctgcctgtctcgtcgtggcaggtcaccgagccgtcaagcaagaatctgtgggagcagatctgcaaggagtatgaagctgagcagcctccctttccagaaggatataaagtcaaacaggagcctgtgattacggttgcgccagtagaggaaatgctttttcatggcttcagtgcagagcactattttccggtttcccatttcaccatgatctcacgtacaccctgtcctcaagataaatcggaaacaatcaacccaaaaacatgttctcccaaagaatatttggaaactttcatctttcctgttctgcttcccggaatggctagcctgcttcaccaagcgaagaaagaaaaatgttttgagattgattgttccccctggcatctctctactccatgccaactgtcatgaatgtaaactgctcgcagagagtcttggaacacaaggaaaagaaccaaattcattgcctgtgattttctgactgagtggttatacaaccaaaatccaaagagggcaggggagccattcacagaatttttctccattccatttgtggaggagcggctaaagcaacacccacggccgccaatcccactctcgctcctgctgacagaagaggaagcagccctctacattcaatccttctggagagcctgtgtggttcgctgtgatcctgagattcaagaactgcgtcagtggcagaagaaacttcgcgaggccaagcacattcaccagcaagtcaaaattttctgggccaagcaagaacaaaaagtgaaatgcaaaatggaggacgatgcagtacctgcagccaagatgaaaattccatcatcttaaccatagctaagacgtatctttgcccattcgagcacaagttaccttgtgcaaggaaaatgtccaaatgatgctctctctcttgtgatttctttaacaagacttggaacatgtgcaaatggaatcttttctgtacaagataggattcattgcaaacaagctttaatgcaaatagtttagaaaagaaaggaccagtcttcactttctgcattatccccacattttattcattcatccagattacttcttcagtgcctcaggagtattcttctacaccagctgctgttaaaatgtacaatgaactctagtcccaaggaatacagaagtgctcttattaccagttttcccacttgtggccgcctttgcaaagatccatattctaatttaagtccccaacctctgaatttggttttaagtttacctagtgactgactactctctttataaaaaagaccttatacttaatgatcatttccaaaggagaccactccttaacttttactgcaaacccaacaagatgagacacttaaacccagacagatgtaacaaaggatttttgttgtctaagtcccaaagtattatatagaaagttcctgcttttatgggtaaacttattaccttaatatgttctgtggtttgctgttaaccaagattctcccatttaaaatgccacagaccgaccctcaaggcagatccgaaagcctagtagttagttgcactgggttgttttgacaagctaccacacgtcttaagtaaatagtaaagcctttatttttgtgttaagaacagcattttgaaaataaaacctatctgcccatgctttacagccttttaaatttgtaatatttatatagtcgtttatggtacatattgattgtcttgaaatttctttaacttcttttttataagtatgcaacagtcagccgggggaagataaaggtacattataaaacacacattaatgcatttaataaatatatattatctatcaaaagtgagccttagctcttcatcagttaataaaaagcacctgctgagaactcctgtaagctggtatcatcattgcatcattggattataaaagccacaatgctccctttcaacttggggtttggcctgaggcgttcaactcagccttggccaaccgagaccaccacccgagttcacccttgttcagtgggtcctgacggcatctgggctaaaaaaaaaaaaaaaaaaaagcactgggcgcccagcttccaacaaccagatcttcaactctggaatccctggagatgcacagaacttcccagtttgtaagctgtcagagctgactcccttctcttcccaccctccacctccagtggggagaaatccaggctagaatgacaattttctattaaaaggggggacaagagtggctgttatagacccaaagcgattttaataaccagacacggaacaatttgtgcttacaatgagagattttgatcacagatgctctcctcccgggtcgttttccccaaacgagtcttgtttacacacgcagatcttaaacagaggtgccatttaattttgtctttaaaccttgctccacggggggcagctggctgctacagtctcttggcaaagatgtctcttgatacttttcaggtgtagtcattagaaaaagaacagctctctcccttctcctctcactcccgcctccgcccccattatgaaggcgttcagcccactctcaaccttaaaagccaaaataaaacaaaaccctaagtgcgataacatatcagatttaaaaggggggaaaaaggtctcattaaatgaggcttcccatggctcaaagatggctctgttcttatgc

SEQ ID NO: 375542 - DNA, 2400 bp, Homo sapiens
tgccttaaccgtctgggaatgcagcccaataggtctcagcctcattttacccagcccctattcaagatggagttgctctggttcacgtgcctctgacatttccaataaggatggacctatctggagggtacaggagcctggtttatgtgaaccatgaaaagcagcttcctgagaggaaaagaaccaaattcattgcctgtgattttctgactgagtggttatacaaccaaaatccaaagagggcaggggagccattcacagaatttttctccattccatttgtggaggagcggctaaagcaacacccacggccgccaatcccactctcgctcctgctgacagaagaggaagcagccctctacattcaatccttctggagagcctgtgtggttcgctgtgatcctgagattcaagaactgcgtcagtggcagaagaaacttcgcgaggccaagcacattcaccagcaagtcaaaattttctgggccaagcaagaacaaaaagtgaaatgcaaaatggaggacgatgcagtacctgcagccaagatgaaaattccatcatcttaaccatagctaagacgtatctttgcccattcgagcacaagttaccttgtgcaaggaaaatgtccaaatgatgctctctctcttgtgatttctttaacaagacttggaacatgtgcaaatggaatcttttctgtacaagataggattcattgcaaacaagctttaatgcaaatagtttagaaaagaaaggaccagtcttcactttctgcattatccccacattttattcattcatccagattacttcttcagtgcctcaggagtattcttctacaccagctgctgttaaaatgtacaatgaactctagtcccaaggaatacagaagtgctcttattaccagttttcccacttgtggccgcctttgcaaagatccatattctaatttaagtccccaacctctgaatttggttttaagtttacctagtgactgactactctctttataaaaaagaccttatacttaatgatcatttccaaaggagaccactccttaacttttactgcaaacccaacaagatgagacacttaaacccagacagatgtaacaaaggatttttgttgtctaagtcccaaagtattatatagaaagttcctgcttttatgggtaaacttattaccttaatatgttctgtggtttgctgttaaccaagattctcccatttaaaatgccacagaccgaccctcaaggcagatccgaaagcctagtagttagttgcactgggttgttttgacaagctaccacacgtcttaagtaaatagtaaagcctttatttttgtgttaagaacagcattttgaaaataaaacctatctgcccatgctttacagccttttaaatttgtaatatttatatagtcgtttatggtacatattgattgtcttgaaatttctttaacttcttttttataagtatgcaacagtcagccgggggaagataaaggtacattataaaacacacattaatgcatttaataaatatatattatctatcaaaagtgagccttagctcttcatcagttaataaaaagcacctgctgagaactcctgtaagctggtatcatcattgcatcattggattataaaagccacaatgctccctttcaacttggggtttggcctgaggcgttcaactcagccttggccaaccgagaccaccacccgagttcacccttgttcagtgggtcctgacggcatctgggctaaaaaaaaaaaaaaaaaaaagcactgggcgcccagcttccaacaaccagatcttcaactctggaatccctggagatgcacagaacttcccagtttgtaagctgtcagagctgactcccttctcttcccaccctccacctccagtggggagaaatccaggctagaatgacaattttctattaaaaggggggacaagagtggctgttatagacccaaagcgattttaataaccagacacggaacaatttgtgcttacaatgagagattttgatcacagatgctctcctcccgggtcgttttccccaaacgagtcttgtttacacacgcagatcttaaacagaggtgccatttaattttgtctttaaaccttgctccacggggggcagctggctgctacagtctcttggcaaagatgtctcttgatacttttcaggtgtagtcattagaaaaagaacagctctctcccttctcctctcactcccgcctccgcccccattatgaaggcgttcagcccactctcaaccttaaaagccaaaataaaacaaaaccctaagtgcgataacatatcagatttaaaaggggggaaaaaggtctcattaaatgaggcttcccatggctcaaagatggctctgttcttatgc

SEQ ID NO: 375543 - DNA, 3185 bp, Homo sapiens
  misc_feature (490)..(490): n is a, c, g, or t
attaatccctgagacaaaggtactgaaggcaagtggctgaagaacaggcttgattggacagatgacttggagatgttcactggacagggacagccttgtgaagatctttgtgaatacccgacctcgcaagctccagagactacaataattcacttgccctaggttccaaagccagcaagtggaaaacggagactggaattccgcccacaggactccaaagcctgtgcagcaacaccccactcccccggcaggatcaccagcaggacgcgcgggagccaggaagtaagatccgtacctccaaggctcccatgggcccaagcctccgcatcaacagactgggagggattacgtggggtcccagggccggctctgaggcgggaaaactttctggaggcggcggcctcaggccggagcgggcgcacaccgactggaggggtcggattcagggatgtgggtggaccgcatttccccatcttccccgccgcgcacntcctctggtgcaatctccacaccccgcgccggcccgcctgcaacgcgccctggcactcaccggtgggcgaaatttccccgcctccacgtgagagccagctccgccgtgacccggaagtccacttcgagtcgccggcccaccctctcgggttccggcttcttccgggtcgcggccttccggcgaacgcggttaccgtgggaaaccgcggccatggcggcaccgcggcaaatccccagccacatagtgcgcctcaagcccagctgctctacagactcgtcgttcacccggacgccggtgcccaccgtgtctctcgcgtcccgcgagctgcctgtctcgtcgtggcaggtcaccgagccgtcaagcaagaatctgtgggagcagatctgcaaggagtatgaagctgagcagcctccctttccagaaggatataaagtcaaacaggagcctgtgattacggttgcgccagtagaggaaatgctttttcatggcttcagtgcagagcactattttccggtttcccatttcaccatgatctcacgtacaccctgtcctcaagataaatcggaaacaatcaacccaaaaacatgttctcccaaagaatatttggaaactttcatctttcctgttctgcttcccggaatggctagcctgcttcaccaagcgaagaaagaaaaatgttttgaggttcgctgtgatcctgagattcaagaactgcgtcagtggcagaagaaacttcgcgaggccaagcacattcaccagcaagtcaaaattttctgggccaagcaagaacaaaaagtgaaatgcaaaatggaggacgatgcagtacctgcagccaagatgaaaattccatcatcttaaccatagctaagacgtatctttgcccattcgagcacaagttaccttgtgcaaggaaaatgtccaaatgatgctctctctcttgtgatttctttaacaagacttggaacatgtgcaaatggaatcttttctgtacaagataggattcattgcaaacaagctttaatgcaaatagtttagaaaagaaaggaccagtcttcactttctgcattatccccacattttattcattcatccagattacttcttcagtgcctcaggagtattcttctacaccagctgctgttaaaatgtacaatgaactctagtcccaaggaatacagaagtgctcttattaccagttttcccacttgtggccgcctttgcaaagatccatattctaatttaagtccccaacctctgaatttggttttaagtttacctagtgactgactactctctttataaaaaagaccttatacttaatgatcatttccaaaggagaccactccttaacttttactgcaaacccaacaagatgagacacttaaacccagacagatgtaacaaaggatttttgttgtctaagtcccaaagtattatatagaaagttcctgcttttatgggtaaacttattaccttaatatgttctgtggtttgctgttaaccaagattctcccatttaaaatgccacagaccgaccctcaaggcagatccgaaagcctagtagttagttgcactgggttgttttgacaagctaccacacgtcttaagtaaatagtaaagcctttatttttgtgttaagaacagcattttgaaaataaaacctatctgcccatgctttacagccttttaaatttgtaatatttatatagtcgtttatggtacatattgattgtcttgaaatttctttaacttcttttttataagtatgcaacagtcagccgggggaagataaaggtacattataaaacacacattaatgcatttaataaatatatattatctatcaaaagtgagccttagctcttcatcagttaataaaaagcacctgctgagaactcctgtaagctggtatcatcattgcatcattggattataaaagccacaatgctccctttcaacttggggtttggcctgaggcgttcaactcagccttggccaaccgagaccaccacccgagttcacccttgttcagtgggtcctgacggcatctgggctaaaaaaaaaaaaaaaaaaaagcactgggcgcccagcttccaacaaccagatcttcaactctggaatccctggagatgcacagaacttcccagtttgtaagctgtcagagctgactcccttctcttcccaccctccacctccagtggggagaaatccaggctagaatgacaattttctattaaaaggggggacaagagtggctgttatagacccaaagcgattttaataaccagacacggaacaatttgtgcttacaatgagagattttgatcacagatgctctcctcccgggtcgttttccccaaacgagtcttgtttacacacgcagatcttaaacagaggtgccatttaattttgtctttaaaccttgctccacggggggcagctggctgctacagtctcttggcaaagatgtctcttgatacttttcaggtgtagtcattagaaaaagaacagctctctcccttctcctctcactcccgcctccgcccccattatgaaggcgttcagcccactctcaaccttaaaagccaaaataaaacaaaaccctaagtgcgataacatatcagatttaaaaggggggaaaaaggtctcattaaatgaggcttcccatggctcaaagatggctctgttcttatgc

SEQ ID NO: 375544 - DNA, 2508 bp, Homo sapiens
  misc_feature (490)..(490): n is a, c, g, or t
attaatccctgagacaaaggtactgaaggcaagtggctgaagaacaggcttgattggacagatgacttggagatgttcactggacagggacagccttgtgaagatctttgtgaatacccgacctcgcaagctccagagactacaataattcacttgccctaggttccaaagccagcaagtggaaaacggagactggaattccgcccacaggactccaaagcctgtgcagcaacaccccactcccccggcaggatcaccagcaggacgcgcgggagccaggaagtaagatccgtacctccaaggctcccatgggcccaagcctccgcatcaacagactgggagggattacgtggggtcccagggccggctctgaggcgggaaaactttctggaggcggcggcctcaggccggagcgggcgcacaccgactggaggggtcggattcagggatgtgggtggaccgcatttccccatcttccccgccgcgcacntcctctggtgcaatctccacaccccgcgccggcccgcctgcaacgcgccctggcactcaccggtgggcgaaatttccccgcctccacgtgagagccagctccgccgtgacccggaagtccacttcgagtcgccggcccaccctctcgggttccggcttcttccgggtcgcggccttccggcgaacgcggttaccgtgggaaaccgcggccatggcggcaccgcggcaaatccccagccacatagtgcgcctcaagcccagctgctctacagactcgtcgttcacccggacgccggtgcccaccgtgtctctcgcgtcccgcgagctgcctgtctcgtcgtggcaggtcaccgagccgtcaagcaagaatctgtgggagcagatctgcaaggagtatgaagctgagcagcctccctttccagaaggatataaagtcaaacaggagcctgtgattacggttgcgccagtagaggaaatgctttttcatggcttcagtgcagagcactattttccggtttcccatttcaccatgatctcacgtacaccctgtcctcaagataaatcggaaacaatcaacccaaaaacatgttctcccaaagaatatttggaaactttcatctttcctgttctgcttcccggaatggctagcctgcttcaccaagcgaagaaagaaaaatgttttgagaggaaaagaaccaaattcattgcctgtgattttctgactgagtggttatacaaccaaaatccaaagagggcaggggagccattcacagaatttttctccattccatttgtggaggagcggctaaagcaacacccacggccgccaatcccactctcgctcctgctgacagaagaggaagcagccctctacattcaatccttctggagagcctgtgtggttcgctgtgatcctgagattcaagaactgcgtcagtggcagaagaaacttcgcgaggccaagcacattcaccagcaagtcaaaattttctgggccaagcaagaacaaaaagtgaaatgcaaaatggaggacgatgcagtacctgcagccaagatgaaaattccatcatcttaaccatagctaagactatgcaacagtcagccgggggaagataaaggtacattataaaacacacattaatgcatttaataaatatatattatctatcaaaagtgagccttagctcttcatcagttaataaaaagcacctgctgagaactcctgtaagctggtatcatcattgcatcattggattataaaagccacaatgctccctttcaacttggggtttggcctgaggcgttcaactcagccttggccaaccgagaccaccacccgagttcacccttgttcagtgggtcctgacggcatctgggctaaaaaaaaaaaaaaaaaaaagcactgggcgcccagcttccaacaaccagatcttcaactctggaatccctggagatgcacagaacttcccagtttgtaagctgtcagagctgactcccttctcttcccaccctccacctccagtggggagaaatccaggctagaatgacaattttctattaaaaggggggacaagagtggctgttatagacccaaagcgattttaataaccagacacggaacaatttgtgcttacaatgagagattttgatcacagatgctctcctcccgggtcgttttccccaaacgagtcttgtttacacacgcagatcttaaacagaggtgccatttaattttgtctttaaaccttgctccacggggggcagctggctgctacagtctcttggcaaagatgtctcttgatacttttcaggtgtagtcattagaaaaagaacagctctctcccttctcctctcactcccgcctccgcccccattatgaaggcgttcagcccactctcaaccttaaaagccaaaataaaacaaaaccctaagtgcgataacatatcagatttaaaaggggggaaaaaggtctcattaaatgaggcttcccatggctcaaagatggctctgttcttatgc

SEQ ID NO: 375545 - DNA, 1282 bp, Homo sapiens
  misc_feature (490)..(490): n is a, c, g, or t
attaatccctgagacaaaggtactgaaggcaagtggctgaagaacaggcttgattggacagatgacttggagatgttcactggacagggacagccttgtgaagatctttgtgaatacccgacctcgcaagctccagagactacaataattcacttgccctaggttccaaagccagcaagtggaaaacggagactggaattccgcccacaggactccaaagcctgtgcagcaacaccccactcccccggcaggatcaccagcaggacgcgcgggagccaggaagtaagatccgtacctccaaggctcccatgggcccaagcctccgcatcaacagactgggagggattacgtggggtcccagggccggctctgaggcgggaaaactttctggaggcggcggcctcaggccggagcgggcgcacaccgactggaggggtcggattcagggatgtgggtggaccgcatttccccatcttccccgccgcgcacntcctctggtgcaatctccacaccccgcgccggcccgcctgcaacgcgccctggcactcaccggtgggcgaaatttccccgcctccacgtgagagccagctccgccgtgacccggaagtccacttcgagtcgccggcccaccctctcgggttccggcttcttccgggtcgcggccttccggcgaacgcggttaccgtgggaaaccgcggccatggcggcaccgcggcaaatccccagccacatagtgcgcctcaagcccagctgctctacagactcgtcgttcacccggacgccggtgcccaccgtgtctctcgcgtcccgcgagctgcctgtctcgtcgtggcaggtcaccgagccgtcaagcaagaatctgtgggagcagatctgcaaggagtatgaagctgagcagcctccctttccagaaggatataaagtcaaacaggagcctgtgattacggttgcgccagtagaggaaatgctttttcatggcttcagtgcagagcactattttccggtttcccatttcaccatgatctcacgtacaccctgtcctcaagataaatcggaaacaatcaacccaaaaacatgtgagtaagagagatgccatcttttataatttggggcttttaacattgcagaaccacagggtgggtatggaggcggacagatggacctcagggagaccacatacataagaaagaatgtgttcttgttttatttttaagagacatgtcctttatttcactgatttatctttaaggttaaaaatgtaataaagataataagtaacaaa

SEQ ID NO: 375546 - DNA, 3401 bp, Homo sapiens
  misc_feature (490)..(490): n is a, c, g, or t
attaatccctgagacaaaggtactgaaggcaagtggctgaagaacaggcttgattggacagatgacttggagatgttcactggacagggacagccttgtgaagatctttgtgaatacccgacctcgcaagctccagagactacaataattcacttgccctaggttccaaagccagcaagtggaaaacggagactggaattccgcccacaggactccaaagcctgtgcagcaacaccccactcccccggcaggatcaccagcaggacgcgcgggagccaggaagtaagatccgtacctccaaggctcccatgggcccaagcctccgcatcaacagactgggagggattacgtggggtcccagggccggctctgaggcgggaaaactttctggaggcggcggcctcaggccggagcgggcgcacaccgactggaggggtcggattcagggatgtgggtggaccgcatttccccatcttccccgccgcgcacntcctctggtgcaatctccacaccccgcgccggcccgcctgcaacgcgccctggcactcaccggtgggcgaaatttccccgcctccacgtgagagccagctccgccgtgacccggaagtccacttcgagtcgccggcccaccctctcgggttccggcttcttccgggtcgcggccttccggcgaacgcggttaccgtgggaaaccgcggccatggcggcaccgcggcaaatccccagccacatagtgcgcctcaagcccagctgctctacagactcgtcgttcacccggacgccggtgcccaccgtgtctctcgcgtcccgcgagctgcctgtctcgtcgtggcaggtcaccgagccgtcaagcaagaatctgtgggagcagatctgcaaggagtatgaagctgagcagcctccctttccagaaggatataaagtcaaacaggagcctgtgattacggttgcgccagtagaggaaatgctttttcatggcttcagtgcagagcactattttccggtttcccatttcaccatgatctcacgtacaccctgtcctcaagataaatcggaaacaatcaacccaaaaacatgttctcccaaagaatatttggaaactttcatctttcctgttctgcttcccggaatggctagcctgcttcaccaagcgaagaaagaaaaatgttttgagaggaaaagaaccaaattcattgcctgtgattttctgactgagtggttatacaaccaaaatccaaagagggcaggggagccattcacagaatttttctccattccatttgtggaggagcggctaaagcaacacccacggccgccaatcccactctcgctcctgctgacagaagaggaagcagccctctacattcaatccttctggagagcctgtgtggttcgctgtgatcctgagattcaagaactgcgtcagtggcagaagaaacttcgcgaggccaagcacattcaccagcaagtcaaaattttctgggccaagcaagaacaaaaagtgaaatgcaaaatggaggacgatgcagtacctgcagccaagatgaaaattccatcatcttaaccatagctaagacgtatctttgcccattcgagcacaagttaccttgtgcaaggaaaatgtccaaatgatgctctctctcttgtgatttctttaacaagacttggaacatgtgcaaatggaatcttttctgtacaagataggattcattgcaaacaagctttaatgcaaatagtttagaaaagaaaggaccagtcttcactttctgcattatccccacattttattcattcatccagattacttcttcagtgcctcaggagtattcttctacaccagctgctgttaaaatgtacaatgaactctagtcccaaggaatacagaagtgctcttattaccagttttcccacttgtggccgcctttgcaaagatccatattctaatttaagtccccaacctctgaatttggttttaagtttacctagtgactgactactctctttataaaaaagaccttatacttaatgatcatttccaaaggagaccactccttaacttttactgcaaacccaacaagatgagacacttaaacccagacagatgtaacaaaggatttttgttgtctaagtcccaaagtattatatagaaagttcctgcttttatgggtaaacttattaccttaatatgttctgtggtttgctgttaaccaagattctcccatttaaaatgccacagaccgaccctcaaggcagatccgaaagcctagtagttagttgcactgggttgttttgacaagctaccacacgtcttaagtaaatagtaaagcctttatttttgtgttaagaacagcattttgaaaataaaacctatctgcccatgctttacagccttttaaatttgtaatatttatatagtcgtttatggtacatattgattgtcttgaaatttctttaacttcttttttataagtatgcaacagtcagccgggggaagataaaggtacattataaaacacacattaatgcatttaataaatatatattatctatcaaaagtgagccttagctcttcatcagttaataaaaagcacctgctgagaactcctgtaagctggtatcatcattgcatcattggattataaaagccacaatgctccctttcaacttggggtttggcctgaggcgttcaactcagccttggccaaccgagaccaccacccgagttcacccttgttcagtgggtcctgacggcatctgggctaaaaaaaaaaaaaaaaaaaagcactgggcgcccagcttccaacaaccagatcttcaactctggaatccctggagatgcacagaacttcccagtttgtaagctgtcagagctgactcccttctcttcccaccctccacctccagtggggagaaatccaggctagaatgacaattttctattaaaaggggggacaagagtggctgttatagacccaaagcgattttaataaccagacacggaacaatttgtgcttacaatgagagattttgatcacagatgctctcctcccgggtcgttttccccaaacgagtcttgtttacacacgcagatcttaaacagaggtgccatttaattttgtctttaaaccttgctccacggggggcagctggctgctacagtctcttggcaaagatgtctcttgatacttttcaggtgtagtcattagaaaaagaacagctctctcccttctcctctcactcccgcctccgcccccattatgaaggcgttcagcccactctcaaccttaaaagccaaaataaaacaaaaccctaagtgcgataacatatcagatttaaaaggggggaaaaaggtctcattaaatgaggcttcccatggctcaaagatggctctgttcttatgc

SEQ ID NO: 375547 - DNA, 3270 bp, Homo sapiens
  misc_feature (490)..(490): n is a, c, g, or t
attaatccctgagacaaaggtactgaaggcaagtggctgaagaacaggcttgattggacagatgacttggagatgttcactggacagggacagccttgtgaagatctttgtgaatacccgacctcgcaagctccagagactacaataattcacttgccctaggttccaaagccagcaagtggaaaacggagactggaattccgcccacaggactccaaagcctgtgcagcaacaccccactcccccggcaggatcaccagcaggacgcgcgggagccaggaagtaagatccgtacctccaaggctcccatgggcccaagcctccgcatcaacagactgggagggattacgtggggtcccagggccggctctgaggcgggaaaactttctggaggcggcggcctcaggccggagcgggcgcacaccgactggaggggtcggattcagggatgtgggtggaccgcatttccccatcttccccgccgcgcacntcctctggtgcaatctccacaccccgcgccggcccgcctgcaacgcgccctggcactcaccggtgggcgaaatttccccgcctccacgtgagagccagctccgccgtgacccggaagtccacttcgagtcgccggcccaccctctcgggttccggcttcttccgggtcgcggccttccggcgaacgcggttaccgtgggaaaccgcggccatggcggcaccgcggcaaatccccagccacatagtgcgcctcaagcccagctgctctacagactcgtcgttcacccggacgccggtgcccaccgtgtctctcgcgtcccgcgagctgcctgtctcgtcgtggcaggtcaccgagccgtcaagcaagaatctgtgggagcagatctgcaaggagtatgaagctgagcagcctccctttccagaaggatataaagtcaaacaggagcctgtgattacggttgcgccagtagaggaaatgctttttcatggcttcagtgcagagcactattttccggtttcccatttcaccatgatctcacgtacaccctgtcctcaagataaatcggaaacaatcaacccaaaaacatgttctcccaaagaatatttggaaactttcatctttcctgttctgcttcccggaatggctagcctgcttcaccaagcgaagaaagaaaaatgttttgagcccacggccgccaatcccactctcgctcctgctgacagaagaggaagcagccctctacattcaatccttctggagagcctgtgtggttcgctgtgatcctgagattcaagaactgcgtcagtggcagaagaaacttcgcgaggccaagcacattcaccagcaagtcaaaattttctgggccaagcaagaacaaaaagtgaaatgcaaaatggaggacgatgcagtacctgcagccaagatgaaaattccatcatcttaaccatagctaagacgtatctttgcccattcgagcacaagttaccttgtgcaaggaaaatgtccaaatgatgctctctctcttgtgatttctttaacaagacttggaacatgtgcaaatggaatcttttctgtacaagataggattcattgcaaacaagctttaatgcaaatagtttagaaaagaaaggaccagtcttcactttctgcattatccccacattttattcattcatccagattacttcttcagtgcctcaggagtattcttctacaccagctgctgttaaaatgtacaatgaactctagtcccaaggaatacagaagtgctcttattaccagttttcccacttgtggccgcctttgcaaagatccatattctaatttaagtccccaacctctgaatttggttttaagtttacctagtgactgactactctctttataaaaaagaccttatacttaatgatcatttccaaaggagaccactccttaacttttactgcaaacccaacaagatgagacacttaaacccagacagatgtaacaaaggatttttgttgtctaagtcccaaagtattatatagaaagttcctgcttttatgggtaaacttattaccttaatatgttctgtggtttgctgttaaccaagattctcccatttaaaatgccacagaccgaccctcaaggcagatccgaaagcctagtagttagttgcactgggttgttttgacaagctaccacacgtcttaagtaaatagtaaagcctttatttttgtgttaagaacagcattttgaaaataaaacctatctgcccatgctttacagccttttaaatttgtaatatttatatagtcgtttatggtacatattgattgtcttgaaatttctttaacttcttttttataagtatgcaacagtcagccgggggaagataaaggtacattataaaacacacattaatgcatttaataaatatatattatctatcaaaagtgagccttagctcttcatcagttaataaaaagcacctgctgagaactcctgtaagctggtatcatcattgcatcattggattataaaagccacaatgctccctttcaacttggggtttggcctgaggcgttcaactcagccttggccaaccgagaccaccacccgagttcacccttgttcagtgggtcctgacggcatctgggctaaaaaaaaaaaaaaaaaaaagcactgggcgcccagcttccaacaaccagatcttcaactctggaatccctggagatgcacagaacttcccagtttgtaagctgtcagagctgactcccttctcttcccaccctccacctccagtggggagaaatccaggctagaatgacaattttctattaaaaggggggacaagagtggctgttatagacccaaagcgattttaataaccagacacggaacaatttgtgcttacaatgagagattttgatcacagatgctctcctcccgggtcgttttccccaaacgagtcttgtttacacacgcagatcttaaacagaggtgccatttaattttgtctttaaaccttgctccacggggggcagctggctgctacagtctcttggcaaagatgtctcttgatacttttcaggtgtagtcattagaaaaagaacagctctctcccttctcctctcactcccgcctccgcccccattatgaaggcgttcagcccactctcaaccttaaaagccaaaataaaacaaaaccctaagtgcgataacatatcagatttaaaaggggggaaaaaggtctcattaaatgaggcttcccatggctcaaagatggctctgttcttatgc

SEQ ID NO: 375548 - DNA, 2699 bp, Homo sapiens
  misc_feature (14)..(14): n is a, c, g, or t
ctggcgcaacgtantcacaggctcctgtttgactttatatccttctggaaagggaggctgctcagcttcatactccttgcagatctgctcccacagattcttgcttgacggctcggtgacctgccacgacgagacaggcagctcgcgggacgcgagagacacggtgggcaccggcgtccgggtgaacgacgagtctgtagagcagctgggcttgaggcgcactatgtggctggggatttgccgcgttgcgccagtagaggaaatgctttttcatggcttcagtgcagagcactattttccggtttcccatttcaccatgatctcacgtacaccctgtcctcaagataaatcggaaacaatcaacccaaaaacatgttctcccaaagaatatttggaaactttcatctttcctgttctgcttcccggaatggctagcctgcttcaccaagcgaagaaagaaaaatgttttgagaggaaaagaaccaaattcattgcctgtgattttctgactgagtggttatacaaccaaaatccaaagagggcaggggagccattcacagaatttttctccattccatttgtggaggagcggctaaagcaacacccacggccgccaatcccactctcgctcctgctgacagaagaggaagcagccctctacattcaatccttctggagagcctgtgtggttcgctgtgatcctgagattcaagaactgcgtcagtggcagaagaaacttcgcgaggccaagcacattcaccagcaagtcaaaattttctgggccaagcaagaacaaaaagtgaaatgcaaaatggaggacgatgcagtacctgcagccaagatgaaaattccatcatcttaaccatagctaagacgtatctttgcccattcgagcacaagttaccttgtgcaaggaaaatgtccaaatgatgctctctctcttgtgatttctttaacaagacttggaacatgtgcaaatggaatcttttctgtacaagataggattcattgcaaacaagctttaatgcaaatagtttagaaaagaaaggaccagtcttcactttctgcattatccccacattttattcattcatccagattacttcttcagtgcctcaggagtattcttctacaccagctgctgttaaaatgtacaatgaactctagtcccaaggaatacagaagtgctcttattaccagttttcccacttgtggccgcctttgcaaagatccatattctaatttaagtccccaacctctgaatttggttttaagtttacctagtgactgactactctctttataaaaaagaccttatacttaatgatcatttccaaaggagaccactccttaacttttactgcaaacccaacaagatgagacacttaaacccagacagatgtaacaaaggatttttgttgtctaagtcccaaagtattatatagaaagttcctgcttttatgggtaaacttattaccttaatatgttctgtggtttgctgttaaccaagattctcccatttaaaatgccacagaccgaccctcaaggcagatccgaaagcctagtagttagttgcactgggttgttttgacaagctaccacacgtcttaagtaaatagtaaagcctttatttttgtgttaagaacagcattttgaaaataaaacctatctgcccatgctttacagccttttaaatttgtaatatttatatagtcgtttatggtacatattgattgtcttgaaatttctttaacttcttttttataagtatgcaacagtcagccgggggaagataaaggtacattataaaacacacattaatgcatttaataaatatatattatctatcaaaagtgagccttagctcttcatcagttaataaaaagcacctgctgagaactcctgtaagctggtatcatcattgcatcattggattataaaagccacaatgctccctttcaacttggggtttggcctgaggcgttcaactcagccttggccaaccgagaccaccacccgagttcacccttgttcagtgggtcctgacggcatctgggctaaaaaaaaaaaaaaaaaaaagcactgggcgcccagcttccaacaaccagatcttcaactctggaatccctggagatgcacagaacttcccagtttgtaagctgtcagagctgactcccttctcttcccaccctccacctccagtggggagaaatccaggctagaatgacaattttctattaaaaggggggacaagagtggctgttatagacccaaagcgattttaataaccagacacggaacaatttgtgcttacaatgagagattttgatcacagatgctctcctcccgggtcgttttccccaaacgagtcttgtttacacacgcagatcttaaacagaggtgccatttaattttgtctttaaaccttgctccacggggggcagctggctgctacagtctcttggcaaagatgtctcttgatacttttcaggtgtagtcattagaaaaagaacagctctctcccttctcctctcactcccgcctccgcccccattatgaaggcgttcagcccactctcaaccttaaaagccaaaataaaacaaaaccctaagtgcgataacatatcagatttaaaaggggggaaaaaggtctcattaaatgaggcttcccatggctcaaagatggctctgttcttatgc

SEQ ID NO: 375549 - DNA, 3172 bp, Homo sapiens
  misc_feature (490)..(490): n is a, c, g, or t
attaatccctgagacaaaggtactgaaggcaagtggctgaagaacaggcttgattggacagatgacttggagatgttcactggacagggacagccttgtgaagatctttgtgaatacccgacctcgcaagctccagagactacaataattcacttgccctaggttccaaagccagcaagtggaaaacggagactggaattccgcccacaggactccaaagcctgtgcagcaacaccccactcccccggcaggatcaccagcaggacgcgcgggagccaggaagtaagatccgtacctccaaggctcccatgggcccaagcctccgcatcaacagactgggagggattacgtggggtcccagggccggctctgaggcgggaaaactttctggaggcggcggcctcaggccggagcgggcgcacaccgactggaggggtcggattcagggatgtgggtggaccgcatttccccatcttccccgccgcgcacntcctctggtgcaatctccacaccccgcgccggcccgcctgcaacgcgccctggcactcaccggtgggcgaaatttccccgcctccacgtgagagccagctccgccgtgacccggaagtccacttcgagtcgccggcccaccctctcgggttccggcttcttccgggtcgcggccttccggcgaacgcggttaccgtgggaaaccgcggccatggcggcaccgcggcaaatccccagccacatagtgcgcctcaagcccagctgctctacagactcgtcgttcacccggacgccggtgcccaccgtgtctctcgcgtcccgcgagctgcctgtctcgtcgtggcaggtcaccgagccgtcaagcaagaatctgtgggagcagatctgcaaggagtatgaagctgagcagcctccctttccagaaggatataaagtcaaacaggagcctgtgattacggttgcgccagtagaggaaatgctttttcatggcttcagtgcagagcactattttccggtttcccatttcaccatgatctcacgtacaccctgtcctcaagataaatcggaaacaatcaacccaaaaacatcccacggccgccaatcccactctcgctcctgctgacagaagaggaagcagccctctacattcaatccttctggagagcctgtgtggttcgctgtgatcctgagattcaagaactgcgtcagtggcagaagaaacttcgcgaggccaagcacattcaccagcaagtcaaaattttctgggccaagcaagaacaaaaagtgaaatgcaaaatggaggacgatgcagtacctgcagccaagatgaaaattccatcatcttaaccatagctaagacgtatctttgcccattcgagcacaagttaccttgtgcaaggaaaatgtccaaatgatgctctctctcttgtgatttctttaacaagacttggaacatgtgcaaatggaatcttttctgtacaagataggattcattgcaaacaagctttaatgcaaatagtttagaaaagaaaggaccagtcttcactttctgcattatccccacattttattcattcatccagattacttcttcagtgcctcaggagtattcttctacaccagctgctgttaaaatgtacaatgaactctagtcccaaggaatacagaagtgctcttattaccagttttcccacttgtggccgcctttgcaaagatccatattctaatttaagtccccaacctctgaatttggttttaagtttacctagtgactgactactctctttataaaaaagaccttatacttaatgatcatttccaaaggagaccactccttaacttttactgcaaacccaacaagatgagacacttaaacccagacagatgtaacaaaggatttttgttgtctaagtcccaaagtattatatagaaagttcctgcttttatgggtaaacttattaccttaatatgttctgtggtttgctgttaaccaagattctcccatttaaaatgccacagaccgaccctcaaggcagatccgaaagcctagtagttagttgcactgggttgttttgacaagctaccacacgtcttaagtaaatagtaaagcctttatttttgtgttaagaacagcattttgaaaataaaacctatctgcccatgctttacagccttttaaatttgtaatatttatatagtcgtttatggtacatattgattgtcttgaaatttctttaacttcttttttataagtatgcaacagtcagccgggggaagataaaggtacattataaaacacacattaatgcatttaataaatatatattatctatcaaaagtgagccttagctcttcatcagttaataaaaagcacctgctgagaactcctgtaagctggtatcatcattgcatcattggattataaaagccacaatgctccctttcaacttggggtttggcctgaggcgttcaactcagccttggccaaccgagaccaccacccgagttcacccttgttcagtgggtcctgacggcatctgggctaaaaaaaaaaaaaaaaaaaagcactgggcgcccagcttccaacaaccagatcttcaactctggaatccctggagatgcacagaacttcccagtttgtaagctgtcagagctgactcccttctcttcccaccctccacctccagtggggagaaatccaggctagaatgacaattttctattaaaaggggggacaagagtggctgttatagacccaaagcgattttaataaccagacacggaacaatttgtgcttacaatgagagattttgatcacagatgctctcctcccgggtcgttttccccaaacgagtcttgtttacacacgcagatcttaaacagaggtgccatttaattttgtctttaaaccttgctccacggggggcagctggctgctacagtctcttggcaaagatgtctcttgatacttttcaggtgtagtcattagaaaaagaacagctctctcccttctcctctcactcccgcctccgcccccattatgaaggcgttcagcccactctcaaccttaaaagccaaaataaaacaaaaccctaagtgcgataacatatcagatttaaaaggggggaaaaaggtctcattaaatgaggcttcccatggctcaaagatggctctgttcttatgc

SEQ ID NO: 375550 - DNA, 2685 bp, Homo sapiens
  misc_feature (490)..(490): n is a, c, g, or t
attaatccctgagacaaaggtactgaaggcaagtggctgaagaacaggcttgattggacagatgacttggagatgttcactggacagggacagccttgtgaagatctttgtgaatacccgacctcgcaagctccagagactacaataattcacttgccctaggttccaaagccagcaagtggaaaacggagactggaattccgcccacaggactccaaagcctgtgcagcaacaccccactcccccggcaggatcaccagcaggacgcgcgggagccaggaagtaagatccgtacctccaaggctcccatgggcccaagcctccgcatcaacagactgggagggattacgtggggtcccagggccggctctgaggcgggaaaactttctggaggcggcggcctcaggccggagcgggcgcacaccgactggaggggtcggattcagggatgtgggtggaccgcatttccccatcttccccgccgcgcacntcctctggtgcaatctccacaccccgcgccggcccgcctgcaacgcgccctggcactcaccggtgggcgaaatttccccgcctccacgtgagagccagctccgccgtgacccggaagtccacttcgagtcgccggcccaccctctcgggttccggcttcttccgggtcgcggccttccggcgaacgcggttaccgtgggaaaccgcggccatggcggcaccgcggcaaatccccagccacatagtgcgcctcaagcccagctgctctacagactcgtcgttcacccggacgccggtgcccaccgtgtctctcgcgtcccgcgagctgcctgtctcgtcgtggcaggtcaccgagccgtcaagcaagaatctgtgggagcagatctgcaaggagtatgaagctgagcagcctccctttccagaaggatataaagtcaaacaggagcctgtgattacggttgcgccagtagaggaaatgctttttcatggcttcagtgcagagcactattttccggtttcccatttcaccatgatctcacgtacaccctgtcctcaagataaatcggaaacaatcaacccaaaaacatgttctcccaaagaatatttggaaactttcatctttcctgttctgcttcccggaatggctagcctgcttcaccaagcgaagaaagaaaaatgttttgagaggaaaagaaccaaattcattgcctgtgattttctgactgagtggttatacaagtaagttgttcgtgtctgactattcagtgatcctaagaattcagtcgtgttaatttgcaagcagaatagcaacaactgacttgaattcttgcttattgttttcttgtcaatcaaacatatggcatcatgaccagccaaaatccaaagagggcaggggagccattcacagaatttttctccattccatttgtggaggagcggctaaagcaacacccacggccgccaatcccactctcgctcctgctgacagaagaggaagcagccctctacattcaatccttctggagagcctgtgtggttcgctgtgatcctgagattcaagaactgcgtcagtggcagaagaaacttcgcgaggccaagcacattcaccagcaagtcaaaattttctgggccaagcaagaacaaaaagtgaaatgcaaaatggaggacgatgcagtacctgcagccaagatgaaaattccatcatcttaaccatagctaagacgtatctttgcccattcgagcacaagttaccttgtgcaaggaaaatgtccaaatgatgctctctctcttgtgatttctttaacaagacttggaacatgtgcaaatggaatcttttctgtacaagataggattcattgcaaacaagctttaatgcaaatagtttagaaaagaaaggaccagtcttcactttctgcattatccccacattttattcattcatccagattacttcttcagtgcctcaggagtattcttctacaccagctgctgttaaaatgtacaatgaactctagtcccaaggaatacagaagtgctcttattaccagttttcccacttgtggccgcctttgcaaagatccatattctaatttaagtccccaacctctgaatttggttttaagtttacctagtgactgactactctctttataaaaaagaccttatacttaatgatcatttccaaaggagaccactccttaacttttactgcaaacccaacaagatgagacacttaaacccagacagatgtaacaaaggatttttgttgtctaagtcccaaagtattatatagaaagttcctgcttttatgggtaaacttattaccttaatatgttctgtggtttgctgttaaccaagattctcccatttaaaatgccacagaccgaccctcaaggcagatccgaaagcctagtagttagttgcactgggttgttttgacaagctaccacacgtcttaagtaaatagtaaagcctttatttttgtgttaagaacagcattttgaaaataaaacctatctgcccatgctttacagccttttaaatttgtaatatttatatagtcgtttatggtacatattgattgtcttgaaatttctttaacttcttttttataagtatgcaacagtcagccgggggaagataaaggtacattataaaacacacattaatgcatttaataaatatatattatctatc

SEQ ID NO: 375551 - DNA, 1410 bp, Homo sapiens
  misc_feature (490)..(490): n is a, c, g, or t
attaatccctgagacaaaggtactgaaggcaagtggctgaagaacaggcttgattggacagatgacttggagatgttcactggacagggacagccttgtgaagatctttgtgaatacccgacctcgcaagctccagagactacaataattcacttgccctaggttccaaagccagcaagtggaaaacggagactggaattccgcccacaggactccaaagcctgtgcagcaacaccccactcccccggcaggatcaccagcaggacgcgcgggagccaggaagtaagatccgtacctccaaggctcccatgggcccaagcctccgcatcaacagactgggagggattacgtggggtcccagggccggctctgaggcgggaaaactttctggaggcggcggcctcaggccggagcgggcgcacaccgactggaggggtcggattcagggatgtgggtggaccgcatttccccatcttccccgccgcgcacntcctctggtgcaatctccacaccccgcgccggcccgcctgcaacgcgccctggcactcaccggtgggcgaaatttccccgcctccacgtgagagccagctccgccgtgacccggaagtccacttcgagtcgccggcccaccctctcgggttccggcttcttccgggtcgcggccttccggcgaacgcggttaccgtgggaaaccgcggccatggcggcaccgcggcaaatccccagccacatagtgcgcctcaagcccagctgctctacagactcgtcgttcacccggacgccggtgcccaccgtgtctctcgcgtcccgcgagctgcctgtctcgtcgtggcaggtcaccgagccgtcaagcaagaatctgtgggagcagatctgcaaggagtatgaagctgagcagcctccctttccagaaggatataaagtcaaacaggagcctgtgattacggttgcgccagtagaggaaatgctttttcatggcttcagtgcagagcactattttccggtttcccatttcaccatgatctcacgtacaccctgtcctcaagataaatcggaaacaatcaacccaaaaacatgttctcccaaagaatatttggaaactttcatctttcctgttctgcttcccggaatggctagcctgcttcaccaagcgaagaaagaaaaatgttttgaggttgttctccagatgaccccttcgggagggaaagcctgtgtttggggtcacttacccagttccagccacaccatctagttgtgcacatacatgcgctgccatctgtctggccacttggactccggagagcttttccgccttgcttggcctcctgcctgaccttctcctgtgcagtttggcatccaccaggtttcttgggtcttcagcttctgtttattacatgcactgattaaagc

SEQ ID NO: 375552 - DNA, 770 bp, Homo sapiens
atttattaaaaaacgggcacttatttctaacagttctggaggcaggagtctaagatcaagacaccagcagattgggtgtctgatgagagcctgctgtttacctccaagatggcaccttgttgctacattctctagaggggaggaactctgtgccttcttcatctggcaaagggatagaagggcaaaaaaaaagggccaaactccctccgtgaagcccttttataatgacattaatccatttgtgagggctttgccttcacgacctgaacacctaccaaaaggccctacctcccagcagtactgcattggggattaagtttctaatacatgaattttggaggacacattcagaccccataggcagggattcagtttcgttttgtttttaaatatgggataacaaactgtcccatacgttactaaaaaaatccatacttccttcaatgattgccattcacttctgtcatgtattatattctcatttatgcatgatctatgcctgtgctctctattggtgtgtttatttatatgccaacacgttatctttataataaattttgtatgttagattaagccttttgacgttactcctctttagacatattttggcccttcatgcacttttgatcttctattgaaattttatttggggctgggcacagtggctcatgctataatcctatcattttgggaggctgaggtgggtagatcatttgaggtcagaagttcaagaccagcctggccaacatggtgagaccccgtctgtacta

SEQ ID NO: 375553 - DNA, 400 bp, Homo sapiens
gaatgagggaacatttaatgtcatttgttaggagatagaaaccaaataataaaggacaaggaccacgctcattccgtggagaagaggtgaactccctctgctgactatttggaatggactgaatgaggaggtctctccagccagaaggagtattgaggtcatcaggcctcagaaaacaatgtacacataatctcgggctgtgaacaagagaaaggagggggggaaacatgaaagtcaatcttaacaatttttgcaatacctcttatttgcagaccattggatttatgttattgcactctcggtgtgatttatcgtatgtatctgataggttttatgaattgttttgagttgtaaactcctataccctttattaaaatggacctaattaaatgaaaagaaa

SEQ ID NO: 375554 - DNA, 2118 bp, Homo sapiens
cgcaggcggaagtgagacgccggaagcggtcgttgccatggatcctggggacgactggctggtggaatccttgcgcttgtaccaggatttctatgcattcgacctgtcaggagccactcgagtccttgaatggattgatgacaaaggagtctttgttgctggctatgaaagcctgaaaaagaatgaaattcttcatctgaaattacctctcagactttctgtaaaggaaaacaagggcttattcccagaaagagatttcaaagtgcgccatggaggattttcagacaggtctatctttgatctaaagcatgtgccacataccagattgctggttaccagtggccttccaggttgttatctgcaggtgtggcaggttgcagaggacagtgatgtcattaaagctgtcagcaccattgctgtgcatgagaaagaggagagtctctggcctagggtggccgtcttctccacattggcacccggagtcctccatggggcgaggctccgaagtctgcaggtcgttgatctggagtcccggaagaccacgtacacctcagatgtcagtgacagtgaggagctgagtagcctgcaggtcctagatgcagacacctttgccttctgctgtgcttcgggccggctggggcttgttgacacccggcagaagtgggcaccgttggagaatcgcagccctggccctgggtctggtggagagagatggtgtgctgaagttgggagctggggccagggccctgggcccagcattgccagccttggctcagatgggcgtctttgtcttcttgacccccgggatctctgccatcctgtgagctcagtccagtgcccagtatccgtacctagccctgacccagagctgctgcgagtgacttgggccccaggcctgaagaattgcttggccatctcaggttttgatggtacagtccaggtctatgatgccacatcttgggatggaacacggagccaagatggaacacggagccaagtagaacctctcttcactcacagaggtcacatcttcctagatggaaatgggatggaccctgctcctttggtcaccacccacacctggcatccctgcagaccaaggactttgttatcagcaacaaatgatgcctctctgcatgtgtgggactgggtggacctttgtgccccccgctgacaccagcatctttccatctaggcctctagaaaggggaggagctgctgtagtagcaagggtgctgatgtaggactcaagtgactaccagtccctgttaccagctgtgtggccttgggcaagtctgccagcgtcacttagcctcagtttccttatctgtaaaatgaggatagtaagaactacctcgtagtgatattgcgaaggttagaagaaacgcatggcataattacttggtagctattgttagatctgggagtgtgaaatggtagcgttttgtccctgtcttcacactatcatagggagaatcaaaagagctaacaaatataaacatgctttgtgaatttttttaaagaaaaaaatgtagaggggccaataaacatgaaaaaatcccagccctagtagcaattaaggaaatagcaaaacaggatttctgctcctcttgagtgggtctcatgggaacacaggtgcactttcccacacttgtccccccaggtgactaggttcaagagacatttgcttttggtggccccacaaacatttccttttgagggcccatagtgaatattaaagtgtgctggacatggtggctcatgcctgtaatcccagcactttcagaggctgaggtgggcagattgcttgagctgaggagtttgagaccagcctgggcaacatagcaagatcccttcccttaaaaaaaaaaaaaatttggctgggcatggtggctcatgcctgtaatcccagcaatgtaggcagccaaaacaggtggatcacttgagtccaggagttcgagactagcctgaggcaacacaggagaacccccatctctaaaaaaaaaaaacatgtttaggacatcacgcaagcataatgacatatgcctgtgggtcctacagaggaagcccaagcaggagcagactgaagcaggaggatctacataggagatgaaccgg

SEQ ID NO: 375555 - DNA, 2089 bp, Homo sapiens
cgcaggcggaagtgagacgccggaagcggtcgttgccatggatcctggggacgactggctggtggaatccttgcgcttgtaccaggatttctatgcattcgacctgtcaggagccactcgagtccttgaatggattgatgacaaaggagtctttgttgctggctatgaaagcctgaaaaagaatgaaattcttcatctgaaattacctctcagactttctgtaaaggaaaacaagggcttattcccagaaagagatttcaaagtgcgccatggaggattttcagacaggtctatctttgatctaaagcatgtgccacataccagattgctggttaccagtggccttccaggttgttatctgcaggtgtggcaggttgcagaggacagtgatgtcattaaagctgtcagcaccattgctgtgcatgagaaagaggagagtctctggcctagggtggccgtcttctccacattggcacccggagtcctccatggggcgaggctccgaagtctgcaggtcgttgatctggagtcccggaagaccacgtacacctcagatgtcagtgacagtgaggagctgagtagcctgcaggtcctagatgcagacacctttgccttctgctgtgcttcgggccggctggggcttgttgacacccggcagaagtgggcaccgttggagaatcgcagccctggccctgggtctggtggagagagatggtgtgctgaagttgggagctggggccagggccctgggcccagcattgccagccttggctcagatgggcgtctttgtcttcttgacccccgggatctctgccatcctgtgagctcagtccagtgcccagtatccgtacctagccctgacccagagctgctgcgagtgacttgggccccaggcctgaagaattgcttggccatctcaggttttgatggtacagtccaggtctatgatgccacatcttgggatggaacacggagccaagatggaacacggagccaagtagaacctctcttcactcacagaggtcacatcttcctagatggaaatgggatggaccctgctcctttggtcaccacccacacctggcatccctgcagaccaaggactttgttatcagcaacaaatgatgcctctctgcatgtgtgggactgggtggacctttgtgccccccgctgacaccagcatctttccatctaggcctctagaaaggggaggagctgctgtagtagcaagggtgctgatgtaggactcaagtgactaccagtccctgttaccagctgtgtggccttgggcaagtctgccagcgtcacttagcctcagtttccttatctgtaaaatgaggatagtaagaactacctcgtagtgatattgcgaaggttagaagaaacgcatggcataattacttggtagctattgttagatctgggattcacactatcatagggagaatcaaaagagctaacaaatataaacatgctttgtgaatttttttaaagaaaaaaatgtagaggggccaataaacatgaaaaaatcccagccctagtagcaattaaggaaatagcaaaacaggatttctgctcctcttgagtgggtctcatgggaacacaggtgcactttcccacacttgtccccccaggtgactaggttcaagagacatttgcttttggtggccccacaaacatttccttttgagggcccatagtgaatattaaagtgtgctggacatggtggctcatgcctgtaatcccagcactttcagaggctgaggtgggcagattgcttgagctgaggagtttgagaccagcctgggcaacatagcaagatcccttcccttaaaaaaaaaaaaaatttggctgggcatggtggctcatgcctgtaatcccagcaatgtaggcagccaaaacaggtggatcacttgagtccaggagttcgagactagcctgaggcaacacaggagaacccccatctctaaaaaaaaaaaacatgtttaggacatcacgcaagcataatgacatatgcctgtgggtcctacagaggaagcccaagcaggagcagactgaagcaggaggatctacataggagatgaaccgg

SEQ ID NO: 375556 - DNA, 2465 bp, Homo sapiens
cgcaggcggaagtgagacgccggaagcggtcgttgccatggatcctggggacgactggctggtggaatccttgcgcttgtaccaggatttctatgcattcgacctgtcaggagccactcgagtccttgaatggattgatgacaaaggagtctttgttgctggctatgaaagcctgaaaaagaatgaaattcttcatctgaaattacctctcagactttctgtaaaggaaaacaagggcttattcccagaaagagatttcaaagtgcgccatggaggattttcagacaggtctatctttgatctaaagcatgtgccacataccagattgctggttaccagtggccttccaggttgttatctgcaggtgtggcaggttgcagaggacagtgatgtcattaaagctgtcagcaccattgctgtgcatgagaaagaggagagtctctggcctagggtggccgtcttctccacattggcacccggagtcctccatggggcgaggctccgaagtctgcaggtcgttgatctggagtcccggaagaccacgtacacctcaggtaccgtggtactttgtcccttgcttgctgctccagccggcatcaccccccagcccaactcagccactataaaaactgagttcaactctctgtgccaggtgttggggatacacagtgaataagaggtaagccctggcctctaagggctcctatgctggggcaggattaggcagtcccagggaccagcacccaaccagctgagcagacaatggtgagatgagtgggaagggagatgtgatttattctgcctgggactggtgggaagggacctgtgaccagccagccctgccaaattgccagacccatctgcctccagccgcttgtctcctttgctgtcggtcttccagatgtcagtgacagtgaggagctgagtagcctgcaggtcctagatgcagacacctttgccttctgctgtgcttcgggccggctggggcttgttgacacccggcagaagtgggcaccgttggagaatcgcagccctggccctgggtctggtggagagagatggtgtgctgaagttgggagctggggccagggccctgggcccagcattgccagccttggctcagatgggcgtctttgtcttcttgacccccgggatctctgccatcctgtgagctcagtccagtgcccagtatccgtacctagccctgacccagagctgctgcgagtgacttgggccccaggcctgaagaattgcttggccatctcaggttttgatggtacagtccaggtctatgatgccacatcttgggatggaacacggagccaagatggaacacggagccaagtagaacctctcttcactcacagaggtcacatcttcctagatggaaatgggatggaccctgctcctttggtcaccacccacacctggcatccctgcagaccaaggactttgttatcagcaacaaatgatgcctctctgcatgtgtgggactgggtggacctttgtgccccccgctgacaccagcatctttccatctaggcctctagaaaggggaggagctgctgtagtagcaagggtgctgatgtaggactcaagtgactaccagtccctgttaccagctgtgtggccttgggcaagtctgccagcgtcacttagcctcagtttccttatctgtaaaatgaggatagtaagaactacctcgtagtgatattgcgaaggttagaagaaacgcatggcataattacttggtagctattgttagatctgggagtgtgaaatggtagcgttttgtccctgtcttcacactatcatagggagaatcaaaagagctaacaaatataaacatgctttgtgaatttttttaaagaaaaaaatgtagaggggccaataaacatgaaaaaatcccagccctagtagcaattaaggaaatagcaaaacaggatttctgctcctcttgagtgggtctcatgggaacacaggtgcactttcccacacttgtccccccaggtgactaggttcaagagacatttgcttttggtggccccacaaacatttccttttgagggcccatagtgaatattaaagtgtgctggacatggtggctcatgcctgtaatcccagcactttcagaggctgaggtgggcagattgcttgagctgaggagtttgagaccagcctgggcaacatagcaagatcccttcccttaaaaaaaaaaaaaatttggctgggcatggtggctcatgcctgtaatcccagcaatgtaggcagccaaaacaggtggatcacttgagtccaggagttcgagactagcctgaggcaacacaggagaacccccatctctaaaaaaaaaaaacatgtttaggacatcacgcaagcataatgacatatgcctgtgggtcctacagaggaagcccaagcaggagcagactgaagcaggaggatctacataggagatgaaccgg

SEQ ID NO: 375557 - DNA, 2231 bp, Homo sapiens
cgcaggcggaagtgagacgccggaagcggtcgttgccatggatcctggggacgactggctggtggaatccttgcgcttgtaccaggatttctatgcattcgacctgtcaggagccactcgagtccttgaatggattgatgacaaaggagtctttgttgctggctatgaaagcctgaaaaagaatgaaattcttcatctgaaattacctctcagactttctgtaaaggaaaacaagggcttattcccagaaagagatttcaaagtgcgccatggaggattttcagacaggtctatctttgatctaaagcatgtgccacataccagattgctggttaccagtggccttccaggttgttatctgcaggtgtggcaggttgcagaggacagtgatgtcattaaagctgtcagcaccattgctgtgcatgagaaagaggagagtctctggcctagggtggccgtcttctccacattggcacccggagtcctccatggggcgaggctccgaagtctgcaggtcgttgatctggagtcccggaagaccacgtacacctcaggtgttggggatacacagtgaataagaggtaagccctggcctctaagggctcctatgctggggcaggattaggcagtcccagggaccagcacccaaccagctgagcagacaatgatgtcagtgacagtgaggagctgagtagcctgcaggtcctagatgcagacacctttgccttctgctgtgcttcgggccggctggggcttgttgacacccggcagaagtgggcaccgttggagaatcgcagccctggccctgggtctggtggagagagatggtgtgctgaagttgggagctggggccagggccctgggcccagcattgccagccttggctcagatgggcgtctttgtcttcttgacccccgggatctctgccatcctgtgagctcagtccagtgcccagtatccgtacctagccctgacccagagctgctgcgagtgacttgggccccaggcctgaagaattgcttggccatctcaggttttgatggtacagtccaggtctatgatgccacatcttgggatggaacacggagccaagatggaacacggagccaagtagaacctctcttcactcacagaggtcacatcttcctagatggaaatgggatggaccctgctcctttggtcaccacccacacctggcatccctgcagaccaaggactttgttatcagcaacaaatgatgcctctctgcatgtgtgggactgggtggacctttgtgccccccgctgacaccagcatctttccatctaggcctctagaaaggggaggagctgctgtagtagcaagggtgctgatgtaggactcaagtgactaccagtccctgttaccagctgtgtggccttgggcaagtctgccagcgtcacttagcctcagtttccttatctgtaaaatgaggatagtaagaactacctcgtagtgatattgcgaaggttagaagaaacgcatggcataattacttggtagctattgttagatctgggagtgtgaaatggtagcgttttgtccctgtcttcacactatcatagggagaatcaaaagagctaacaaatataaacatgctttgtgaatttttttaaagaaaaaaatgtagaggggccaataaacatgaaaaaatcccagccctagtagcaattaaggaaatagcaaaacaggatttctgctcctcttgagtgggtctcatgggaacacaggtgcactttcccacacttgtccccccaggtgactaggttcaagagacatttgcttttggtggccccacaaacatttccttttgagggcccatagtgaatattaaagtgtgctggacatggtggctcatgcctgtaatcccagcactttcagaggctgaggtgggcagattgcttgagctgaggagtttgagaccagcctgggcaacatagcaagatcccttcccttaaaaaaaaaaaaaatttggctgggcatggtggctcatgcctgtaatcccagcaatgtaggcagccaaaacaggtggatcacttgagtccaggagttcgagactagcctgaggcaacacaggagaacccccatctctaaaaaaaaaaaacatgtttaggacatcacgcaagcataatgacatatgcctgtgggtcctacagaggaagcccaagcaggagcagactgaagcaggaggatctacataggagatgaaccgg

SEQ ID NO: 375558 - DNA, 3165 bp, Homo sapiens
cgcaggcggaagtgagacgccggaagcggtcgttgccatggatcctggggacgactggctggtggaatccttgcgcttaaatcgtacggggctgggacatgggagctgggcctggagcttgcctggcgggcggatgggtgtgggtggaggcacgttggggatcctggtgcagagtgggccagctgtggcctcggggctcgccaccgtggaggactccgcctgggcctaggcccccatctctaggaaatggctccttcctgcgtgcgcgcgttgtgagattactagtaggagccgcgcttgtgaagacgcagtgcccagttagtttgcgccagcctctgagttcagctcagaacacagatgatctcattgattcctcacgtcaaccttgggaaatctgggtaccctgggacgtccacacatgaggaccgaggctcagggacatcaagggactggcctggtcccagaaacagggagtaaaatgggaagtaaactcagtcccacgtctgcctgactccagagtttgggccactgaaccatgcggctgccatctttggagttctttgagctgtgaagtgctgtgcatcgtgtgattctgtgtcccttttgtgcaggagtctttgttgctggctatgaaagcctgaaaaagaatgaaattcttcatctgaaattacctctcagactttctgtaaaggaaaacaagggcttattcccagaaagagatttcaaagtgcgccatggaggattttcagacaggtctatctttgatctaaagcatgtgccacataccaggtatggtcaattttgtgatccagccatccacacaggatgggatgggatggctgcaaatgcctgggggtattctgcctcctcatctccattcccaccccctcagcacacaggcacatgtgagtgcacaagtgtgtgcacacagatacacacagatttagaatacaaagaaaccactgctgtggcttcatagccccccagagcccttggactaatgtaagtaacagttctaccggagttgctccagggaatagatacgggacagaaagatgctcttctattgctcttgggtgataattgctcagttgggagaggccaagagtctctgggtcaggttgtgtttggccccatacttgtgtcctctgtaggtgaccatcatgacacatggaagcttgggctcagtctccctaaagttgattgagcctgctccttatctgtgaaatgagggtggttggccttgatgatcttgcagtaagatgtcctgatatgggaagtgcagtcccaagctaagtgtgctggaaaggggaagggacctgtgtggataagctccccatggtctggactgattttgtcttttctgaatagattgctggttaccagtggccttccaggttgttatctgcaggtgtggcaggttgcagaggacagtgatgtcattaaagctgtcagcaccattgctgtgcatgagaaagaggagagtctctggcctagggtggccgtcttctccacattggcacccggagtcctccatggggcgaggctccgaagtctgcaggtcgttgatctggagtcccggaagaccacgtacacctcagatgtcagtgacagtgaggagctgagtagcctgcaggtcctagatgcagacacctttgccttctgctgtgcttcgggccggctggggcttgttgacacccggcagaagtgggcaccgttggagaatcgcagccctggccctgggtctggtggagagagatggtgtgctgaagttgggagctggggccagggccctgggcccagcattgccagccttggctcagatgggcgtctttgtcttcttgacccccgggatctctgccatcctgtgagctcagtccagtgcccagtatccgtacctagccctgacccagagctgctgcgagtgacttgggccccaggcctgaagaattgcttggccatctcaggttttgatggtacagtccaggtctatgatgccacatcttgggatggaacacggagccaagatggaacacggagccaagtagaacctctcttcactcacagaggtcacatcttcctagatggaaatgggatggaccctgctcctttggtcaccacccacacctggcatccctgcagaccaaggactttgttatcagcaacaaatgatgcctctctgcatgtgtgggactgggtggacctttgtgccccccgctgacaccagcatctttccatctaggcctctagaaaggggaggagctgctgtagtagcaagggtgctgatgtaggactcaagtgactaccagtccctgttaccagctgtgtggccttgggcaagtctgccagcgtcacttagcctcagtttccttatctgtaaaatgaggatagtaagaactacctcgtagtgatattgcgaaggttagaagaaacgcatggcataattacttggtagctattgttagatctgggagtgtgaaatggtagcgttttgtccctgtcttcacactatcatagggagaatcaaaagagctaacaaatataaacatgctttgtgaatttttttaaagaaaaaaatgtagaggggccaataaacatgaaaaaatcccagccctagtagcaattaaggaaatagcaaaacaggatttctgctcctcttgagtgggtctcatgggaacacaggtgcactttcccacacttgtccccccaggtgactaggttcaagagacatttgcttttggtggccccacaaacatttccttttgagggcccatagtgaatattaaagtgtgctggacatggtggctcatgcctgtaatcccagcactttcagaggctgaggtgggcagattgcttgagctgaggagtttgagaccagcctgggcaacatagcaagatcccttcccttaaaaaaaaaaaaaatttggctgggcatggtggctcatgcctgtaatcccagcaatgtaggcagccaaaacaggtggatcacttgagtccaggagttcgagactagcctgaggcaacacaggagaacccccatctctaaaaaaaaaaaacatgtttaggacatcacgcaagcataatgacatatgcctgtgggtcctacagaggaagcccaagcaggagcagactgaagcaggaggatctacataggagatgaaccgg

SEQ ID NO: 375559 - DNA, 2651 bp, Homo sapiens
cgcaggcggaagtgagacgccggaagcggtcgttgccatggatcctggggacgactggctggtggaatccttgcgcttaaatcgtacggggctgggacatgggagctgggcctggagcttgcctggcgggcggatgggtgtgggtggaggcacgttggggatcctggtgcagagtgggccagctgtggcctcggggctcgccaccgtggaggactccgcctgggcctaggcccccatctctaggaaatggctccttcctgcgtgcgcgcgttgtgagattactagtaggagccgcgcttgtgaagacgcagtgcccagttagtttgcgccagcctctgagttcagctcagaacacagatgatctcattgattcctcacgtcaaccttgggaaatctgggtaccctgggacgtccacacatgaggaccgaggctcagggacatcaagggactggcctggtcccagaaacagggagtaaaatgggaagtaaactcagtcccacgtctgcctgactccagagtttgggccactgaaccatgcggctgccatctttggagttctttgagctgtgaagtgctgtgcatcgtgtgattctgtgtcccttttgtgcaggtaccaggatttctatgcattcgacctgtcaggagccactcgagtccttgaatggattgatgacaaaggagtctttgttgctggctatgaaagcctgaaaaagaatgaaattcttcatctgaaattacctctcagactttctgtaaaggaaaacaagggcttattcccagaaagagatttcaaagtgcgccatggaggattttcagacaggtctatctttgatctaaagcatgtgccacataccagattgctggttaccagtggccttccaggttgttatctgcaggtgtggcaggttgcagaggacagtgatgtcattaaagctgtcagcaccattgctgtgcatgagaaagaggagagtctctggcctagggtggccgtcttctccacattggcacccggagtcctccatggggcgaggctccgaagtctgcaggtcgttgatctggagtcccggaagaccacgtacacctcagatgtcagtgacagtgaggagctgagtagcctgcaggtcctagatgcagacacctttgccttctgctgtgcttcgggccggctggggcttgttgacacccggcagaagtgggcaccgttggagaatcgcagccctggccctgggtctggtggagagagatggtgtgctgaagttgggagctggggccagggccctgggcccagcattgccagccttggctcagatgggcgtctttgtcttcttgacccccgggatctctgccatcctgtgagctcagtccagtgcccagtatccgtacctagccctgacccagagctgctgcgagtgacttgggccccaggcctgaagaattgcttggccatctcaggttttgatggtacagtccaggtctatgatgccacatcttgggatggaacacggagccaagatggaacacggagccaagtagaacctctcttcactcacagaggtcacatcttcctagatggaaatgggatggaccctgctcctttggtcaccacccacacctggcatccctgcagaccaaggactttgttatcagcaacaaatgatgcctctctgcatgtgtgggactgggtggacctttgtgccccccgctgacaccagcatctttccatctaggcctctagaaaggggaggagctgctgtagtagcaagggtgctgatgtaggactcaagtgactaccagtccctgttaccagctgtgtggccttgggcaagtctgccagcgtcacttagcctcagtttccttatctgtaaaatgaggatagtaagaactacctcgtagtgatattgcgaaggttagaagaaacgcatggcataattacttggtagctattgttagatctgggagtgtgaaatggtagcgttttgtccctgtcttcacactatcatagggagaatcaaaagagctaacaaatataaacatgctttgtgaatttttttaaagaaaaaaatgtagaggggccaataaacatgaaaaaatcccagccctagtagcaattaaggaaatagcaaaacaggatttctgctcctcttgagtgggtctcatgggaacacaggtgcactttcccacacttgtccccccaggtgactaggttcaagagacatttgcttttggtggccccacaaacatttccttttgagggcccatagtgaatattaaagtgtgctggacatggtggctcatgcctgtaatcccagcactttcagaggctgaggtgggcagattgcttgagctgaggagtttgagaccagcctgggcaacatagcaagatcccttcccttaaaaaaaaaaaaaatttggctgggcatggtggctcatgcctgtaatcccagcaatgtaggcagccaaaacaggtggatcacttgagtccaggagttcgagactagcctgaggcaacacaggagaacccccatctctaaaaaaaaaaaacatgtttaggacatcacgcaagcataatgacatatgcctgtgggtcctacagaggaagcccaagcaggagcagactgaagcaggaggatctacataggagatgaaccgg

SEQ ID NO: 375560 - DNA, 2281 bp, Homo sapiens
cgcaggcggaagtgagacgccggaagcggtcgttgccatggatcctggggacgactggctggtggaatccttgcgcttaaatcgtacggggctgggacatgggagctgggcctggagcttgcctggcgggcggatgggtgtgggtggaggcacgttggggatcctggtgcagagtgggccagctgtggcctcggggctcgccaccgtggaggactccgcctgggcctaggcccccatctctaggaaatggctccttcctgcgtgcgcgcgttgtgagattactagtaggagccgcgcttgtgaagacgcagtgcccagttagtttgcgccagcctctgagttcagctcagaacacagatgatctcattgattcctcacgtcaaccttgggaaatctgggtaccctgggacgtccacacatgaggaccgaggctcagggacatcaagggactggcctggtcccagaaacagggagtaaaatgggaagtaaactcagtcccacgtctgcctgactccagagtttgggccactgaaccatgcggctgccatctttggagttctttgagctgtgaagtgctgtgcatcgtgtgattctgtgtcccttttgtgcaggagtctttgttgctggctatgaaagcctgaaaaagaatgaaattcttcatctgaaattacctctcagactttctgtaaaggaaaacaagggcttattcccagaaagagatttcaaagtgcgccatggaggattttcagacaggtctatctttgatctaaagcatgtgccacataccaggtatggtcaattttgtgatccagccatccacacaggatgggatgggatggctgcaaatgcctgggggtattctgcctcctcatctccattcccaccccctcagcacacaggcacatgtgagtgcacaagtgtgtgcacacagatacacacagatttagaatacaaagaaaccactgctgtggcttcatagccccccagagcccttggactaatgtaagtaacagttctaccggagttgctccagggaatagatacgggacagaaagatgctcttctattgctcttgggtgataattgctcagttgggagaggccaagagtctctgggtcaggttgtgtttggccccatacttgtgtcctctgtaggtgaccatcatgacacatggaagcttgggctcagtctccctaaagttgattgagcctgctccttatctgtgaaatgagggtggttggccttgatgatcttgcagtaagatgtcctgatatgggaagtgcagtcccaagctaagtgtgctggaaaggggaagggacctgtgtggataagctccccatggtctggactgattttgtcttttctgaatagattgctggttaccagtggccttccaggttgttatctgcaggtgtggcaggttgcagaggacagtggtgagtgaatttgacttgatggggtttggggttctaggaaagtgtgactcatacacccctgtcccctaatctgagccagttaagaaggagactcaggctggggacagtctcatgcctgtaattgtagcactttgggaggctgagctgggtggatcacttgaattcaggagttgaagaccaccttgtacaacatggtgaaacctgtctctattaaaaatacaaaaaattagccgggcatggtggtaggcacctgtaatccctgctactggggagactgaggcaggagaattgcttgaacctgggaggcggaggttacagtgagccgagatcatgccactgcactccagcctgggcaacaagagcaaaactccgtctccaaaaaaaaagtagtagtagactcagagccaggtgggaattaatctactttaatgcagacaaggtgaattagcaaccatagcatggcatccaagccccaaatggagcttcctgtaacctgctcctggaattgagttcatccagagaactactctccctaggcaggggcagtggcaacagcagagcttaggctgctcaggtgagctcacctctttggcagcattaagcatatattaagagaagcctcagatgtagaatacagagaggagaacctacctgctaaccaagcaggtggagacaaccaaataaaaactaaaacttggctgggcgcagtggctcatgcctgtaatcccagcactttgggaggccaaggtaggtgggtcacctgaccaggagtttgagcccagcccgagcaacatggcgaaaccccgtctctactaaaaatacaaaaaaattagctgggcatgagg

SEQ ID NO: 375561 - DNA, 1234 bp, Homo sapiens
cgcaggcggaagtgagacgccggaagcggtcgttgccatggatcctggggacgactggctggtggaatccttgcgcttgtaccaggatttctatgcattcgacctgtcaggagccactcgagtccttgaatggattgatgacaaaggagtctttgttgctggctatgaaagcctgaaaaagaatgaaattcttcatctgaaattacctctcagactttctgtaaaggaaaacaagggcttattcccagaaagagatttcaaagtgcgccatggaggattttcagacaggtctatctttgatctaaagcatgtgccacataccagattgctggttaccagtggccttccaggttgttatctgcaggtgtggcaggttgcagaggacagtggtgagtgaatttgacttgatggggtttggggttctaggaaagtgtgactcatacacccctgtcccctaatctgagccagttaagaaggagactcaggctggggacagtctcatgcctgtaattgtagcactttgggaggctgagctgggtggatcacttgaattcaggagttgaagaccaccttgtacaacatggtgaaacctgtctctattaaaaatacaaaaaattagccgggcatggtggtaggcacctgtaatccctgctactggggagactgaggcaggagaattgcttgaacctgggaggcggaggttacagtgagccgagatcatgccactgcactccagcctgggcaacaagagcaaaactccgtctccaaaaaaaaagtagtagtagactcagagccaggtgggaattaatctactttaatgcagacaaggtgaattagcaaccatagcatggcatccaagccccaaatggagcttcctgtaacctgctcctggaattgagttcatccagagaactactctccctaggcaggggcagtggcaacagcagagcttaggctgctcaggtgagctcacctctttggcagcattaagcatatattaagagaagcctcagatgtagaatacagagaggagaacctacctgctaaccaagcaggtggagacaaccaaataaaaactaaaacttggctgggcgcagtggctcatgcctgtaatcccagcactttgggaggccaaggtaggtgggtcacctgaccaggagtttgagcccagcccgagcaacatggcgaaaccccgtctctactaaaaatacaaaaaaattagctgggcatgagg

SEQ ID NO: 375562 - DNA, 1255 bp, Homo sapiens
taaatgctgagtatgtcaacttttatttatttattaaacatttgtggagctcctgttatctaccaggtattgtcctggatactagaaagagagaaagcgctaggcctgcccttctagtctaacagagggaggcacatatgcacagagataaatgctgtagaatgtctcgtggtttacagagggctatcagaggaggaggtcagttatactttatcagaaatagatttagggagcgattaaggatatagagggcggtcgaaatgcgtagagtggttaaagtcacctagtgaatgtgtggtatataaggagtgaggagaatatagtgaggacggaacctcagggaacacatttaagggatgagtacaggaagatgcaccccccctccccaaagaatactaagaaagaacagcctctgaggtaagaggaatctcagaaaaggtcaatgtttctgaagccaagagaagagaacttctcaagaaaaaaagagttagtagctgtctagagttccaataaaatcattgagagaagaattgaaggccaggtgcagtggcttacgcctgtaatcccagcactttgggaggccgagttgggcggatcatgaggtcaggagttcgggaccatcctgaccaacatggtgaaaccccgtctctactaaaaatacaaaaattagccaggcatggtggcgcacacctgtaatcccaccctagtagcaattaaggaaatagcaaaacaggatttctgctcctcttgagtgggtctcatgggaacacaggtgcactttcccacacttgtccccccaggtgactaggttcaagagacatttgcttttggtggccccacaaacatttccttttgagggcccatagtgaatattaaagtgtgctggacatggtggctcatgcctgtaatcccagcactttcagaggctgaggtgggcagattgcttgagctgaggagtttgagaccagcctgggcaacatagcaagatcccttcccttaaaaaaaaaaaaaatttggctgggcatggtggctcatgcctgtaatcccagcaatgtaggcagccaaaacaggtggatcacttgagtccaggagttcgagactagcctgaggcaacacaggagaacccccatctctaaaaaaaaaaaacatgtttaggacatcacgcaagcataatgacatatgcctgtgggtcctacagaggaagcccaagcaggagcagactgaagcaggaggatctacataggagatgaaccgg

SEQ ID NO: 375563 - DNA, 374 bp, Homo sapiens
tttcccacacttgtccccccaggtgactaggttcaagagacatttgcttttggtggccccacaaacatttccttttgagggcccatagtgaatattaaagtgtgctggacatggtggctcatgcctgtaatcccagcactttcagaggctgaggtgggcagattgcttgagctgaggagtttgagaccagcctgggcaacatagcaagatcccttcccttaaaaaaaaaaaaaatttggctgggcatggtggctcatgcctgtaatcccagcaatgtaggcagccaaaacaggtggatcacttgagtccaggagttcgagactagcctgaggcaacatggcgaaaccttgtctctactaaaaatacaagttagc

SEQ ID NO: 375564 - DNA, 1496 bp, Homo sapiens
cgcaggcggaagtgagacgccggaagcggtcgttgccatggatcctggggacgactggctggtggaatccttgcgcttgtaccaggatttctatgcattcgacctgtcaggagccactcgagtccttgaatggattgatgacaaaggagtctttgttgctggctatgaaagcctgaaaaagaatgaaattcttcatctgaaattacctctcagactttctgtaaaggaaaacaagggcttattcccagaaagagatttcaaagtgcgccatggaggattttcagacaggtctatctttgatctaaagcatgtgccacataccagattgctggttaccagtggccttccaggttgttatctgcaggtgtggcaggttgcagaggacagtgatgtcattaaagctgtcagcaccattgctgtgcatgagaaagaggagagtctctggcctagggtggccgtcttctccacattggcacccggagtcctccatggggcgaggctccgaagtctgcaggtcgttgatctggagtcccggaagaccacgtacacctcagatgtcagtgacagtgaggagctgagtagcctgcaggtcctagatgcagacacctttgccttctgctgtgcttcgggccggctggggcttgttgacacccggcagaagtgggcaccgttggagaatcgcagccctggccctgggtctggtggagagagatggtgtgctgaagttgggagctggggccagggccctgggcccagcattgccagccttggctcagatgggcgtctttgtcttcttgacccccgggatctctgccatcctgtgagctcagtccagtgcccagtatccgtacctagccctgacccagagctgctgcgagtgacttgggccccaggcctgaagaattgcttggccatctcaggttttgatggtacagtccaggtctatgatgccacatcttgggatggaacacggagccaagatggaacacggagccaagtagaacctctcttcactcacagaggtcacatcttcctagatggaaatgggatggaccctgctcctttggtcaccacccacacctggcatccctgcagaccaaggactttgttatcagcaacaaatgatgcctctctgcatgtgtgggactgggtggacctttgtgccccccgctgacaccagcatctttccatctaggcctctagaaaggggaggagctgctgtagtagcaagggtgctgatgtaggactcaagtgactaccagtccctgttaccagctgtgtggccttgggcaagtctgccagcgtcacttagcctcagtttccttatctgtaaaatgaggatagtaagaactacctcgtagtgatattgcgaaggttagaagaaacgcatggcataattacttggtagctattgttagatctgggagtgtgaaatggtagcgttttgtccctgtcttcacactatcatagggagaatcaaaagagctaacaaatat

SEQ ID NO: 375565 - DNA, 2583 bp, Homo sapiens
cgcaggcggaagtgagacgccggaagcggtcgttgccatggatcctggggacgactggctggtggaatccttgcgcttaaatcgtacggggctgggacatgggagctgggcctggagcttgcctggcgggcggatgggtgtgggtggaggcacgttggggatcctggtgcagagtgggccagctgtggcctcggggctcgccaccgtggaggactccgcctgggcctaggcccccatctctaggaaatggctccttcctgcgtgcgcgcgttgtgagattactagtaggagccgcgcttgtgaagacgcagtgcccagttagtttgcgccagcctctgagttcagctcagaacacagatgatctcattgattcctcacgtcaaccttgggaaatctgggtaccctgggacgtccacacatgaggaccgaggctcagggacatcaagggactggcctggtcccagaaacagggagtaaaatgggaagtaaactcagtcccacgtctgcctgactccagagtttgggccactgaaccatgcggctgccatctttggagttctttgagctgtgaagtgctgtgcatcgtgtgattctgtgtcccttttgtgcaggagtctttgttgctggctatgaaagcctgaaaaagaatgaaattcttcatctgaaattacctctcagactttctgtaaaggaaaacaagggcttattcccagaaagagatttcaaagtgcgccatggaggattttcagacaggtctatctttgatctaaagcatgtgccacataccagattgctggttaccagtggccttccaggttgttatctgcaggtgtggcaggttgcagaggacagtgatgtcattaaagctgtcagcaccattgctgtgcatgagaaagaggagagtctctggcctagggtggccgtcttctccacattggcacccggagtcctccatggggcgaggctccgaagtctgcaggtcgttgatctggagtcccggaagaccacgtacacctcagatgtcagtgacagtgaggagctgagtagcctgcaggtcctagatgcagacacctttgccttctgctgtgcttcgggccggctggggcttgttgacacccggcagaagtgggcaccgttggagaatcgcagccctggccctgggtctggtggagagagatggtgtgctgaagttgggagctggggccagggccctgggcccagcattgccagccttggctcagatgggcgtctttgtcttcttgacccccgggatctctgccatcctgtgagctcagtccagtgcccagtatccgtacctagccctgacccagagctgctgcgagtgacttgggccccaggcctgaagaattgcttggccatctcaggttttgatggtacagtccaggtctatgatgccacatcttgggatggaacacggagccaagatggaacacggagccaagtagaacctctcttcactcacagaggtcacatcttcctagatggaaatgggatggaccctgctcctttggtcaccacccacacctggcatccctgcagaccaaggactttgttatcagcaacaaatgatgcctctctgcatgtgtgggactgggtggacctttgtgccccccgctgacaccagcatctttccatctaggcctctagaaaggggaggagctgctgtagtagcaagggtgctgatgtaggactcaagtgactaccagtccctgttaccagctgtgtggccttgggcaagtctgccagcgtcacttagcctcagtttccttatctgtaaaatgaggatagtaagaactacctcgtagtgatattgcgaaggttagaagaaacgcatggcataattacttggtagctattgttagatctgggagtgtgaaatggtagcgttttgtccctgtcttcacactatcatagggagaatcaaaagagctaacaaatataaacatgctttgtgaatttttttaaagaaaaaaatgtagaggggccaataaacatgaaaaaatcccagccctagtagcaattaaggaaatagcaaaacaggatttctgctcctcttgagtgggtctcatgggaacacaggtgcactttcccacacttgtccccccaggtgactaggttcaagagacatttgcttttggtggccccacaaacatttccttttgagggcccatagtgaatattaaagtgtgctggacatggtggctcatgcctgtaatcccagcactttcagaggctgaggtgggcagattgcttgagctgaggagtttgagaccagcctgggcaacatagcaagatcccttcccttaaaaaaaaaaaaaatttggctgggcatggtggctcatgcctgtaatcccagcaatgtaggcagccaaaacaggtggatcacttgagtccaggagttcgagactagcctgaggcaacacaggagaacccccatctctaaaaaaaaaaaacatgtttaggacatcacgcaagcataatgacatatgcctgtgggtcctacagaggaagcccaagcaggagcagactgaagcaggaggatctacataggagatgaaccgg

SEQ ID NO: 375566 - DNA, 2890 bp, Homo sapiens
cgcaggcggaagtgagacgccggaagcggtcgttgccatggatcctggggacgactggctggtggaatccttgcgcttaaatcgtacggggctgggacatgggagctgggcctggagcttgcctggcgggcggatgggtgtgggtggaggcacgttggggatcctggtgcagagtgggccagctgtggcctcggggctcgccaccgtggaggactccgcctgggcctaggcccccatctctaggaaatggctccttcctgcgtgcgcgcgttgtgagattactagtaggagccgcgcttgtgaagacgcagtgcccagttagtttgcgccagcctctgagttcagctcagaacacagatgatctcattgattcctcacgtcaaccttgggaaatctgggtaccctgggacgtccacacatgaggaccgaggctcagggacatcaagggactggcctggtcccagaaacagggagtaaaatgggaagtaaactcagtcccacgtctgcctgactccagagtttgggccactgaaccatgcggctgccatctttggagttctttgagctgtgaagtgctgtgcatcgtgtgattctgtgtcccttttgtgcaggagtctttgttgctggctatgaaagcctgaaaaagaatgaaattcttcatctgaaattacctctcagactttctgtaaaggaaaacaagggcttattcccagaaagagatttcaaagtgcgccatggaggattttcagacaggtctatctttgatctaaagcatgtgccacataccaggtatggtcaattttgtgatccagccatccacacaggatgggatgggatggctgcaaatgcctgggggtattctgcctcctcatctccattcccaccccctcagcacacaggcacatgtgagtgcacaagtgtgtgcacacagatacacacagatttagaatacaaagaaaccactgctgtggcttcatagccccccagagcccttggactaatgtaagtaacagttctaccggagttgctccagggaatagatacgggacagaaagatgctcttctattgctcttgggtgataattgctcagttgggagaggccaagagtctctgggtcaggttgtgtttggccccatacttgtgtcctctgtaggtgaccatcatgacacatggaagcttgggctcagtctccctaaagttgattgagcctgctccttatctgtgaaatgagggtggttggccttgatgatcttgcagtaagatgtcctgatatgggaagtgcagtcccaagctaagtgtgctggaaaggggaagggacctgtgtggataagctccccatggtctggactgattttgtcttttctgaatagattgctggttaccagtggccttccaggttgttatctgcaggtgtggcaggttgcagaggacagtgatgtcattaaagctgtcagcaccattgctgtgcatgagaaagaggagagtctctggcctagggtggccgtcttctccacattggcacccggagtcctccatggggcgaggctccgaagtctgcaggtcgttgatctggagtcccggaagaccacgtacacctcaggtaccgtggtactttgtcccttgcttgctgctccagccggcatcaccccccagcccaactcagccactataaaaactgagttcaactctctgtgccaggtgttggggatacacagtgaataagaggtaagccctggcctctaagggctcctatgctggggcaggattaggcagtcccagggaccagcacccaaccagctgagcagacaatggtgagatgagtgggaagggagatgtgatttattctgcctgggactggtgggaagggacctgtgaccagccagccctgccaaattgccagacccatctgcctccagccgcttgtctcctttgctgtcggtcttccagatgtcagtgacagtgaggagctgagtagcctgcaggtcctagatgcagacacctttgccttctgctgtgcttcgggccggctggggcttgttgacacccggcagaagtgggcaccgttggagaatcgcagccctggccctgggtctggtggagagagatggtgtgctgaagttgggagctggggccagggccctgggcccagcattgccagccttggctcagatgggcgtctttgtcttcttgacccccgggatctctgccatcctgtgagctcagtccagtgcccagtatccgtacctagccctgacccagagctgctgcgagtgacttgggccccaggcctgaagaattgcttggccatctcaggttttgatggtacagtccaggtctatgatgccacatcttgggatggaacacggagccaagatggaacacggagccaagtagaacctctcttcactcacagaggtcacatcttcctagatggaaatgggatggaccctgctcctttggtcaccacccacacctggcatccctgcagaccaaggactttgttatcagcaacaaatgatgcctctctgcatgtgtgggactgggtggacctttgtgccccccgctgacaccagcatctttccatctaggcctctagaaaggggaggagctgctgtagtagcaagggtgctgatgtaggactcaagtgactaccagtccctgttaccagctgtgtggccttgggcaagtctgccagcgtcacttagcctcagtttccttatctgtaaaatgaggatagtaagaactacctcgtagtgatattgcgaaggttagaagaaacgcatggcataattacttggtagctattgttagatctgggagtgtgaaatggtagcgttttgtccctgtcttcacactatcatagggagaatcaaaagagctaacaaatat

SEQ ID NO: 375567 - DNA, 2144 bp, Homo sapiens
  misc_feature (275)..(275): n is a, c, g, or t
gatatccttgagaccattgactagatagtaccttgtccgtgttcgtaccacgatacttgcttacgagctgatcagatcactcattcgctgcactggattgttgattgaggagtctatcgctgctgctataaaaccctgaaaacgaatgataatcattacactcatgacatttagcctcatctatgactcacttgtcagatggagagatagcaaatgggcttgagttcaccaagaggacgaggagtttcgcaatgtgcggccgagttggccgtgantatccttcagactagtgatctatcctatccgatcataatcgcactgtagcctccataccaatatggcctcgagttcacctagatgagtctatccaaggtttgttatcctagcaaggtgtggcaggttgcagaggacagtgatgtcattaaagctgtcagcaccattgctgtgcatgagaaagaggagagtctctggcctagggtggccgtcttctccacattggcacccggagtcctccatggggcgaggctccgaagtctgcaggtcgttgatctggagtcccggaagaccacgtacacctcagatgtcagtgacagtgaggagctgagtagcctgcaggtcctagatgcagacacctttgccttctgctgtgcttcgggccggctggggcttgttgacacccggcagaagtgggcaccgttggagaatcgcagccctggccctgggtctggtggagagagatggtgtgctgaagttgggagctggggccagggccctgggcccagcattgccagccttggctcagatgggcgtctttgtcttcttgacccccgggatctctgccatcctgtgagctcagtccagtgcccagtatccgtacctagccctgacccagagctgctgcgagtgacttgggccccaggcctgaagaattgcttggccatctcaggttttgatggtacagtccaggtctatgatgccacatcttgggatggaacacggagccaagatggaacacggagccaagtagaacctctcttcactcacagaggtcacatcttcctagatggaaatgggatggaccctgctcctttggtcaccacccacacctggcatccctgcagaccaaggactttgttatcagcaacaaatgatgcctctctgcatgtgtgggactgggtggacctttgtgccccccgctgacaccagcatctttccatctaggcctctagaaaggggaggagctgctgtagtagcaagggtgctgatgtaggactcaagtgactaccagtccctgttaccagctgtgtggccttgggcaagtctgccagcgtcacttagcctcagtttccttatctgtaaaatgaggatagtaagaactacctcgtagtgatattgcgaaggttagaagaaacgcatggcataattacttggtagctattgttagatctgggagtgtgaaatggtagcgttttgtccctgtcttcacactatcatagggagaatcaaaagagctaacaaatataaacatgctttgtgaatttttttaaagaaaaaaatgtagaggggccaataaacatgaaaaaatcccagccctagtagcaattaaggaaatagcaaaacaggatttctgctcctcttgagtgggtctcatgggaacacaggtgcactttcccacacttgtccccccaggtgactaggttcaagagacatttgcttttggtggccccacaaacatttccttttgagggcccatagtgaatattaaagtgtgctggacatggtggctcatgcctgtaatcccagcactttcagaggctgaggtgggcagattgcttgagctgaggagtttgagaccagcctgggcaacatagcaagatcccttcccttaaaaaaaaaaaaaatttggctgggcatggtggctcatgcctgtaatcccagcaatgtaggcagccaaaacaggtggatcacttgagtccaggagttcgagactagcctgaggcaacacaggagaacccccatctctaaaaaaaaaaaacatgtttaggacatcacgcaagcataatgacatatgcctgtgggtcctacagaggaagcccaagcaggagcagactgaagcaggaggatctacataggagatgaaccgg

SEQ ID NO: 375568 - DNA, 1950 bp, Homo sapiens
cgcaggcggaagtgagacgccggaagcggtcgttgccatggatcctggggacgactggctggtggaatccttgcgcttaaatcgtacggggctgggacatgggagctgggcctggagcttgcctggcgggcggatgggtgtgggtggaggcacgttggggatcctggtgcagagtgggccagctgtggcctcggggctcgccaccgtggaggactccgcctgggcctaggcccccatctctaggaaatggctccttcctgcgtgcgcgcgttgtgagattactagtaggagccgcgcttgtgaagacgcagtgcccagttagtttgcgccagcctctgagttcagctcagaacacagatgatctcattgattcctcacgtcaaccttgggaaatctgggtaccctgggacgtccacacatgaggaccgaggctcagggacatcaagggactggcctggtcccagaaacagggagtaaaatgggaagtaaactcagtcccacgtctgcctgactccagagtttgggccactgaaccatgcggctgccatctttggagttctttgagctgtgaagtgctgtgcatcgtgtgattctgtgtcccttttgtgcaggagtctttgttgctggctatgaaagcctgaaaaagaatgaaattcttcatctgaaattacctctcagactttctgtaaaggaaaacaagggcttattcccagaaagagatttcaaagtgcgccatggaggattttcagacaggtctatctttgatctaaagcatgtgccacataccaggtatggtcaattttgtgatccagccatccacacaggatgggatgggatggctgcaaatgcctgggggtattctgcctcctcatctccattcccaccccctcagcacacaggcacatgtgagtgcacaagtgtgtgcacacagatacacacagatttagaatacaaagaaaccactgctgtggcttcatagccccccagagcccttggactaatgtaagtaacagttctaccggagttgctccagggaatagattgctggttaccagtggccttccaggttgttatctgcaggtgtggcaggttgcagaggacagtggtgagtgaatttgacttgatggggtttggggttctaggaaagtgtgactcatacacccctgtcccctaatctgagccagttaagaaggagactcaggctggggacagtctcatgcctgtaattgtagcactttgggaggctgagctgggtggatcacttgaattcaggagttgaagaccaccttgtacaacatggtgaaacctgtctctattaaaaatacaaaaaattagccgggcatggtggtaggcacctgtaatccctgctactggggagactgaggcaggagaattgcttgaacctgggaggcggaggttacagtgagccgagatcatgccactgcactccagcctgggcaacaagagcaaaactccgtctccaaaaaaaaagtagtagtagactcagagccaggtgggaattaatctactttaatgcagacaaggtgaattagcaaccatagcatggcatccaagccccaaatggagcttcctgtaacctgctcctggaattgagttcatccagagaactactctccctaggcaggggcagtggcaacagcagagcttaggctgctcaggtgagctcacctctttggcagcattaagcatatattaagagaagcctcagatgtagaatacagagaggagaacctacctgctaaccaagcaggtggagacaaccaaataaaaactaaaacttggctgggcgcagtggctcatgcctgtaatcccagcactttgggaggccaaggtaggtgggtcacctgaccaggagtttgagcccagcccgagcaacatggcgaaaccccgtctctactaaaaatacaaaaaaattagctgggcatgagg

SEQ ID NO: 375569 - DNA, 318 bp, Homo sapiens
tccagtaatttgagaaacctattaatctacatgacaactcaaagaatgacttcaggagattaggaaaaaagcaaaaaagaaggcagtggggaatatttggctgggttctggtggctcattcctgtaatcacagccctaggggaggccaaggcaggcgcatcacttgaagtcaggagttcgagaacagactggccaatttggtgaaacccagtcacgactaaaaatacaaaaaatttagttgggcgtcgtgacccacgcctctaatcccaggtactcgggaggctgaagcaggaggaccacatgaactcaggaagcaag

SEQ ID NO: 375570 - DNA, 174 bp, Homo sapiens
tagctgaaaattctactttgggaaataggacaatcaaaatgtagcctagacactgaaatgcttttaaaaatttggacaagtaaaaccacttaacaaaaaatagtgactgtggtccatgcaaaaacatgtatacaaatatttatagctgtatcattcataatagcaaaaaaaaga

SEQ ID NO: 375571 - DNA, 533 bp, Homo sapiens
agttttagtagagatggagtttcaccatattggtcaggctggtttcgaactctcagcctcccaaagtgctgggatcacaggtgtgagccatcacgcccagcctttaatggagctgatatttaataggattgaatgattacagtatgggcatctgctggtacaaaatctgaattataggaagataatggggctcatcttttcaccattgggtccccaacccctgctttgcacgcagtaggaggttagtattgtggaacgagaggcattacattgttttattgtaaggcattgttctcagcagtcctggttgaatcagtaaatccaggcatctacctaatcatctaatcacgaggttgtcatctcgcgattacgcgtgcccagtaggctttcttaggggtgtgccgacttgcctatcaataactacctgttattgataggcaaggctaggttggccctgcctagctttcttaactctggcaggccagacctgcccatggctgttgtctcttcccctgacccacccccagcctaca

SEQ ID NO: 375572 - DNA, 1300 bp, Homo sapiens
  misc_feature (1044)..(1045): n is a, c, g, or t
  misc_feature (1122)..(1122): n is a, c, g, or t
  misc_feature (1219)..(1219): n is a, c, g, or t
  misc_feature (1299)..(1299): n is a, c, g, or t
acttccgccgccgtcgggggctgcgcgggggctgtggctccgggactgcggagaacatattgtgatgttcgtgcctcagagctaaaactatgagtgaatttcggattcaccatgacgtcaatgaactgcttagcctgctgcgtgtccacggaggagatggggctgaggtctacattgacctgcttcaaaagaacaggaccccgtacgtcactaccactgtctctgctcacagtgccaaggtgagcactgcccttggtgtagcgctgtgcagggtgagcactgttcctgggtcagggtggtgcagggtgagcccacccctgggtcagggtgcagggtgagcgccgttcctgggtcagggtggtacagggtgagcaccattcctgggtgagggtgcagggtgagcccacccctgggtcagggtgcaggatgaacactgttcctggatcaggatggtgcagggtgaacccacccctcagtccatgtgcaggatgagcgtcgtccctgggtcagggtgcatgatgagcaccgcccctgggtcagggtgcagggtgagcgccacctctggtgcagggggcagggtgagcgccacctctggtgcagggtgcagggtgagcgccacctctggtgcagggtgcagggtgagcgccacctctggtgcagggctgtgcggggtgcagggtgagcgccaccccggggtcaggatggtgcagggtgagcactgcccctggtgcagggctgtgtaccgtgcaagatgcagggtgagtgcccgttcctgggtggcctcaatggtaccggcaacgatggcagacagcacttggtctgtgtgtgtgttcagctctgattctcctgactccccccagcagctcctgtgattcaccccactgtgcagatgagtaaatggaggcctatggagaaagctgggcctagaaccctccctcttccccactctgtcccctgcagccatgaggtgggagagtcctgacatgtgcattcctgtggataaaaagggagggactgggccaggcgcggtggctcacacctgtnntcccagcactttgggaggctgaggcaggtggatcacaaggtcaggagatcaagaccaccctggctaacacggtgaanccccgtctctactaaaaatacaaaaaattagctgggtgtggtggcgggcacctgtaatcccagctactcggggggctgaggcaggagagtggcgtgnacccgggaggtggagcttgcagtgagccgagatatcgtgccactgcattccagcctgggcgtcagagtgagactctgtcnc

SEQ ID NO: 375573 - DNA, 1609 bp, Homo sapiens
acttccgccgccgtcgggggctgcgcgggggctgtggctccgggactgcggagaacatattgtgatgttcgtgcctcagagctaaaactatgagtgaatttcggattcaccatgacgtcaatgaactgcttagcctgctgcgtgtccacggaggagatggggctgaggtctacattgacctgcttcaaaagaacaggaccccgtacgtcactaccactgtctctgctcacagtgccaaggttaaaattgcagagttttctcgtactccagaagactttctaaagaaatatgatgaactgaaatctaaaaatacaaggaaccttgacccgctggtgtacctgttgtcaaagctcacggaagacaaagagactctgcagtacttacaacagaatgcaaaagaaagagctgagcttgcagccgctgctgtgggcagcagtaccaccagcatcaacgtccctgccgcggcctccaagatctccatgcaggagcttgaggaactgaggaagcagcttggcagcgtggccacaggctccacactgcagcagtctctggaacttaaaagaaagatgcttcgagacaagcagaacaaaaaaaattcaggccagcacctccccatcttcccagcatgggtgtatgagagacctgccctgatcggggatttcctgattggtgctggcatcagcacagacaccgctttgccgataggcacgttgcccctggcctcgcaggagtcggccgtggtggaggacctgctgtacgtgctggtgggcgtggacgggaggtacgtcagtgctcagcccctggctgggaggcagagccggaccttcctcgtggaccccaacctggacctgtccatcagggagctggtgcacaggatcctcccagtggccgccagctactccgctgtgaccaggttcattgaagagaagtcttccttcgagtacgggcaggtgaaccacgccctggcggccgccatgcgcaccctggtgaaggagcacctgattctggtgtcacagctggagcagctgcacaggcagggcctcctttcgctgcagaagctctggttctacatccagccagccatgcgcaccatggacatcctggcctccctcgccacctcggtggacaaaggcgaatgtcttggggggtccacgctgagcctgctccacgacaggagcttcagctacacaggggacagccaggcgcaggagctatgcctgtacctaaccaaggcggccagtgctccctacttcgaggttctggagaagtggatctacaggggcatcatccacgacccatacagtgagtttatggtcgaggagcacgagctgcggaaggagaggatccaggaggattacaacgacaagtactgggaccagcggtacaccatcgtccagcagcagatcccgtccttcctgcagaaaatggcggacaagatcctcagcacaggaaaatatctaaatgtggtcagagagtgtggccatgacgtcacctgcccggtggctaaagagatcatctacacgttaaaagagcgggcgtatgtggagcagatcgagaaggcgtttaactacgccagcaaggtgctgctggacttcctgatggaggagaa

SEQ ID NO: 375574 - DNA, 1372 bp, Homo sapiens
cttagctgtgtgtcctgcagccgtctcatcctctctggatagaaattatcaagagtttcttaacgtttaagtgatagctttttaaagacaaggttttttgtcccagagtaactcagacttaccaagttgtacttaccaatgttgaaagtgcagcttctgctggagtcgccttttcaactcctaacttcaccttttcaaatgtcagccatgtatctgagcattgcggagccgagtgtggtgagatcttgacaccagccaccacgcctcccaggccggccccgtcctgcggcggttggaactcagcctgtggctccccagtggggtcagtcaaagccaagtgcagtggctgaccttttatacccataaacaaagatgagcaagagtgagactgacccgcagatgagggcacgtggctgtgggggcatgggagtgggggctgcagagccacagcgctgtctgtgcccgcaggcacgttgcccctggcctcgcaggagtcggccgtggtggaggacctgctgtacgtgctggtgggcgtggacgggaggtacgtcagtgctcagcccctggctgggaggcagagccggaccttcctcgtggaccccaacctggacctgtccatcagggagctggtgcacaggatcctcccagtggccgccagctactccgctgtgaccaggttcattgaagagaagtcttccttcgagtacgggcaggtgaaccacgccctggcggccgccatgcgcaccctggtgaaggagcacctgattctggtgtcacagctggagcagctgcacaggcagggcctcctttcgctgcagaagctctggttctacatccagccagccatgcgcaccatggacatcctggcctccctcgccacctcggtggacaaaggcgaatgtcttggggggtccacgctgagcctgctccacgacaggagcttcagctacacaggggacagccaggcgcaggagctatgcctgtacctaaccaaggcggccagtgctccctacttcgaggttctggagaagtggatctacaggggcatcatccacgacccatacagtgagtttatggtcgaggagcacgagctgcggaaggagaggatccaggaggattacaacgacaagtactgggaccagcggtacaccatcgtccagcagcagatcccgtccttcctgcagaaaatggcggacaagatcctcagcacaggaaaatatctaaatgtggtcagagagtgtggccatgacgtcacctgcccggtggctaaagagatcatctacacgttaaaagagcgggcgtatgtggagcagatcgagaaggcgtttaactacgccagcaaggtgctgctggacttcctgatggaggagaa

SEQ ID NO: 375575 - DNA, 1340 bp, Homo sapiens
acttccgccgccgtcgggggctgcgcgggggctgtggctccgggactgcggagaacatattgtgatgttcgtgcctcagagctaaaactatgagtgaatttcggattcaccatgacgtcaatgaactgcttagcctgctgcgtgtccacggaggagatggggctgaggtctacattgacctgcttcaaaagaacaggaccccgtacgtcactaccactgtctctgctcacagtgccaaggttaaaattgcagagttttctcgtactccagaagactttctaaagaaatatgatgaactgaaatctaaaaatacaaggaaccttgacccgctggtgtacctgttgtcaaagctcacggaagacaaagagactctgcagtacttacaacagaatgcaaaagaaagagctgagcttgcagccgctgctgtgggcagcagtaccaccagcatcaacgtccctgccgcggcctccaagatctccatgcaggagcttgaggaactgaggaagcagcttggcagcgtggccacaggctccacactgcagcagtctctggaacttaaaagaaagatgcttcgagacaagcagaacaaaaaaaattcaggccagcacctccccatcttcccagcatgggtgtatgagagacctgccctgatcggggatttcctgattggtgctggcatcagcacagacaccgctttgccgataggcacgttgcccctggcctcgcaggagtcggccgtggtggaggacctgctgtacgtgctggtgggcgtggacgggaggtacgtcagtgctcagcccctggctgggaggcagagccggaccttcctcgtggaccccaacctggacctgtccatcagggagctggtgcacaggatcctcccagtggccgccagctactccgctgtgaccaggttcattgaagagaagtcttccttcgagtacgggcaggtgaaccacgccctggcggccgccatgcgcaccctggtgaaggagcacctgattctggtgtcacagctggagcagctgcacaggcagggcctcctttcgctgcagaagctctggttctacatccagccagccatgcgcaccatggacatcctggcctccctcgccacctcggtggacaaaggcgaatgtcttggggggtccacgctgagcctgctccacgacaggagcttcagctacacaggggacagccaggcgcaggagctatgcctgtacctaaccaaggcggccagtgctccctacttcgaggttctggagaagtggatctacaggggcatcatccacgacccatacaggtagggctccccgggacacggggacacggagggacac

SEQ ID NO: 375576 - DNA, 337 bp, Homo sapiens
ccaggctcaggcaatccttctgcttcttcctgagtagctgagaccacaggtgcacactgccacacccagctaatttttaaacattatttgtagaaatggggcctccctatgttgctcaggcggtcttgaactcctaggctcaagcagtcctcctgcctgggcctcccaaactgctgggataacaggtttgaaccactgcacctgccctaaacctgacctttgaaacaccatttactctacaaagactgtcttgaaagaagtaaactttgcctcttagatcgaaatataaagtaagcttaaagaaatattgaaaatgcaataaatctctttgttccta

SEQ ID NO: 375577 - DNA, 527 bp, Homo sapiens
tggacttaacagatatgtacagaacatttcatccaacaatcacggaatacacattctattcaacagcacatggaagtttctccaagatagaccatatgataggccacaaaacgagcctcagtaaatctaagaaaattaaaatatatcaagtactctctcagaccacagtggaatcaaactggaaatcaattccaaaagcaaccttcaaaaccatgcaaatacgtggaaattaaataacctgttcctgaatgatcattgggtcaaaaatgtaatcacgatggaaatttaaaaattattcaaactcaacgacaataatgacacaacctgtcaaacctctgggatacagcaaaggggatactagtaggaaagttcatagccctaaacacctatcaaaaagactgaaagggcagaaactgacattctaaagtcacacctcaaggagctatagaaacaagaacaaaccaaacccaaacccagcagtagaaaggaaataaccaagatcagagcagaactagatgaaattgaaa

SEQ ID NO: 375578 - DNA, 3126 bp, Homo sapiens
ccttgtgcatttggtctgaagacaaagatgactgcaggagtgggcaggccggagtgggggtgacctggcctgtgccaggaaggaggaggagtctgcagccctgtgcggttcaacatccatcaaggagtccagagcaggagccaggccaggcgggagggaaaggccctgggaggggctctctaatctcccagccccgactctgccccgtcactgccgctgctcctcattactcgctggggctgctgtcgcctccccgaagggtggccttgtccagatagtggcaaacctccctgccgtggatgagtcaggagcattttcttaagaggaacatcactggaaaacaaaatgagcggggacacagaaaccaacagcagtggctgcatttgtggtacaggctcctcttccagagctcgctgatgcccacctcagacaggcctgaccacggcacggctggtgggatttgccagtcacctcaaccagccagttccaccctcagcttctctcagaagggagcaccacactcctcaagctcagtgaatgtatcccggcatgggtggggccagagcctgtgatatctcgaggtgggctcggcaggacaccggggtgtggaagggggaagcgagcacctgactcagacagcgcgggagctcgcaggagtcacgaggccacagcgacttcattgtctgactgggcctggacctataaacttcccacctcagccttgggccaagcctggaagataaaaatggagcaccccatggcgcccctcactcagattctcccctgggcttctcccacgcagccccagaagaggacacaccagccccagagttagccccagaggcccctgagcctcctgaagagccccgcctaggagtgctgaccgtgaccgacacaaccccagactccatgcgcctctcgtggagcgtggcccagggcccctttgattccttcgtggtccagtatgaggacacgaacgggcagccccaggccttgctcgtggacggcgaccagagcaagatcctcatctcaggcctggagcccagcaccccctacaggttcctcctctatggcctccatgaagggaagcgcctggggcccctctcagctgagggcaccacagggctggctcctgctggtcagacctcagaggagtcaaggccccgcctgtcccagctgtctgtgactgacgtgaccaccagttcactgaggctcaactgggaggccccaccgggggccttcgactccttcctgctccgctttggggttccatcaccaagcactctggagccgcatccgcgtccactgctgcagcgcgagctgatggtgccggggacgcggcactcggccgtgctccgggacctgcgttccgggactctgtacagcctgacactgtatgggctgcgaggaccccacaaggccgacagcatccagggaaccgcccgcaccctcagcccagttctggagagcccccgtgacctccaattcagtgaaatcagggagacctcagccaaggtcaactggatgcccccaccatcccgggcggacagcttcaaagtctcctaccagctggcggacggaggggagcctcagagtgtgcaggtggatggccaggcccggacccagaaactccaggggctgatcccaggcgctcgctatgaggtgaccgtggtctcggtccgaggctttgaggagagtgagcctctcacaggcttcctcaccacggttcctgacggtcccacacagttgcgtgcactgaacttgaccgagggattcgccgtgctgcactggaagcccccccagaatcctgtggacacctatgacgtccaggtcacagcccctggggccccgcctctgcaggcggagaccccaggcagcgcggtggactaccccctgcatgaccttgtcctccacaccaactacaccgccacagtgcgtggcctgcggggccccaacctcacttccccagccagcatcaccttcaccacagggctagaggcccctcgggacttggaggccaaggaagtgaccccccgcaccgccctgctcacttggactgagcccccagtccggcccgcaggctacctgctcagcttccacacccctggtggacagaaccaggagatcctgctcccaggagggatcacatctcaccagctccttggcctctttccctccacctcctacaatgcacggctccaggccatgtggggccagagcctcctgccgcccgtgtccacctctttcaccacgggtgggctgcggatccccttccccagggactgcggggaggagatgcagaacggagccggtgcctccaggaccagcaccatcttcctcaacggcaaccgcgagcggcccctgaacgtgttttgcgacatggagactgatgggggcggctggctggtgttccagcgccgcatggatggacagacagacttctggagggactgggaggactatgcccatggttttgggaacatctctggagagttctggctgggcaatgaggccctgcacagcctgacacaggcaggtgactactccatgcgcgtggacctgcgggctggggacgaggctgtgttcgcccagtacgactccttccacgtagactcggctgcggagtactaccgcctccacttggagggctaccacggcaccgcaggggactccatgagctaccacagcggcagtgtcttctctgcccgtgatcgggaccccaacagcttgctcatctcctgcgctgtctcctaccgaggggcctggtggtacaggaactgccactacgccaacctcaacgggctctacgggagcacagtggaccatcagggagtgagctggtaccactggaagggcttcgagttctcggtgcccttcacggaaatgaagctgagaccaagaaactttcgctccccagcggggggaggctgagctgctgcccacctctctcgcaccccagtatgactgccgagcactgaggggtcgccccgagagaagagccagggtccttcaccacccagccgctggaggaagccttctctgccagcgatctcgcagcactgtgtttacaggggggaggggaggggttcgtacgggagcaataaaggagaaactgaggtacccgga

SEQ ID NO: 375579 - DNA, 2823 bp, Homo sapiens
  misc_feature (713)..(713): n is a, c, g, or t
ggtcctccccttctcctcccctgctcgctgcagactccctcctcactgtcgctgccgagatccacagtcggttgtggctcagcccctgttgcaggggacaagtgagggagacttccctgtcctgccctgagacgccgccctcccggggttggggacagagcaggtgcagaggcactgcagctgctcggttgcccagcctcctgaatgatgccagcccagtatgctctaacctccagcctggttctcctggtgctgctgagcacagccagagcaggccccttctcttcacggtccaatgtgacactgccagccccccggccccctccccagccagggggccacacagtgggggctggagtgggaagcccctcttctcagctttacgagcacacagtggaaggaggggagaagcaggtggtattcacccaccgcattaacctgcccccttccactggctgtggctgtcccccaggcaccgagcccccagtccttgcttcagaggtacaggccctgagggtccgtctagagatcctggaggagttggtgaaggggctcaaggaacagtgcactgggggatgttgtcctgcctctgcccaagctggcacaggtgagcaggtgatcacagaagagggtggagaggtggggtggggtgggcattgctagtccataaaggtccttggtatgaattagaagaaggcactccttcctcaccntgaggggtgtggatgcagcccagaacacaacttggagagcagagctgggctacatgtcaaccaaagcatatgcgagggccctgagaggctgcatacattacacatactagcaactgggagcagacatggccttatgagatgaggctagcctggctaggggcctgacataggagcactacataggctcagcctctctcccaggagagagactgagacttgcctctcccctcctactccaggtcagacagatgtgcggaccctctgcagtctccatggtgtgtttgatctgagccgctgcacctgttcctgtgagccaggctggggtgggcccacctgctcagaccccacagatgctgagatccctccctcttccccaccctcagcctcggggtcctgcccagatgactgcaatgatcagggtcgctgtgtccgtggtcgttgcgtgtgctttcccggctacactggccccagctgtggctggccatcctgtcccggggactgccaaggccgtgggcgctgcgtgcagggcgtgtgtgtgtgccgggcaggcttctcaggccccgactgcagccagcgctcctgccctcgaggttgcagccagaggggacgctgtgagggtgggcgctgcgtgtgtgacccaggctacactggtgacgactgtggcatgaggagctgccctcgcggttgcagtcagagggggcgctgtgagaatgggcgctgcgtgtgtaaccccggctacactggcgaggactgtggggtgaggagctgccctcggggctgcagccagcggggacgctgcaaggacgggcgctgcgtgtgtgaccccggctacactggcgaggactgtggtacgcggagctgcccctgggactgtggcgagggcgggcgctgcgtggacggccgctgcgtgtgctggcccgggtacacaggcgaggactgcagcacgcggacatgtccgagggactgccggggccgcgggcgctgcgaggacggcgaatgcatttgcgacacgggctacagcggggacgactgcggcgtgcgcagctgccctggcgactgcaaccaaaggggccgctgcgaggacggccgctgcgtgtgctggccggggtacactggaaccgattgcggctcgcgcgcctgcccacgcgactgtagaggtcgcgggcgctgcgagaacggcgtgtgtgtttgcaatgcgggctacagcggcgaggactgcggtgtgcgcagctgtcctggggactgtcgtggccggggccgctgtgagagtggccgctgcatgtgttggccggggtacacaggccgggactgcggcacgcgcgcctgtcctggcgactgtcgcgggcgcgggcgctgcgtggatggccgctgcgtgtgcaacccgggcttcaccggtgaggactgtgggagccgtcgctgtcccggggactgccgtgggcacggcctttgcgaggatggcgtgtgcgtgtgtgacgcaggctactcaggggaagactgcagcacgcgcagctgccccgggggctgccgaggccgcggccagtgcctagatgggcggtgtgtgtgcgaggacggctactctggcgaggattgcggtgtgaggcagtgcccgaatgactgcagccagcacggcgtgtgccaggacggtgtgtgcatctgttgggaaggctacgtgagtgaggactgcagcatccgcacctgcccctccaactgccacgggaggggccgctgtgaggaagggcgctgcctgtgcgacccaggctacaccggccctacctgtgccacccgcatgtgcccggctgactgccggggacgtgggcggtgtgtgcaaggagtgtgcctgtgccacgtgggctatggcggtgaggactgcgggcaggaagagcctccagccagcgcctgccctggaggctgcgggccccgggaactgtgccgggcaggccagtgtgtgtgtgtagagggcttccgaggccctgactgtgccatccagacatgcccaggggactgccgtggccgaggagagtgtcacgatggcagctgtgtctgcaaagatgggtatgctggcgaagactgcggagaaggtgagcaggcagccttccccagtgtactctgg

SEQ ID NO: 375580 - DNA, 13434 bp, Homo sapiens
  misc_feature (713)..(713): n is a, c, g, or t
  misc_feature (8735)..(8735): n is a, c, g, or t
ggtcctccccttctcctcccctgctcgctgcagactccctcctcactgtcgctgccgagatccacagtcggttgtggctcagcccctgttgcaggggacaagtgagggagacttccctgtcctgccctgagacgccgccctcccggggttggggacagagcaggtgcagaggcactgcagctgctcggttgcccagcctcctgaatgatgccagcccagtatgctctaacctccagcctggttctcctggtgctgctgagcacagccagagcaggccccttctcttcacggtccaatgtgacactgccagccccccggccccctccccagccagggggccacacagtgggggctggagtgggaagcccctcttctcagctttacgagcacacagtggaaggaggggagaagcaggtggtattcacccaccgcattaacctgcccccttccactggctgtggctgtcccccaggcaccgagcccccagtccttgcttcagaggtacaggccctgagggtccgtctagagatcctggaggagttggtgaaggggctcaaggaacagtgcactgggggatgttgtcctgcctctgcccaagctggcacaggtgagcaggtgatcacagaagagggtggagaggtggggtggggtgggcattgctagtccataaaggtccttggtatgaattagaagaaggcactccttcctcaccntgaggggtgtggatgcagcccagaacacaacttggagagcagagctgggctacatgtcaaccaaagcatatgcgagggccctgagaggctgcatacattacacatactagcaactgggagcagacatggccttatgagatgaggctagcctggctaggggcctgacataggagcactacataggctcagcctctctcccaggagagagactgagacttgcctctcccctcctactccaggtcagacagatgtgcggaccctctgcagtctccatggtgtgtttgatctgagccgctgcacctgttcctgtgagccaggctggggtgggcccacctgctcagaccccacagatgctgagatccctccctcttccccaccctcagcctcggggtcctgcccagatgactgcaatgatcagggtcgctgtgtccgtggtcgttgcgtgtgctttcccggctacactggccccagctgtggctggccatcctgtcccggggactgccaaggccgtgggcgctgcgtgcagggcgtgtgtgtgtgccgggcaggcttctcaggccccgactgcagccagcgctcctgccctcgaggttgcagccagaggggacgctgtgagggtgggcgctgcgtgtgtgacccaggctacactggtgacgactgtggcatgaggagctgccctcgcggttgcagtcagagggggcgctgtgagaatgggcgctgcgtgtgtaaccccggctacactggcgaggactgtggggtgaggagctgccctcggggctgcagccagcggggacgctgcaaggacgggcgctgcgtgtgtgaccccggctacactggcgaggactgtggtacgcggagctgcccctgggactgtggcgagggcgggcgctgcgtggacggccgctgcgtgtgctggcccgggtacacaggcgaggactgcagcacgcggacatgtccgagggactgccggggccgcgggcgctgcgaggacggcgaatgcatttgcgacacgggctacagcggggacgactgcggcgtgcgcagctgccctggcgactgcaaccaaaggggccgctgcgaggacggccgctgcgtgtgctggccggggtacactggaaccgattgcggctcgcgcgcctgcccacgcgactgtagaggtcgcgggcgctgcgagaacggcgtgtgtgtttgcaatgcgggctacagcggcgaggactgcggtgtgcgcagctgtcctggggactgtcgtggccggggccgctgtgagagtggccgctgcatgtgttggccggggtacacaggccgggactgcggcacgcgcgcctgtcctggcgactgtcgcgggcgcgggcgctgcgtggatggccgctgcgtgtgcaacccgggcttcaccggtgaggactgtgggagccgtcgctgtcccggggactgccgtgggcacggcctttgcgaggatggcgtgtgcgtgtgtgacgcaggctactcaggggaagactgcagcacgcgcagctgccccgggggctgccgaggccgcggccagtgcctagatgggcggtgtgtgtgcgaggacggctactctggcgaggattgcggtgtgaggcagtgcccgaatgactgcagccagcacggcgtgtgccaggacggtgtgtgcatctgttgggaaggctacgtgagtgaggactgcagcatccgcacctgcccctccaactgccacgggaggggccgctgtgaggaagggcgctgcctgtgcgacccaggctacaccggccctacctgtgccacccgcatgtgcccggctgactgccggggacgtgggcggtgtgtgcaaggagtgtgcctgtgccacgtgggctatggcggtgaggactgcgggcaggaagagcctccagccagcgcctgccctggaggctgcgggccccgggaactgtgccgggcaggccagtgtgtgtgtgtagagggcttccgaggccctgactgtgccatccagacatgcccaggggactgccgtggccgaggagagtgtcacgatggcagctgtgtctgcaaagatgggtatgctggcgaagactgcggagaagaggtgccaaccattgagggcatgaggatgcatctcttggaggagacaacagttcggacagagtggaccccggctcctggccccgtggatgcctatgaaattcagttcatccccacgacagagggggcgagccccccattcacagcacgggttccaagctctgcctcagcctatgaccagagaggactggcccctggacaggagtaccaggtcactgtccgagcccttcgagggaccagctggggccttcctgcctccaagaccatcaccaccatgatcgatgggccccaggacctccgagtggtggctgtgacaccgacaacactggagcttggctggctgcgtccccaggctgaggtggaccgatttgtggtgtcctacgtcagtgccggcaaccagagggtgaggctggaagtgccccctgaagcagacgggacgctgctgactgacctgatgccaggcgtagaatatgtggtgactgtcacagcggagcggggccgggcagtcagctacccagcttctgtcagggccaacacagggtcctcacccttgggcctcttggggactaccgatgagcctcctccctcaggcccctcgacgacgcaaggggcccaggctcctctcctgcagcagcgcccccaggagctgggagagttgagggtgctgggcagagatgagacagggcgcctccgtgtggtctggaccgcccagcctgacacctttgcctacttccaactgcgcatgcgggtgcccgaggggccgggggcacatgaggaagtgctgccaggggacgtccgccaggctctggtgcctccaccccctcctggaaccccgtatgagctgtcacttcatggggtccctcctgggggcaagccctctgaccccatcatctaccaaggcattatggacaaggatgaggagaagcctgggaagtcctcaggcccaccacgcctgggtgagctgacggtgacagacaggacctccgactccttgctcctgcgctggacggtccccgagggcgagtttgactccttcgtgatccagtacaaagacagggacgggcagccccaggtggtgcccgtggaaggaccccagcgctcggccgtcatcacctccctggatcctggccgcaagtacaaatttgtcctgtatgggtttgttggcaagaagaggcatggtccgctggtggctgaagccaagatcttgcctcagagtgacccaagtccagggactccaccccgcctgggaaacctgtgggtgacagaccctaccccagattcactgcacctctcctggactgtccctgagggccagtttgacaccttcatggtccagtacagggacagggatggacggccccaggtggtacctgtggaagggcccgagcgttcatttgttgtctcctcactggaccctgaccacaagtacagattcactctgtttggaattgcgaacaagaagcggtatggccccctcacggccgatggcaccactgctccagagaggaaagaggagcccccccgccctgagttcctggagcagcccctcctgggggaactgacagtgaccggcgtgaccccagactccttgcgtctctcatggacagtggcccagggccccttcgactcattcatggtccagtacaaggatgcacaggggcagccccaggcagtgcctgttgcgggggatgagaatgaggttactgtccccggcctggatcccgaccggaagtataagatgaacctctacgggcttcgtggcaggcagcgtgtggggcccgagtctgtggtggccaagactgctcctcaggaggatgtggacgagacccccagccccacagaactgggcacggaggccccggagtcccccgaggagccgctcctgggggagctgacagtgacaggatcctcccctgattcgctgagcctcttctggaccgtcccccagggcagcttcgactctttcaccgtgcagtacaaggacagggatgggcggccccgggcggtgcgtgttgggggcaaggagagtgaggtcaccgtgggaggcctagagcccgggcacaagtacaagatgcacctgtacggcctccacgaggggcagcgcgtgggcccggtgtccgccgtgggcgtgacagccccacaacaagaagagacccctccagccactgagtccccgctggagccacgcctaggagagctgacagtgacagatgtgacccccaactctgtgggcctctcctggacagtccccgagggccagtttgactccttcatagtccagtacaaggacaaggacgggcagccccaggtggtgccggtggcggcagaccagcgagaggtcacagtctacaacctggagcctgagagaaaatataagatgaacatgtatggactacatgatgggcaacgcatgggccccctgtctgtggtcatcgtgacggctcccctcccaccagccccagccacagaggcctccaagcctcccctggagccacgcctaggggagctgacagtgacggatataacccctgactctgtgggcctctcatggacagtccctgagggtgaattcgactcctttgtggttcagtacaaggacagggacgggcagccccaggtggtgcccgtggctgcagatcagcgggaggtcactatccctgacctggaaccctcccgcaagtacaagttcctgctctttgggatccaggatgggaaacgacgcagcccagtctctgtggaggcaaagacggttgcccgaggtgacgccagcccaggggccccaccccgccttggggagctgtgggtgacagaccccaccccagactcactgcgcctctcctggacggttcctgagggccagttcgactcttttgtggtccagttcaaggacaaagacgggccccaggtggtgcccgtggagggccatgagcgctctgtcactgtcacccctctggatgccggccgcaagtacagattcctcctctatggcctcctgggcaagaagcgccatggccctctcactgccgacggcaccacggaagcccggagtgctatggatgatactggaacaaagcgtcccccaaaaccccgtctgggggaggagctgcaggtgaccaccgtgacccagaactccgtgggcctctcctggacagtccctgagggccagtttgactcctttgtggtccagtacaaagacagggacgggcagccccaggtggtgcccgtggagggcagcctcagggaggtcagcgtgccgggcctggaccctgcccacaggtacaagctgctgctctacgggctgcaccacggcaagcgtgtgggccccatctcggccgtcgccattactgccggcagggaagaaacggaaactgagaccacggccccgacccctccagcgcctgagccccacctcggggagttgacagtggaggaggccacgtcacacaccctgcatctctcctggatggtgactgagggagaatttgactccttcgaaatccagtacacagatagagacgggcaactccaaatggtccgcataggaggtgaccggaatgacatcaccctctctggcctggaatccgaccacagatacctggtgaccctgtatggtttcagtgatgggaagcatgtaggtcctgtccatgtcgaggccctgacagtcccggaggaggagaagccttcagaacctcccaccgcaacccccgagccccccatcaagcctcgcctgggggagctgaccgtgacagatgccacccctgactccctcagcctgtcctggacagttcccgagggacagtttgaccacttcctggtccagtacaggaatggagatgggcagcccaaggcagtgagggtgccagggcacgaggaaggggtcaccatctcgggcctggagccagaccataaatacaagatgaacctgtacggcttccacggtggccagcgcatgggccctgtgtctgtcgtcggggtgacagctgcagaggaagagacccccagccccacagaacccagcatggaggccccggagcccgctgaggagccgctcctgggggagctaacagtgacaggatcctcccctgactcgctgagcctctcctggaccgtcccccagggccgcttcgactccttcaccgtgcagtacaaggacagggacgggcggccccaggtggtgcgtgttgggggcgaggagagtgaagtcaccgtggggggcctggagcctgggcgcaagtacaagatgcacctgtacggcctccacgaggggcggcgcgtgggcccagtgtctgctgtgggcgtcacggcccccgaagaggagtcccctgatgctcctcttgcaaagctgcgcctagggcagatgacagtgagagacatcacctccgactccctcagcctctcctggacagtccccgagggccagtttgaccatttcttggtccagtttaagaatggggacgggcagcccaaggcggtgcgggtgccgggacacgaggatggggtcaccatctcgggcctggagccagaccacaagtacaagatgaacctgtacggcttccacggtggccagcgcgtgggccccgtgtctgctgttggtttaactgccccaggaaaggatgaagaaatggccccagcctcgacagaacctcccacccctgaaccccccatcaagcctcgcctggaggagctgaccgtgacagatgcgacccctgactccctcagcctgtcctggacggttcccgagggacagtttgaccacttcctggtccagtacaagaatggggatgggcagcccaaggcaacacgggtgccaggacatgaggacagggtcaccatctccggcctggagccagacaacaagtacaagatgaacctgtacggcttccacggtggccagcgtgtgggccccgtgtctgccatcggggtgacagctgcagaggaagagacccccagccccacagaacccagcatggaggccccggagccccctgaggagccgctcctgggggagctaacagtgacaggatcctcccctgactcgctgagcctctcctggaccgtcccccagggccgcttcgactccttcaccgtgcagtacaaggacagggacgggcggccccaggtggtgcgtgttgggggcgaggagagcgaggtcaccgtggggggcctggagcctgggcgcaaatacaagatgcacctgtacggcctccacgaggggcggcgtgtgggcccggtgtccaccgtgggcgtgactgccccacaagaggatgtggacgagacccccagccctacagaaccaggcacagaggccccagagccccccgaggagcctctcctgggggagctgacagtgacaggatcctcccctgactcgctgagcctttcctggaccgtcccccagggccgctttgactccttcaccgtgcagtacaaggacagggacgggcggccccaggcggtgcgtgttgggggccaggagagcaaggtcactgtgaggggcctggagcctgggcgcaagtacaagatgcacctgtacggcctccacgaggggcggcgcctaggcccggtgtctgccgtgggcgtcacagaggatgaagccgagaccacccaagcagtgcctaccatgacccctgagccccccatcaagcctcgcctgggggagctgaccatgacagatgccacccctgactccctcagcctgtcctggacggttcccgagggccagtttgaccacttcctggtccagtacaggaatggggatgggcagcccaaggcggtgcgggtgccggggcacgaggacggggtcaccatctcaggcctggagccagaccataaatacaagatgaacctgtacggcttccacggtggccagcgcgtgggccccatctctgtcattggggtgacggaggaagagacccccagccccacggaactcagcactgaggcccnggagccccctgaggagccgctcctgggggagctgacagtgacaggatcctcccctgactcgctgagcctctcctggaccatcccccagggccacttcgactccttcaccgtgcagtacaaggacagggacgggcggccccaggtgatgcgtgtcaggggcgaggagagcgaggtcaccgtggggggcctggagcccgggcgcaaatacaagatgcacctgtacggcctccacgaggggcggcgtgtgggcccggtgtccaccgtgggtgtgacagtgcccaccacaacccctgagccccccaacaagcctcgcctcggggagctgaccgtgacagatgccacccctgactccctcagcctgtcctggatggtccccgagggccagtttgaccacttcctggtccagtacaggaatggggatgggcagcccaaggtggtgcgggtgccggggcacgaggacggggtcaccatctcaggcctggagccagaccacaagtacaagatgaacctgtacggcttccacggtggccagcgcgtgggccccatctctgtcattggggtgacagaggaagaaactcccgcccccacagaacccagcacggaggccccggagccccctgaggagccgctcctgggggagctgacagtgacaggatcctcccctgactcgctgagcctctcctggaccatcccccagggccgcttcgactccttcactgtgcagtacaaggacagggacgggcggccccaggtggtgcgtgtcaggggcgaggagagcgaggtcaccgtggggggcctggagcccgggtgcaaatacaagatgcacctgtacggcctccacgaggggcagcgcgtgggcccagtgtccgctgtgggtgtgacagctccaaaggatgaagccgagaccacccaagcagtgcctaccatgacccctgagccccccatcaagcctcgcctgggggagctgaccgtgacagatgccacccccgactccctcagcctgtcctggatggttcccgagggccagtttgaccacttcctggtccagtacaggaatggggatgggcagcccaaggcggtgcgggtgccggggcacgaggacggggtcaccatctcaggcctggagccagaccataaatacaagatgaacctgtacggcttccacggtggccagcgcgtaggccctgtgtctgccattggggtgacggaggaagagacccccagccccacagaacccagcactgaggccccggaggcccctgaggagccgctcctgggggagttgacagtgacaggatcctcccctgactcgctgagcctctcctggaccgtcccccagggccgcttcgactccttcaccgtgcagtacaaggacagggacgggcagccccaggtggtgcgtgtcaggggcgaggagagcgaggtcaccgtggggggcctggagcccgggcgcaaatacaagatgcatctgtacggcctccacgaggggcagcgcgtgggcccagtgtccaccgtgggcatcacggcgcccctgcccacaccactgccggtggagccccgcctgggggagctggcggtggcggccgtgacctcggactcagtgggcctctcatggacggtggcccagggcccctttgactccttcctggtacagtacagggacgcgcaggggcagccccaggcagtgcctgtgagcggagacctccgagcggtcgccgtctcggggctggacccggcccgcaagtacaagttcctgctctttggactccagaatgggaaacgccacggcccagtccctgtggaggccaggaccgccccagacaccaaaccgtctccccgcctgggggagctgactgtgacagatgcgacccctgactccgtgggcctctcgtggacggtccctgagggcgaattcgactccttcgtggtccagtacaaggataaggatggtcggctccaggtggtgccggtggcagccaaccagcgggaggtcacagtccagggcctggagcccagtaggaaatacaggttcctgctctatggtctgtcaggcaggaaacgactgggccccatctctgctgacagcaccacagctcccctggagaaggagctacctccccacctgggggaactgaccgtggctgaggagacctccagctctctgcgcctgtcctggacggtagcccagggcccctttgactccttcgtggtccagtacagggacacggacgggcagcccagggcagtgcctgtggccgcagaccagcgcacagtcaccgtagaggacctggagcctggcaagaaatacaagtttctgctctacgggctccttgggggaaagcgcctgggcccggtctctgccctgggaatgacagccccagaagaggacacaccagccccagagttagccccagaggcccctgagcctcctgaagagccccgcctaggagtgctgaccgtgaccgacacaaccccagactccatgcgcctctcgtggagcgtggcccagggcccctttgattccttcgtggtccagtatgaggacacgaacgggcagccccaggccttgctcgtggacggcgaccagagcaagatcctcatctcaggcctggagcccagcaccccctacaggttcctcctctatggcctccatgaagggaagcgcctggggcccctctcagctgagggcaccacagggctggctcctgctggtcagacctcagaggagtcaaggccccgcctgtcccagctgtctgtgactgacgtgaccaccagttcactgaggctcaactgggaggccccaccgggggccttcgactccttcctgctccgctttggggttccatcaccaagcactctggagccgcatccgcgtccactgctgcagcgcgagctgatggtgccggggacgcggcactcggccgtgctccgggacctgcgttccgggactctgtacagcctgacactgtatgggctgcgaggaccccacaaggccgacagcatccagggaaccgcccgcaccctcagcccagttctggagagcccccgtgacctccaattcagtgaaatcagggagacctcagccaaggtcaactggatgcccccaccatcccgggcggacagcttcaaagtctcctaccagctggcggacggaggggagcctcagagtgtgcaggtggatggccaggcccggacccagaaactccaggggctgatcccaggcgctcgctatgaggtgaccgtggtctcggtccgaggctttgaggagagtgagcctctcacaggcttcctcaccacggttcctgacggtcccacacagttgcgtgcactgaacttgaccgagggattcgccgtgctgcactggaagcccccccagaatcctgtggacacctatgacgtccaggtcacagcccctggggccccgcctctgcaggcggagaccccaggcagcgcggtggactaccccctgcatgaccttgtcctccacaccaactacaccgccacagtgcgtggcctgcggggccccaacctcacttccccagccagcatcaccttcaccacagggctagaggcccctcgggacttggaggccaaggaagtgaccccccgcaccgccctgctcacttggactgagcccccagtccggcccgcaggctacctgctcagcttccacacccctggtggacagaaccaggagatcctgctcccaggagggatcacatctcaccagctccttggcctctttccctccacctcctacaatgcacggctccaggccatgtggggccagagcctcctgccgcccgtgtccacctctttcaccacgggtgggctgcggatccccttccccagggactgcggggaggagatgcagaacggagccggtgcctccaggaccagcaccatcttcctcaacggcaaccgcgagcggcccctgaacgtgttttgcgacatggagactgatgggggcggctggctggtgttccagcgccgcatggatggacagacagacttctggagggactgggaggactatgcccatggttttgggaacatctctggagagttctggctgggcaatgaggccctgcacagcctgacacaggcaggtgactactccatgcgcgtggacctgcgggctggggacgaggctgtgttcgcccagtacgactccttccacgtagactcggctgcggagtactaccgcctccacttggagggctaccacggcaccgcaggggactccatgagctaccacagcggcagtgtcttctctgcccgtgatcgggaccccaacagcttgctcatctcctgcgctgtctcctaccgaggggcctggtggtacaggaactgccactacgccaacctcaacgggctctacgggagcacagtggaccatcagggagtgagctggtaccactggaagggcttcgagttctcggtgcccttcacggaaatgaagctgagaccaagaaactttcgctccccagcggggggaggctgagctgctgcccacctctctcgcaccccagtatgactgccgagcactgaggggtcgccccgagagaagagccagggtccttcaccacccagccgctggaggaagccttctctgccagcgatctcgcagcactgtgtttacaggggggaggggaggggttcgtacgggagcaataaaggagaaactgaggtacccgga

SEQ ID NO: 375581 - DNA, 13545 bp, Homo sapiens
  misc_feature (713)..(713): n is a, c, g, or t
  misc_feature (8735)..(8735): n is a, c, g, or t
ggtcctccccttctcctcccctgctcgctgcagactccctcctcactgtcgctgccgagatccacagtcggttgtggctcagcccctgttgcaggggacaagtgagggagacttccctgtcctgccctgagacgccgccctcccggggttggggacagagcaggtgcagaggcactgcagctgctcggttgcccagcctcctgaatgatgccagcccagtatgctctaacctccagcctggttctcctggtgctgctgagcacagccagagcaggccccttctcttcacggtccaatgtgacactgccagccccccggccccctccccagccagggggccacacagtgggggctggagtgggaagcccctcttctcagctttacgagcacacagtggaaggaggggagaagcaggtggtattcacccaccgcattaacctgcccccttccactggctgtggctgtcccccaggcaccgagcccccagtccttgcttcagaggtacaggccctgagggtccgtctagagatcctggaggagttggtgaaggggctcaaggaacagtgcactgggggatgttgtcctgcctctgcccaagctggcacaggtgagcaggtgatcacagaagagggtggagaggtggggtggggtgggcattgctagtccataaaggtccttggtatgaattagaagaaggcactccttcctcaccntgaggggtgtggatgcagcccagaacacaacttggagagcagagctgggctacatgtcaaccaaagcatatgcgagggccctgagaggctgcatacattacacatactagcaactgggagcagacatggccttatgagatgaggctagcctggctaggggcctgacataggagcactacataggctcagcctctctcccaggagagagactgagacttgcctctcccctcctactccaggtcagacagatgtgcggaccctctgcagtctccatggtgtgtttgatctgagccgctgcacctgttcctgtgagccaggctggggtgggcccacctgctcagaccccacagatgctgagatccctccctcttccccaccctcagcctcggggtcctgcccagatgactgcaatgatcagggtcgctgtgtccgtggtcgttgcgtgtgctttcccggctacactggccccagctgtggctggccatcctgtcccggggactgccaaggccgtgggcgctgcgtgcagggcgtgtgtgtgtgccgggcaggcttctcaggccccgactgcagccagcgctcctgccctcgaggttgcagccagaggggacgctgtgagggtgggcgctgcgtgtgtgacccaggctacactggtgacgactgtggcatgaggagctgccctcgcggttgcagtcagagggggcgctgtgagaatgggcgctgcgtgtgtaaccccggctacactggcgaggactgtggggtgaggagctgccctcggggctgcagccagcggggacgctgcaaggacgggcgctgcgtgtgtgaccccggctacactggcgaggactgtggtacgcggagctgcccctgggactgtggcgagggcgggcgctgcgtggacggccgctgcgtgtgctggcccgggtacacaggcgaggactgcagcacgcggacatgtccgagggactgccggggccgcgggcgctgcgaggacggcgaatgcatttgcgacacgggctacagcggggacgactgcggcgtgcgcagctgccctggcgactgcaaccaaaggggccgctgcgaggacggccgctgcgtgtgctggccggggtacactggaaccgattgcggctcgcgcgcctgcccacgcgactgtagaggtcgcgggcgctgcgagaacggcgtgtgtgtttgcaatgcgggctacagcggcgaggactgcggtgtgcgcagctgtcctggggactgtcgtggccggggccgctgtgagagtggccgctgcatgtgttggccggggtacacaggccgggactgcggcacgcgcgcctgtcctggcgactgtcgcgggcgcgggcgctgcgtggatggccgctgcgtgtgcaacccgggcttcaccggtgaggactgtgggagccgtcgctgtcccggggactgccgtgggcacggcctttgcgaggatggcgtgtgcgtgtgtgacgcaggctactcaggggaagactgcagcacgcgcagctgccccgggggctgccgaggccgcggccagtgcctagatgggcggtgtgtgtgcgaggacggctactctggcgaggattgcggtgtgaggcagtgcccgaatgactgcagccagcacggcgtgtgccaggacggtgtgtgcatctgttgggaaggctacgtgagtgaggactgcagcatccgcacctgcccctccaactgccacgggaggggccgctgtgaggaagggcgctgcctgtgcgacccaggctacaccggccctacctgtgccacccgcatgtgcccggctgactgccggggacgtgggcggtgtgtgcaaggagtgtgcctgtgccacgtgggctatggcggtgaggactgcgggcaggaagagcctccagccagcgcctgccctggaggctgcgggccccgggaactgtgccgggcaggccagtgtgtgtgtgtagagggcttccgaggccctgactgtgccatccagacatgcccaggggactgccgtggccgaggagagtgtcacgatggcagctgtgtctgcaaagatgggtatgctggcgaagactgcggagaagaggtgccaaccattgagggcatgaggatgcatctcttggaggagacaacagttcggacagagtggaccccggctcctggccccgtggatgcctatgaaattcagttcatccccacgacagagggggcgagccccccattcacagcacgggttccaagctctgcctcagcctatgaccagagaggactggcccctggacaggagtaccaggtcactgtccgagcccttcgagggaccagctggggccttcctgcctccaagaccatcaccaccatgatcgatgggccccaggacctccgagtggtggctgtgacaccgacaacactggagcttggctggctgcgtccccaggctgaggtggaccgatttgtggtgtcctacgtcagtgccggcaaccagagggtgaggctggaagtgccccctgaagcagacgggacgctgctgactgacctgatgccaggcgtagaatatgtggtgactgtcacagcggagcggggccgggcagtcagctacccagcttctgtcagggccaacacagggtcctcacccttgggcctcttggggactaccgatgagcctcctccctcaggcccctcgacgacgcaaggggcccaggctcctctcctgcagcagcgcccccaggagctgggagagttgagggtgctgggcagagatgagacagggcgcctccgtgtggtctggaccgcccagcctgacacctttgcctacttccaactgcgcatgcgggtgcccgaggggccgggggcacatgaggaagtgctgccaggggacgtccgccaggctctggtgcctccaccccctcctggaaccccgtatgagctgtcacttcatggggtccctcctgggggcaagccctctgaccccatcatctaccaaggcattatggacaaggatgaggagaagcctgggaagtcctcaggcccaccacgcctgggtgagctgacggtgacagacaggacctccgactccttgctcctgcgctggacggtccccgagggcgagtttgactccttcgtgatccagtacaaagacagggacgggcagccccaggtggtgcccgtggaaggaccccagcgctcggccgtcatcacctccctggatcctggccgcaagtacaaatttgtcctgtatgggtttgttggcaagaagaggcatggtccgctggtggctgaagccaagatcttgcctcagagtgacccaagtccagggactccaccccgcctgggaaacctgtgggtgacagaccctaccccagattcactgcacctctcctggactgtccctgagggccagtttgacaccttcatggtccagtacagggacagggatggacggccccaggtggtacctgtggaagggcccgagcgttcatttgttgtctcctcactggaccctgaccacaagtacagattcactctgtttggaattgcgaacaagaagcggtatggccccctcacggccgatggcaccactgctccagagaggaaagaggagcccccccgccctgagttcctggagcagcccctcctgggggaactgacagtgaccggcgtgaccccagactccttgcgtctctcatggacagtggcccagggccccttcgactcattcatggtccagtacaaggatgcacaggggcagccccaggcagtgcctgttgcgggggatgagaatgaggttactgtccccggcctggatcccgaccggaagtataagatgaacctctacgggcttcgtggcaggcagcgtgtggggcccgagtctgtggtggccaagactgctcctcaggaggatgtggacgagacccccagccccacagaactgggcacggaggccccggagtcccccgaggagccgctcctgggggagctgacagtgacaggatcctcccctgattcgctgagcctcttctggaccgtcccccagggcagcttcgactctttcaccgtgcagtacaaggacagggatgggcggccccgggcggtgcgtgttgggggcaaggagagtgaggtcaccgtgggaggcctagagcccgggcacaagtacaagatgcacctgtacggcctccacgaggggcagcgcgtgggcccggtgtccgccgtgggcgtgacagccccacaacaagaagagacccctccagccactgagtccccgctggagccacgcctaggagagctgacagtgacagatgtgacccccaactctgtgggcctctcctggacagtccccgagggccagtttgactccttcatagtccagtacaaggacaaggacgggcagccccaggtggtgccggtggcggcagaccagcgagaggtcacagtctacaacctggagcctgagagaaaatataagatgaacatgtatggactacatgatgggcaacgcatgggccccctgtctgtggtcatcgtgacggctcccctcccaccagccccagccacagaggcctccaagcctcccctggagccacgcctaggggagctgacagtgacggatataacccctgactctgtgggcctctcatggacagtccctgagggtgaattcgactcctttgtggttcagtacaaggacagggacgggcagccccaggtggtgcccgtggctgcagatcagcgggaggtcactatccctgacctggaaccctcccgcaagtacaagttcctgctctttgggatccaggatgggaaacgacgcagcccagtctctgtggaggcaaagacggttgcccgaggtgacgccagcccaggggccccaccccgccttggggagctgtgggtgacagaccccaccccagactcactgcgcctctcctggacggttcctgagggccagttcgactcttttgtggtccagttcaaggacaaagacgggccccaggtggtgcccgtggagggccatgagcgctctgtcactgtcacccctctggatgccggccgcaagtacagattcctcctctatggcctcctgggcaagaagcgccatggccctctcactgccgacggcaccacggaagcccggagtgctatggatgatactggaacaaagcgtcccccaaaaccccgtctgggggaggagctgcaggtgaccaccgtgacccagaactccgtgggcctctcctggacagtccctgagggccagtttgactcctttgtggtccagtacaaagacagggacgggcagccccaggtggtgcccgtggagggcagcctcagggaggtcagcgtgccgggcctggaccctgcccacaggtacaagctgctgctctacgggctgcaccacggcaagcgtgtgggccccatctcggccgtcgccattactgccggcagggaagaaacggaaactgagaccacggccccgacccctccagcgcctgagccccacctcggggagttgacagtggaggaggccacgtcacacaccctgcatctctcctggatggtgactgagggagaatttgactccttcgaaatccagtacacagatagagacgggcaactccaaatggtccgcataggaggtgaccggaatgacatcaccctctctggcctggaatccgaccacagatacctggtgaccctgtatggtttcagtgatgggaagcatgtaggtcctgtccatgtcgaggccctgacagtcccggaggaggagaagccttcagaacctcccaccgcaacccccgagccccccatcaagcctcgcctgggggagctgaccgtgacagatgccacccctgactccctcagcctgtcctggacagttcccgagggacagtttgaccacttcctggtccagtacaggaatggagatgggcagcccaaggcagtgagggtgccagggcacgaggaaggggtcaccatctcgggcctggagccagaccataaatacaagatgaacctgtacggcttccacggtggccagcgcatgggccctgtgtctgtcgtcggggtgacagctgcagaggaagagacccccagccccacagaacccagcatggaggccccggagcccgctgaggagccgctcctgggggagctaacagtgacaggatcctcccctgactcgctgagcctctcctggaccgtcccccagggccgcttcgactccttcaccgtgcagtacaaggacagggacgggcggccccaggtggtgcgtgttgggggcgaggagagtgaagtcaccgtggggggcctggagcctgggcgcaagtacaagatgcacctgtacggcctccacgaggggcggcgcgtgggcccagtgtctgctgtgggcgtcacggcccccgaagaggagtcccctgatgctcctcttgcaaagctgcgcctagggcagatgacagtgagagacatcacctccgactccctcagcctctcctggacagtccccgagggccagtttgaccatttcttggtccagtttaagaatggggacgggcagcccaaggcggtgcgggtgccgggacacgaggatggggtcaccatctcgggcctggagccagaccacaagtacaagatgaacctgtacggcttccacggtggccagcgcgtgggccccgtgtctgctgttggtttaactgccccaggaaaggatgaagaaatggccccagcctcgacagaacctcccacccctgaaccccccatcaagcctcgcctggaggagctgaccgtgacagatgcgacccctgactccctcagcctgtcctggacggttcccgagggacagtttgaccacttcctggtccagtacaagaatggggatgggcagcccaaggcaacacgggtgccaggacatgaggacagggtcaccatctccggcctggagccagacaacaagtacaagatgaacctgtacggcttccacggtggccagcgtgtgggccccgtgtctgccatcggggtgacagctgcagaggaagagacccccagccccacagaacccagcatggaggccccggagccccctgaggagccgctcctgggggagctaacagtgacaggatcctcccctgactcgctgagcctctcctggaccgtcccccagggccgcttcgactccttcaccgtgcagtacaaggacagggacgggcggccccaggtggtgcgtgttgggggcgaggagagcgaggtcaccgtggggggcctggagcctgggcgcaaatacaagatgcacctgtacggcctccacgaggggcggcgtgtgggcccggtgtccaccgtgggcgtgactgccccacaagaggatgtggacgagacccccagccctacagaaccaggcacagaggccccagagccccccgaggagcctctcctgggggagctgacagtgacaggatcctcccctgactcgctgagcctttcctggaccgtcccccagggccgctttgactccttcaccgtgcagtacaaggacagggacgggcggccccaggcggtgcgtgttgggggccaggagagcaaggtcactgtgaggggcctggagcctgggcgcaagtacaagatgcacctgtacggcctccacgaggggcggcgcctaggcccggtgtctgccgtgggcgtcacagaggatgaagccgagaccacccaagcagtgcctaccatgacccctgagccccccatcaagcctcgcctgggggagctgaccatgacagatgccacccctgactccctcagcctgtcctggacggttcccgagggccagtttgaccacttcctggtccagtacaggaatggggatgggcagcccaaggcggtgcgggtgccggggcacgaggacggggtcaccatctcaggcctggagccagaccataaatacaagatgaacctgtacggcttccacggtggccagcgcgtgggccccatctctgtcattggggtgacggaggaagagacccccagccccacggaactcagcactgaggcccnggagccccctgaggagccgctcctgggggagctgacagtgacaggatcctcccctgactcgctgagcctctcctggaccatcccccagggccacttcgactccttcaccgtgcagtacaaggacagggacgggcggccccaggtgatgcgtgtcaggggcgaggagagcgaggtcaccgtggggggcctggagcccgggcgcaaatacaagatgcacctgtacggcctccacgaggggcggcgtgtgggcccggtgtccaccgtgggtgtgacagtgcccaccacaacccctgagccccccaacaagcctcgcctcggggagctgaccgtgacagatgccacccctgactccctcagcctgtcctggatggtccccgagggccagtttgaccacttcctggtccagtacaggaatggggatgggcagcccaaggtggtgcgggtgccggggcacgaggacggggtcaccatctcaggcctggagccagaccacaagtacaagatgaacctgtacggcttccacggtggccagcgcgtgggccccatctctgtcattggggtgacagaggaagaaactcccgcccccacagaacccagcacggaggccccggagccccctgaggagccgctcctgggggagctgacagtgacaggatcctcccctgactcgctgagcctctcctggaccatcccccagggccgcttcgactccttcactgtgcagtacaaggacagggacgggcggccccaggtggtgcgtgtcaggggcgaggagagcgaggtcaccgtggggggcctggagcccgggtgcaaatacaagatgcacctgtacggcctccacgaggggcagcgcgtgggcccagtgtccgctgtgggtgtgacagctccaaaggatgaagccgagaccacccaagcagtgcctaccatgacccctgagccccccatcaagcctcgcctgggggagctgaccgtgacagatgccacccccgactccctcagcctgtcctggatggttcccgagggccagtttgaccacttcctggtccagtacaggaatggggatgggcagcccaaggcggtgcgggtgccggggcacgaggacggggtcaccatctcaggcctggagccagaccataaatacaagatgaacctgtacggcttccacggtggccagcgcgtaggccctgtgtctgccattggggtgacggaggaagagacccccagccccacagaacccagcactgaggccccggaggcccctgaggagccgctcctgggggagttgacagtgacaggatcctcccctgactcgctgagcctctcctggaccgtcccccagggccgcttcgactccttcaccgtgcagtacaaggacagggacgggcagccccaggtggtgcgtgtcaggggcgaggagagcgaggtcaccgtggggggcctggagcccgggcgcaaatacaagatgcatctgtacggcctccacgaggggcagcgcgtgggcccagtgtccaccgtgggcatcacggcgcccctgcccacaccactgccggtggagccccgcctgggggagctggcggtggcggccgtgacctcggactcagtgggcctctcatggacggtggcccagggcccctttgactccttcctggtacagtacagggacgcgcaggggcagccccaggcagtgcctgtgagcggagacctccgagcggtcgccgtctcggggctggacccggcccgcaagtacaagttcctgctctttggactccagaatgggaaacgccacggcccagtccctgtggaggccaggaccgccccagacaccaaaccgtctccccgcctgggggagctgactgtgacagatgcgacccctgactccgtgggcctctcgtggacggtccctgagggcgaattcgactccttcgtggtccagtacaaggataaggatggtcggctccaggtggtgccggtggcagccaaccagcgggaggtcacagtccagggcctggagcccagtaggaaatacaggttcctgctctatggtctgtcaggcaggaaacgactgggccccatctctgctgacagcaccacagctcccctggagaaggagctacctccccacctgggggaactgaccgtggctgaggagacctccagctctctgcgcctgtcctggacggtagcccagggcccctttgactccttcgtggtccagtacagggacacggacgggcagcccagggcagtgcctgtggccgcagaccagcgcacagtcaccgtagaggacctggagcctggcaagaaatacaagtttctgctctacgggctccttgggggaaagcgcctgggcccggtctctgccctgggaatgacagccccagaagaggacacaccagccccagagttagccccagaggcccctgagcctcctgaagagccccgcctaggagtgctgaccgtgaccgacacaaccccagactccatgcgcctctcgtggagcgtggcccagggcccctttgattccttcgtggtccagtatgaggacacgaacgggcagccccaggccttgctcgtggacggcgaccagagcaagatcctcatctcaggcctggagcccagcaccccctacaggttcctcctctatggcctccatgaagggaagcgcctggggcccctctcagctgagggcaccacagggctggctcctgctggtcagacctcagaggagtcaaggccccgcctgtcccagctgtctgtgactgacgtgaccaccagttcactgaggctcaactgggaggccccaccgggggccttcgactccttcctgctccgctttggggttccatcaccaagcactctggagccgcatccgcgtccactgctgcagcgcgagctgatggtgccggggacgcggcactcggccgtgctccgggacctgcgttccgggactctgtacagcctgacactgtatgggctgcgaggaccccacaaggccgacagcatccagggaaccgcccgcaccctcagcccagttctggagagcccccgtgacctccaattcagtgaaatcagggagacctcagccaaggtcaactggatgcccccaccatcccgggcggacagcttcaaagtctcctaccagctggcggacggaggggagcctcagagtgtgcaggtggatggccaggcccggacccagaaactccaggggctgatcccaggcgctcgctatgaggtgaccgtggtctcggtccgaggctttgaggagagtgagcctctcacaggcttcctcaccacggttcctgacggtcccacacagttgcgtgcactgaacttgaccgagggattcgccgtgctgcactggaagcccccccagaatcctgtggacacctatgacgtccaggtcacagcccctggggccccgcctctgcaggcggagaccccaggcagcgcggtggactaccccctgcatgaccttgtcctccacaccaactacaccgccacagtgcgtggcctgcggggccccaacctcacttccccagccagcatcaccttcaccacagggctagaggcccctcgggacttggaggccaaggaagtgaccccccgcaccgccctgctcacttggactgagcccccagtccggcccgcaggctacctgctcagcttccacacccctggtggacagaaccaggagatcctgctcccaggagggatcacatctcaccagctccttggcctctttccctccacctcctacaatgcacggctccaggccatgtggggccagagcctcctgccgcccgtgtccacctctttcaccacgggtgggctgcggatccccttccccagggactgcggggaggagatgcagaacggagccggtgcctccaggaccagcaccatcttcctcaacggcaaccgcgagcggcccctgaacgtgttttgcgacatggagactgatgggggcggctggctggtgttccagcgccgcatggatggacagacagacttctggagggactgggaggactatgcccatggttttgggaacatctctggagagttctggctgggcaatgaggccctgcacagcctgacacaggcaggtgactactccatgcgcgtggacctgcgggctggggacgaggctgtgttcgcccagtacgactccttccacgtagactcggctgcggagtactaccgcctccacttggagggctaccacggcaccgcaggggactccatgagctaccacagcggcagtgtcttctctgcccgtgatcgggaccccaacagcttgctcatctcctgcgctgtctcctaccgaggggcctggtggtacaggaactgccactacgccaacctcaacgggctctacgggagcacagtggaccatcagggagtgagctggtaccactggaagggcttcgagttctcggtgcccttcacggaaatgaagctgagaccaagaaactttcgctccccagcggggggaggctgagctgctgcccacctctctcgcaccccagtatgactgccgagcactgaggggtcgccccgagagaagagccagggtccttcaccacccagccgctggaggaagccttctctgccagcgatctcgcagcactgtgtttacaggggggagtccatgatgccttcggcatgcatttgacatcgatccctttggaccgggatagagtccaaaaagataacgccatgtaggccatgcaccatatcggaataaaagcgcttttggaattgagctgtcggccaggccacttgctgaacttctgagcactggact

SEQ ID NO: 375582 - DNA, 13164 bp, Homo sapiens
  misc_feature (713)..(713): n is a, c, g, or t
  misc_feature (8735)..(8735): n is a, c, g, or t
ggtcctccccttctcctcccctgctcgctgcagactccctcctcactgtcgctgccgagatccacagtcggttgtggctcagcccctgttgcaggggacaagtgagggagacttccctgtcctgccctgagacgccgccctcccggggttggggacagagcaggtgcagaggcactgcagctgctcggttgcccagcctcctgaatgatgccagcccagtatgctctaacctccagcctggttctcctggtgctgctgagcacagccagagcaggccccttctcttcacggtccaatgtgacactgccagccccccggccccctccccagccagggggccacacagtgggggctggagtgggaagcccctcttctcagctttacgagcacacagtggaaggaggggagaagcaggtggtattcacccaccgcattaacctgcccccttccactggctgtggctgtcccccaggcaccgagcccccagtccttgcttcagaggtacaggccctgagggtccgtctagagatcctggaggagttggtgaaggggctcaaggaacagtgcactgggggatgttgtcctgcctctgcccaagctggcacaggtgagcaggtgatcacagaagagggtggagaggtggggtggggtgggcattgctagtccataaaggtccttggtatgaattagaagaaggcactccttcctcaccntgaggggtgtggatgcagcccagaacacaacttggagagcagagctgggctacatgtcaaccaaagcatatgcgagggccctgagaggctgcatacattacacatactagcaactgggagcagacatggccttatgagatgaggctagcctggctaggggcctgacataggagcactacataggctcagcctctctcccaggagagagactgagacttgcctctcccctcctactccaggtcagacagatgtgcggaccctctgcagtctccatggtgtgtttgatctgagccgctgcacctgttcctgtgagccaggctggggtgggcccacctgctcagaccccacagatgctgagatccctccctcttccccaccctcagcctcggggtcctgcccagatgactgcaatgatcagggtcgctgtgtccgtggtcgttgcgtgtgctttcccggctacactggccccagctgtggctggccatcctgtcccggggactgccaaggccgtgggcgctgcgtgcagggcgtgtgtgtgtgccgggcaggcttctcaggccccgactgcagccagcgctcctgccctcgaggttgcagccagaggggacgctgtgagggtgggcgctgcgtgtgtgacccaggctacactggtgacgactgtggcatgaggagctgccctcgcggttgcagtcagagggggcgctgtgagaatgggcgctgcgtgtgtaaccccggctacactggcgaggactgtggggtgaggagctgccctcggggctgcagccagcggggacgctgcaaggacgggcgctgcgtgtgtgaccccggctacactggcgaggactgtggtacgcggagctgcccctgggactgtggcgagggcgggcgctgcgtggacggccgctgcgtgtgctggcccgggtacacaggcgaggactgcagcacgcggacatgtccgagggactgccggggccgcgggcgctgcgaggacggcgaatgcatttgcgacacgggctacagcggggacgactgcggcgtgcgcagctgccctggcgactgcaaccaaaggggccgctgcgaggacggccgctgcgtgtgctggccggggtacactggaaccgattgcggctcgcgcgcctgcccacgcgactgtagaggtcgcgggcgctgcgagaacggcgtgtgtgtttgcaatgcgggctacagcggcgaggactgcggtgtgcgcagctgtcctggggactgtcgtggccggggccgctgtgagagtggccgctgcatgtgttggccggggtacacaggccgggactgcggcacgcgcgcctgtcctggcgactgtcgcgggcgcgggcgctgcgtggatggccgctgcgtgtgcaacccgggcttcaccggtgaggactgtgggagccgtcgctgtcccggggactgccgtgggcacggcctttgcgaggatggcgtgtgcgtgtgtgacgcaggctactcaggggaagactgcagcacgcgcagctgccccgggggctgccgaggccgcggccagtgcctagatgggcggtgtgtgtgcgaggacggctactctggcgaggattgcggtgtgaggcagtgcccgaatgactgcagccagcacggcgtgtgccaggacggtgtgtgcatctgttgggaaggctacgtgagtgaggactgcagcatccgcacctgcccctccaactgccacgggaggggccgctgtgaggaagggcgctgcctgtgcgacccaggctacaccggccctacctgtgccacccgcatgtgcccggctgactgccggggacgtgggcggtgtgtgcaaggagtgtgcctgtgccacgtgggctatggcggtgaggactgcgggcaggaagagcctccagccagcgcctgccctggaggctgcgggccccgggaactgtgccgggcaggccagtgtgtgtgtgtagagggcttccgaggccctgactgtgccatccagacatgcccaggggactgccgtggccgaggagagtgtcacgatggcagctgtgtctgcaaagatgggtatgctggcgaagactgcggagaagaggtgccaaccattgagggcatgaggatgcatctcttggaggagacaacagttcggacagagtggaccccggctcctggccccgtggatgcctatgaaattcagttcatccccacgacagagggggcgagccccccattcacagcacgggttccaagctctgcctcagcctatgaccagagaggactggcccctggacaggagtaccaggtcactgtccgagcccttcgagggaccagctggggccttcctgcctccaagaccatcaccaccatgatcgatgggccccaggacctccgagtggtggctgtgacaccgacaacactggagcttggctggctgcgtccccaggctgaggtggaccgatttgtggtgtcctacgtcagtgccggcaaccagagggtgaggctggaagtgccccctgaagcagacgggacgctgctgactgacctgatgccaggcgtagaatatgtggtgactgtcacagcggagcggggccgggcagtcagctacccagcttctgtcagggccaacacagggtcctcacccttgggcctcttggggactaccgatgagcctcctccctcaggcccctcgacgacgcaaggggcccaggctcctctcctgcagcagcgcccccaggagctgggagagttgagggtgctgggcagagatgagacagggcgcctccgtgtggtctggaccgcccagcctgacacctttgcctacttccaactgcgcatgcgggtgcccgaggggccgggggcacatgaggaagtgctgccaggggacgtccgccaggctctggtgcctccaccccctcctggaaccccgtatgagctgtcacttcatggggtccctcctgggggcaagccctctgaccccatcatctaccaaggcattatggacaaggatgaggagaagcctgggaagtcctcaggcccaccacgcctgggtgagctgacggtgacagacaggacctccgactccttgctcctgcgctggacggtccccgagggcgagtttgactccttcgtgatccagtacaaagacagggacgggcagccccaggtggtgcccgtggaaggaccccagcgctcggccgtcatcacctccctggatcctggccgcaagtacaaatttgtcctgtatgggtttgttggcaagaagaggcatggtccgctggtggctgaagccaagatcttgcctcagagtgacccaagtccagggactccaccccgcctgggaaacctgtgggtgacagaccctaccccagattcactgcacctctcctggactgtccctgagggccagtttgacaccttcatggtccagtacagggacagggatggacggccccaggtggtacctgtggaagggcccgagcgttcatttgttgtctcctcactggaccctgaccacaagtacagattcactctgtttggaattgcgaacaagaagcggtatggccccctcacggccgatggcaccactgctccagagaggaaagaggagcccccccgccctgagttcctggagcagcccctcctgggggaactgacagtgaccggcgtgaccccagactccttgcgtctctcatggacagtggcccagggccccttcgactcattcatggtccagtacaaggatgcacaggggcagccccaggcagtgcctgttgcgggggatgagaatgaggttactgtccccggcctggatcccgaccggaagtataagatgaacctctacgggcttcgtggcaggcagcgtgtggggcccgagtctgtggtggccaagactgctcctcaggaggatgtggacgagacccccagccccacagaactgggcacggaggccccggagtcccccgaggagccgctcctgggggagctgacagtgacaggatcctcccctgattcgctgagcctcttctggaccgtcccccagggcagcttcgactctttcaccgtgcagtacaaggacagggatgggcggccccgggcggtgcgtgttgggggcaaggagagtgaggtcaccgtgggaggcctagagcccgggcacaagtacaagatgcacctgtacggcctccacgaggggcagcgcgtgggcccggtgtccgccgtgggcgtgacagccccacaacaagaagagacccctccagccactgagtccccgctggagccacgcctaggagagctgacagtgacagatgtgacccccaactctgtgggcctctcctggacagtccccgagggccagtttgactccttcatagtccagtacaaggacaaggacgggcagccccaggtggtgccggtggcggcagaccagcgagaggtcacagtctacaacctggagcctgagagaaaatataagatgaacatgtatggactacatgatgggcaacgcatgggccccctgtctgtggtcatcgtgacggctcccctcccaccagccccagccacagaggcctccaagcctcccctggagccacgcctaggggagctgacagtgacggatataacccctgactctgtgggcctctcatggacagtccctgagggtgaattcgactcctttgtggttcagtacaaggacagggacgggcagccccaggtggtgcccgtggctgcagatcagcgggaggtcactatccctgacctggaaccctcccgcaagtacaagttcctgctctttgggatccaggatgggaaacgacgcagcccagtctctgtggaggcaaagacggttgcccgaggtgacgccagcccaggggccccaccccgccttggggagctgtgggtgacagaccccaccccagactcactgcgcctctcctggacggttcctgagggccagttcgactcttttgtggtccagttcaaggacaaagacgggccccaggtggtgcccgtggagggccatgagcgctctgtcactgtcacccctctggatgccggccgcaagtacagattcctcctctatggcctcctgggcaagaagcgccatggccctctcactgccgacggcaccacggaagcccggagtgctatggatgatactggaacaaagcgtcccccaaaaccccgtctgggggaggagctgcaggtgaccaccgtgacccagaactccgtgggcctctcctggacagtccctgagggccagtttgactcctttgtggtccagtacaaagacagggacgggcagccccaggtggtgcccgtggagggcagcctcagggaggtcagcgtgccgggcctggaccctgcccacaggtacaagctgctgctctacgggctgcaccacggcaagcgtgtgggccccatctcggccgtcgccattactgccggcagggaagaaacggaaactgagaccacggccccgacccctccagcgcctgagccccacctcggggagttgacagtggaggaggccacgtcacacaccctgcatctctcctggatggtgactgagggagaatttgactccttcgaaatccagtacacagatagagacgggcaactccaaatggtccgcataggaggtgaccggaatgacatcaccctctctggcctggaatccgaccacagatacctggtgaccctgtatggtttcagtgatgggaagcatgtaggtcctgtccatgtcgaggccctgacagtcccggaggaggagaagccttcagaacctcccaccgcaacccccgagccccccatcaagcctcgcctgggggagctgaccgtgacagatgccacccctgactccctcagcctgtcctggacagttcccgagggacagtttgaccacttcctggtccagtacaggaatggagatgggcagcccaaggcagtgagggtgccagggcacgaggaaggggtcaccatctcgggcctggagccagaccataaatacaagatgaacctgtacggcttccacggtggccagcgcatgggccctgtgtctgtcgtcggggtgacagctgcagaggaagagacccccagccccacagaacccagcatggaggccccggagcccgctgaggagccgctcctgggggagctaacagtgacaggatcctcccctgactcgctgagcctctcctggaccgtcccccagggccgcttcgactccttcaccgtgcagtacaaggacagggacgggcggccccaggtggtgcgtgttgggggcgaggagagtgaagtcaccgtggggggcctggagcctgggcgcaagtacaagatgcacctgtacggcctccacgaggggcggcgcgtgggcccagtgtctgctgtgggcgtcacggcccccgaagaggagtcccctgatgctcctcttgcaaagctgcgcctagggcagatgacagtgagagacatcacctccgactccctcagcctctcctggacagtccccgagggccagtttgaccatttcttggtccagtttaagaatggggacgggcagcccaaggcggtgcgggtgccgggacacgaggatggggtcaccatctcgggcctggagccagaccacaagtacaagatgaacctgtacggcttccacggtggccagcgcgtgggccccgtgtctgctgttggtttaactgccccaggaaaggatgaagaaatggccccagcctcgacagaacctcccacccctgaaccccccatcaagcctcgcctggaggagctgaccgtgacagatgcgacccctgactccctcagcctgtcctggacggttcccgagggacagtttgaccacttcctggtccagtacaagaatggggatgggcagcccaaggcaacacgggtgccaggacatgaggacagggtcaccatctccggcctggagccagacaacaagtacaagatgaacctgtacggcttccacggtggccagcgtgtgggccccgtgtctgccatcggggtgacagctgcagaggaagagacccccagccccacagaacccagcatggaggccccggagccccctgaggagccgctcctgggggagctaacagtgacaggatcctcccctgactcgctgagcctctcctggaccgtcccccagggccgcttcgactccttcaccgtgcagtacaaggacagggacgggcggccccaggtggtgcgtgttgggggcgaggagagcgaggtcaccgtggggggcctggagcctgggcgcaaatacaagatgcacctgtacggcctccacgaggggcggcgtgtgggcccggtgtccaccgtgggcgtgactgccccacaagaggatgtggacgagacccccagccctacagaaccaggcacagaggccccagagccccccgaggagcctctcctgggggagctgacagtgacaggatcctcccctgactcgctgagcctttcctggaccgtcccccagggccgctttgactccttcaccgtgcagtacaaggacagggacgggcggccccaggcggtgcgtgttgggggccaggagagcaaggtcactgtgaggggcctggagcctgggcgcaagtacaagatgcacctgtacggcctccacgaggggcggcgcctaggcccggtgtctgccgtgggcgtcacagaggatgaagccgagaccacccaagcagtgcctaccatgacccctgagccccccatcaagcctcgcctgggggagctgaccatgacagatgccacccctgactccctcagcctgtcctggacggttcccgagggccagtttgaccacttcctggtccagtacaggaatggggatgggcagcccaaggcggtgcgggtgccggggcacgaggacggggtcaccatctcaggcctggagccagaccataaatacaagatgaacctgtacggcttccacggtggccagcgcgtgggccccatctctgtcattggggtgacggaggaagagacccccagccccacggaactcagcactgaggcccnggagccccctgaggagccgctcctgggggagctgacagtgacaggatcctcccctgactcgctgagcctctcctggaccatcccccagggccacttcgactccttcaccgtgcagtacaaggacagggacgggcggccccaggtgatgcgtgtcaggggcgaggagagcgaggtcaccgtggggggcctggagcccgggcgcaaatacaagatgcacctgtacggcctccacgaggggcggcgtgtgggcccggtgtccaccgtgggtgtgacagtgcccaccacaacccctgagccccccaacaagcctcgcctcggggagctgaccgtgacagatgccacccctgactccctcagcctgtcctggatggtccccgagggccagtttgaccacttcctggtccagtacaggaatggggatgggcagcccaaggtggtgcgggtgccggggcacgaggacggggtcaccatctcaggcctggagccagaccacaagtacaagatgaacctgtacggcttccacggtggccagcgcgtgggccccatctctgtcattggggtgacagaggaagaaactcccgcccccacagaacccagcacggaggccccggagccccctgaggagccgctcctgggggagctgacagtgacaggatcctcccctgactcgctgagcctctcctggaccatcccccagggccgcttcgactccttcactgtgcagtacaaggacagggacgggcggccccaggtggtgcgtgtcaggggcgaggagagcgaggtcaccgtggggggcctggagcccgggtgcaaatacaagatgcacctgtacggcctccacgaggggcagcgcgtgggcccagtgtccgctgtgggtgtgacagctccaaaggatgaagccgagaccacccaagcagtgcctaccatgacccctgagccccccatcaagcctcgcctgggggagctgaccgtgacagatgccacccccgactccctcagcctgtcctggatggttcccgagggccagtttgaccacttcctggtccagtacaggaatggggatgggcagcccaaggcggtgcgggtgccggggcacgaggacggggtcaccatctcaggcctggagccagaccataaatacaagatgaacctgtacggcttccacggtggccagcgcgtaggccctgtgtctgccattggggtgacggaggaagagacccccagccccacagaacccagcactgaggccccggaggcccctgaggagccgctcctgggggagttgacagtgacaggatcctcccctgactcgctgagcctctcctggaccgtcccccagggccgcttcgactccttcaccgtgcagtacaaggacagggacgggcagccccaggtggtgcgtgtcaggggcgaggagagcgaggtcaccgtggggggcctggagcccgggcgcaaatacaagatgcatctgtacggcctccacgaggggcagcgcgtgggcccagtgtccaccgtgggcatcacggcgcccctgcccacaccactgccggtggagccccgcctgggggagctggcggtggcggccgtgacctcggactcagtgggcctctcatggacggtggcccagggcccctttgactccttcctggtacagtacagggacgcgcaggggcagccccaggcagtgcctgtgagcggagacctccgagcggtcgccgtctcggggctggacccggcccgcaagtacaagttcctgctctttggactccagaatgggaaacgccacggcccagtccctgtggaggccaggaccgccccagacaccaaaccgtctccccgcctgggggagctgactgtgacagatgcgacccctgactccgtgggcctctcgtggacggtccctgagggcgaattcgactccttcgtggtccagtacaaggataaggatggtcggctccaggtggtgccggtggcagccaaccagcgggaggtcacagtccagggcctggagcccagtaggaaatacaggttcctgctctatggtctgtcaggcaggaaacgactgggccccatctctgctgacagcaccacagctcccctggagaaggagctacctccccacctgggggaactgaccgtggctgaggagacctccagctctctgcgcctgtcctggacggtagcccagggcccctttgactccttcgtggtccagtacagggacacggacgggcagcccagggcagtgcctgtggccgcagaccagcgcacagtcaccgtagaggacctggagcctggcaagaaatacaagtttctgctctacgggctccttgggggaaagcgcctgggcccggtctctgccctgggaatgacagccccagaagaggacacaccagccccagagttagccccagaggcccctgagcctcctgaagagccccgcctaggagtgctgaccgtgaccgacacaaccccagactccatgcgcctctcgtggagcgtggcccagggcccctttgattccttcgtggtccagtatgaggacacgaacgggcagccccaggccttgctcgtggacggcgaccagagcaagatcctcatctcaggcctggagcccagcaccccctacaggttcctcctctatggcctccatgaagggaagcgcctggggcccctctcagctgagggcaccacagggctggctcctgctggtcagacctcagaggagtcaaggccccgcctgtcccagctgtctgtgactgacgtgaccaccagttcactgaggctcaactgggaggccccaccgggggccttcgactccttcctgctccgctttggggttccatcaccaagcactctggagccgcatccgcgtccactgctgcagcgcgagctgatggtgccggggacgcggcactcggccgtgctccgggacctgcgttccgggactctgtacagcctgacactgtatgggctgcgaggaccccacaaggccgacagcatccagggaaccgcccgcaccctcagcccagttctggagagcccccgtgacctccaattcagtgaaatcagggagacctcagccaaggtcaactggatgcccccaccatcccgggcggacagcttcaaagtctcctaccagctggcggacggaggggagcctcagagtgtgcaggtggatggccaggcccggacccagaaactccaggggctgatcccaggcgctcgctatgaggtgaccgtggtctcggtccgaggctttgaggagagtgagcctctcacaggcttcctcaccacggttcctgacggtcccacacagttgcgtgcactgaacttgaccgagggattcgccgtgctgcactggaagcccccccagaatcctgtggacacctatgacgtccaggtcacagcccctggggccccgcctctgcaggcggagaccccaggcagcgcggtggactaccccctgcatgaccttgtcctccacaccaactacaccgccacagtgcgtggcctgcggggccccaacctcacttccccagccagcatcaccttcaccacagggctagaggcccctcgggacttggaggccaaggaagtgaccccccgcaccgccctgctcacttggactgagcccccagtccggcccgcaggctacctgctcagcttccacacccctggtggacagaaccaggagatcctgctcccaggagggatcacatctcaccagctccttggcctctttccctccacctcctacaatgcacggctccaggccatgtggggccagagcctcctgccgcccgtgtccacctctttcaccacgggtgggctgcggatccccttccccagggactgcggggaggagatgcagaacggagccggtgcctccaggaccagcaccatcttcctcaacggcaaccgcgagcggcccctgaacgtgttttgcgacatggagactgatgggggcggctggctggtgttccagcgccgcatggatggacagacagacttctggagggactgggaggactatgcccatggttttgggaacatctctggagagttctggctgggcaatgaggccctgcacagcctgacacaggcaggtgactactccatgcgcgtggacctgcgggctggggacgaggctgtgttcgcccagtacgactccttccacgtagactcggctgcggagtactaccgcctccacttggagggctaccacggcaccgcaggggactccatgagctaccacagcggcagtgtcttctctgcccgtgatcgggaccccaacagcttgctcatctcctactaccggggacggaaaaaaaaccccgagggggcctgagagggacaaggaaaacaggccaacctaagggccaaacactaaaacgggacaaataacggagaagcacaagagggaacc

SEQ ID NO: 375583 - DNA, 5629 bp, Homo sapiens
  misc_feature (713)..(713): n is a, c, g, or t
ggtcctccccttctcctcccctgctcgctgcagactccctcctcactgtcgctgccgagatccacagtcggttgtggctcagcccctgttgcaggggacaagtgagggagacttccctgtcctgccctgagacgccgccctcccggggttggggacagagcaggtgcagaggcactgcagctgctcggttgcccagcctcctgaatgatgccagcccagtatgctctaacctccagcctggttctcctggtgctgctgagcacagccagagcaggccccttctcttcacggtccaatgtgacactgccagccccccggccccctccccagccagggggccacacagtgggggctggagtgggaagcccctcttctcagctttacgagcacacagtggaaggaggggagaagcaggtggtattcacccaccgcattaacctgcccccttccactggctgtggctgtcccccaggcaccgagcccccagtccttgcttcagaggtacaggccctgagggtccgtctagagatcctggaggagttggtgaaggggctcaaggaacagtgcactgggggatgttgtcctgcctctgcccaagctggcacaggtgagcaggtgatcacagaagagggtggagaggtggggtggggtgggcattgctagtccataaaggtccttggtatgaattagaagaaggcactccttcctcaccntgaggggtgtggatgcagcccagaacacaacttggagagcagagctgggctacatgtcaaccaaagcatatgcgagggccctgagaggctgcatacattacacatactagcaactgggagcagacatggccttatgagatgaggctagcctggctaggggcctgacataggagcactacataggctcagcctctctcccaggagagagactgagacttgcctctcccctcctactccaggtcagacagatgtgcggaccctctgcagtctccatggtgtgtttgatctgagccgctgcacctgttcctgtgagccaggctggggtgggcccacctgctcagaccccacagatgctgagatccctccctcttccccaccctcagcctcggggtcctgcccagatgactgcaatgatcagggtcgctgtgtccgtggtcgttgcgtgtgctttcccggctacactggccccagctgtggctggccatcctgtcccggggactgccaaggccgtgggcgctgcgtgcagggcgtgtgtgtgtgccgggcaggcttctcaggccccgactgcagccagcgctcctgccctcgaggttgcagccagaggggacgctgtgagggtgggcgctgcgtgtgtgacccaggctacactggtgacgactgtggcatgaggagctgccctcgcggttgcagtcagagggggcgctgtgagaatgggcgctgcgtgtgtaaccccggctacactggcgaggactgtggggtgaggagctgccctcggggctgcagccagcggggacgctgcaaggacgggcgctgcgtgtgtgaccccggctacactggcgaggactgtggtacgcggagctgcccctgggactgtggcgagggcgggcgctgcgtggacggccgctgcgtgtgctggcccgggtacacaggcgaggactgcagcacgcggacatgtccgagggactgccggggccgcgggcgctgcgaggacggcgaatgcatttgcgacacgggctacagcggggacgactgcggcgtgcgcagctgccctggcgactgcaaccaaaggggccgctgcgaggacggccgctgcgtgtgctggccggggtacactggaaccgattgcggctcgcgcgcctgcccacgcgactgtagaggtcgcgggcgctgcgagaacggcgtgtgtgtttgcaatgcgggctacagcggcgaggactgcggtgtgcgcagctgtcctggggactgtcgtggccggggccgctgtgagagtggccgctgcatgtgttggccggggtacacaggccgggactgcggcacgcgcgcctgtcctggcgactgtcgcgggcgcgggcgctgcgtggatggccgctgcgtgtgcaacccgggcttcaccggtgaggactgtgggagccgtcgctgtcccggggactgccgtgggcacggcctttgcgaggatggcgtgtgcgtgtgtgacgcaggctactcaggggaagactgcagcacgcgcagctgccccgggggctgccgaggccgcggccagtgcctagatgggcggtgtgtgtgcgaggacggctactctggcgaggattgcggtgtgaggcagtgcccgaatgactgcagccagcacggcgtgtgccaggacggtgtgtgcatctgttgggaaggctacgtgagtgaggactgcagcatccgcacctgcccctccaactgccacgggaggggccgctgtgaggaagggcgctgcctgtgcgacccaggctacaccggccctacctgtgccacccgcatgtgcccggctgactgccggggacgtgggcggtgtgtgcaaggagtgtgcctgtgccacgtgggctatggcggtgaggactgcgggcaggaagagcctccagccagcgcctgccctggaggctgcgggccccgggaactgtgccgggcaggccagtgtgtgtgtgtagagggcttccgaggccctgactgtgccatccagacatgcccaggggactgccgtggccgaggagagtgtcacgatggcagctgtgtctgcaaagatgggtatgctggcgaagactgcggagaagaggtgccaaccattgagggcatgaggatgcatctcttggaggagacaacagttcggacagagtggaccccggctcctggccccgtggatgcctatgaaattcagttcatccccacgacagagggggcgagccccccattcacagcacgggttccaagctctgcctcagcctatgaccagagaggactggcccctggacaggagtaccaggtcactgtccgagcccttcgagggaccagctggggccttcctgcctccaagaccatcaccaccatgatcgatgggccccaggacctccgagtggtggctgtgacaccgacaacactggagcttggctggctgcgtccccaggctgaggtggaccgatttgtggtgtcctacgtcagtgccggcaaccagagggtgaggctggaagtgccccctgaagcagacgggacgctgctgactgacctgatgccaggcgtagaatatgtggtgactgtcacagcggagcggggccgggcagtcagctacccagcttctgtcagggccaacacagggtcctcacccttgggcctcttggggactaccgatgagcctcctccctcaggcccctcgacgacgcaaggggcccaggctcctctcctgcagcagcgcccccaggagctgggagagttgagggtgctgggcagagatgagacagggcgcctccgtgtggtctggaccgcccagcctgacacctttgcctacttccaactgcgcatgcgggtgcccgaggggccgggggcacatgaggaagtgctgccaggggacgtccgccaggctctggtgcctccaccccctcctggaaccccgtatgagctgtcacttcatggggtccctcctgggggcaagccctctgaccccatcatctaccaaggcattatggacaaggatgaggagaagcctgggaagtcctcaggcccaccacgcctgggtgagctgacggtgacagacaggacctccgactccttgctcctgcgctggacggtccccgagggcgagtttgactccttcgtgatccagtacaaagacagggacgggcagccccaggtggtgcccgtggaaggaccccagcgctcggccgtcatcacctccctggatcctggccgcaagtacaaatttgtcctgtatgggtttgttggcaagaagaggcatggtccgctggtggctgaagccaagatcttgcctcagagtgacccaagtccagggactccaccccgcctgggaaacctgtgggtgacagaccctaccccagattcactgcacctctcctggactgtccctgagggccagtttgacaccttcatggtccagtacagggacagggatggacggccccaggtggtacctgtggaagggcccgagcgttcatttgttgtctcctcactggaccctgaccacaagtacagattcactctgtttggaattgcgaacaagaagcggtatggccccctcacggccgatggcaccactgctccagagaggaaagaggagcccccccgccctgagttcctggagcagcccctcctgggggaactgacagtgaccggcgtgaccccagactccttgcgtctctcatggacagtggcccagggccccttcgactcattcatggtccagtacaaggatgcacaggggcagccccaggcagtgcctgttgcgggggatgagaatgaggttactgtccccggcctggatcccgaccggaagtataagatgaacctctacgggcttcgtggcaggcagcgtgtggggcccgagtctgtggtggccaagactgctcctcaggaggatgtggacgagacccccagccccacagaactgggcacggaggccccggagtcccccgaggagccgctcctgggggagctgacagtgacaggatcctcccctgattcgctgagcctcttctggaccgtcccccagggcagcttcgactctttcaccgtgcagtacaaggacagggatgggcggccccgggcggtgcgtgttgggggcaaggagagtgaggtcaccgtgggaggcctagagcccgggcacaagtacaagatgcacctgtacggcctccacgaggggcagcgcgtgggcccggtgtccgccgtgggcgtgacagccccacaacaagaagagacccctccagccactgagtccccgctggagccacgcctaggagagctgacagtgacagatgtgacccccaactctgtgggcctctcctggacagtccccgagggccagtttgactccttcatagtccagtacaaggacaaggacgggcagccccaggtggtgccggtggcggcagaccagcgagaggtcacagtctacaacctggagcctgagagaaaatataagatgaacatgtatggactacatgatgggcaacgcatgggccccctgtctgtggtcatcgtgacggctcccctcccaccagccccagccacagaggcctccaagcctcccctggagccacgcctaggggagctgacagtgacggatataacccctgactctgtgggcctctcatggacagtccctgagggtgaattcgactcctttgtggttcagtacaaggacagggacgggcagccccaggtggtgcccgtggctgcagatcagcgggaggtcactatccctgacctggaaccctcccgcaagtacaagttcctgctctttgggatccaggatgggaaacgacgcagcccagtctctgtggaggcaaagacgggtgagatgggcccctacacagctgagcctgaggccacagccttcccacccttctcttcactccctctgctgagtcttccctttgtccacc

SEQ ID NO: 375584 - DNA, 235 bp, Homo sapiens
cctcgggacttggaggccaaggaagtgaccccccgcaccgccctgctcacttggactgagcccccagtccggcccgcaggctacctgctcagcttccacacccctggtggacagaaccaggtgccccggccccactgacccaactcccctccctgggtgattccaggaggtgctgcctctggccctcccggagggtctccacctccctctcccctgacccccccttgtctgtccc

SEQ ID NO: 375585 - DNA, 711 bp, Homo sapiens
caaccatgttctttgtcttcccaaatcccagctcccctcccaccagccccagccacagaggcctccaagcctcccctggagccacgcctaggggagctgacagtgacggatataacccctgactctgtgggcctctcatggacagtccctgagggtgaattcgactcctttgtggttcagtacaaggacagggacgggcagccccaggtggtgcccgtggctgcagatcagcgggaggtcactatccctgacctggaaccctcccgcaagtacaagttcctgctctttgggatccaggatgggaaacgacgcagcccagtctctgtggaggcaaagacgggtgagatgggcccctacacagctgagcctgaggccacagccttcccacccttctcttcactccctctgctgagtcttccctttgtccacctgctctgtctcatttgaaaagccacatggggctagcacagtgactcatgcctgtaatcccagcactttgggagtccaaggcaggtcaggagtttgagaccagtctggccaacatggcaaaaccctgtctctactaaaaagacaaaaattagctgggtgtggtgatgggtgctagtaattccagctactcgggagtctgaggcacaagaatcacttgaacccaggaggtggaggctgcagggagctgagattgcgccactgcactccagcctgggtgataga

SEQ ID NO: 375586 - DNA, 13290 bp, Homo sapiens
  misc_feature (8591)..(8591): n is a, c, g, or t
ggtcctccccttctcctcccctgctcgctgcagactccctcctcactgtcgctgccgagatccacagtcggttgtggctcagcccctgttgcaggggacaagtgagggagacttccctgtcctgccctgagacgccgccctcccggggttggggacagagcaggtgcagaggcactgcagctgctcggttgcccagcctcctgaatgatgccagcccagtatgctctaacctccagcctggttctcctggtgctgctgagcacagccagagcaggccccttctcttcacggtccaatgtgacactgccagccccccggccccctccccagccagggggccacacagtgggggctggagtgggaagcccctcttctcagctttacgagcacacagtggaaggaggggagaagcaggtggtattcacccaccgcattaacctgcccccttccactggctgtggctgtcccccaggcaccgagcccccagtccttgcttcagaggtacaggccctgagggtccgtctagagatcctggaggagttggtgaaggggctcaaggaacagtgcactgggggatgttgtcctgcctctgcccaagctggcacaggtcagacagatgtgcggaccctctgcagtctccatggtgtgtttgatctgagccgctgcacctgttcctgtgagccaggctggggtgggcccacctgctcagaccccacagatgctgagatccctccctcttccccaccctcagcctcggggtcctgcccagatgactgcaatgatcagggtcgctgtgtccgtggtcgttgcgtgtgctttcccggctacactggccccagctgtggctggccatcctgtcccggggactgccaaggccgtgggcgctgcgtgcagggcgtgtgtgtgtgccgggcaggcttctcaggccccgactgcagccagcgctcctgccctcgaggttgcagccagaggggacgctgtgagggtgggcgctgcgtgtgtgacccaggctacactggtgacgactgtggcatgaggagctgccctcgcggttgcagtcagagggggcgctgtgagaatgggcgctgcgtgtgtaaccccggctacactggcgaggactgtggggtgaggagctgccctcggggctgcagccagcggggacgctgcaaggacgggcgctgcgtgtgtgaccccggctacactggcgaggactgtggtacgcggagctgcccctgggactgtggcgagggcgggcgctgcgtggacggccgctgcgtgtgctggcccgggtacacaggcgaggactgcagcacgcggacatgtccgagggactgccggggccgcgggcgctgcgaggacggcgaatgcatttgcgacacgggctacagcggggacgactgcggcgtgcgcagctgccctggcgactgcaaccaaaggggccgctgcgaggacggccgctgcgtgtgctggccggggtacactggaaccgattgcggctcgcgcgcctgcccacgcgactgtagaggtcgcgggcgctgcgagaacggcgtgtgtgtttgcaatgcgggctacagcggcgaggactgcggtgtgcgcagctgtcctggggactgtcgtggccggggccgctgtgagagtggccgctgcatgtgttggccggggtacacaggccgggactgcggcacgcgcgcctgtcctggcgactgtcgcgggcgcgggcgctgcgtggatggccgctgcgtgtgcaacccgggcttcaccggtgaggactgtgggagccgtcgctgtcccggggactgccgtgggcacggcctttgcgaggatggcgtgtgcgtgtgtgacgcaggctactcaggggaagactgcagcacgcgcagctgccccgggggctgccgaggccgcggccagtgcctagatgggcggtgtgtgtgcgaggacggctactctggcgaggattgcggtgtgaggcagtgcccgaatgactgcagccagcacggcgtgtgccaggacggtgtgtgcatctgttgggaaggctacgtgagtgaggactgcagcatccgcacctgcccctccaactgccacgggaggggccgctgtgaggaagggcgctgcctgtgcgacccaggctacaccggccctacctgtgccacccgcatgtgcccggctgactgccggggacgtgggcggtgtgtgcaaggagtgtgcctgtgccacgtgggctatggcggtgaggactgcgggcaggaagagcctccagccagcgcctgccctggaggctgcgggccccgggaactgtgccgggcaggccagtgtgtgtgtgtagagggcttccgaggccctgactgtgccatccagacatgcccaggggactgccgtggccgaggagagtgtcacgatggcagctgtgtctgcaaagatgggtatgctggcgaagactgcggagaagcacgggttccaagctctgcctcagcctatgaccagagaggactggcccctggacaggagtaccaggtcactgtccgagcccttcgagggaccagctggggccttcctgcctccaagaccatcaccaccatgatcgatgggccccaggacctccgagtggtggctgtgacaccgacaacactggagcttggctggctgcgtccccaggctgaggtggaccgatttgtggtgtcctacgtcagtgccggcaaccagagggtgaggctggaagtgccccctgaagcagacgggacgctgctgactgacctgatgccaggcgtagaatatgtggtgactgtcacagcggagcggggccgggcagtcagctacccagcttctgtcagggccaacacagaggaaagggaggaggagtccccgcccaggccaagcctgtcccagcccccacggcggccttggggcaacctgacggccgagctgagccgtttccgcggcacggtgcaggacctggagcgccacctgcgggctcacggctacccactgcgggccaaccagacttacacgtcggtggcgcgccacatccatgaatacttgcagcggcaggtgctgggcagttccgccgatggcgcgcttctcgtgtctctcgacgggctccgcggccagttcgagcgcgtggtgctgcgctggcggcctcagccgcctgcagagggccccggcggtgagctgactgtgccgggcaccacgcgcaccgtcagcctgcccgacctcaggcccggcaccacctaccacgtggaggtccacggggtgcgggcggggcagacctccaagtcctacgccttcatcaccaccacaggcccctcgacgacgcaaggggcccaggctcctctcctgcagcagcgcccccaggagctgggagagttgagggtgctgggcagagatgagacagggcgcctccgtgtggtctggaccgcccagcctgacacctttgcctacttccaactgcgcatgcgggtgcccgaggggccgggggcacatgaggaagtgctgccaggggacgtccgccaggctctggtgcctccaccccctcctggaaccccgtatgagctgtcacttcatggggtccctcctgggggcaagccctctgaccccatcatctaccaaggcattatggacaaggatgaggagaagcctgggaagtcctcaggcccaccacgcctgggtgagctgacggtgacagacaggacctccgactccttgctcctgcgctggacggtccccgagggcgagtttgactccttcgtgatccagtacaaagacagggacgggcagccccaggtggtgcccgtggaaggaccccagcgctcggccgtcatcacctccctggatcctggccgcaagtacaaatttgtcctgtatgggtttgttggcaagaagaggcatggtccgctggtggctgaagccaagatcttgcctcagagtgacccaagtccagggactccaccccgcctgggaaacctgtgggtgacagaccctaccccagattcactgcacctctcctggactgtccctgagggccagtttgacaccttcatggtccagtacagggacagggatggacggccccaggtggtacctgtggaagggcccgagcgttcatttgttgtctcctcactggaccctgaccacaagtacagattcactctgtttggaattgcgaacaagaagcggtatggccccctcacggccgatggcaccactgctccagagaggaaagaggagcccccccgccctgagttcctggagcagcccctcctgggggaactgacagtgaccggcgtgaccccagactccttgcgtctctcatggacagtggcccagggccccttcgactcattcatggtccagtacaaggatgcacaggggcagccccaggcagtgcctgttgcgggggatgagaatgaggttactgtccccggcctggatcccgaccggaagtataagatgaacctctacgggcttcgtggcaggcagcgtgtggggcccgagtctgtggtggccaagactgctcctcaggaggatgtggacgagacccccagccccacagaactgggcacggaggccccggagtcccccgaggagccgctcctgggggagctgacagtgacaggatcctcccctgattcgctgagcctcttctggaccgtcccccagggcagcttcgactctttcaccgtgcagtacaaggacagggatgggcggccccgggcggtgcgtgttgggggcaaggagagtgaggtcaccgtgggaggcctagagcccgggcacaagtacaagatgcacctgtacggcctccacgaggggcagcgcgtgggcccggtgtccgccgtgggcgtgacagccccacaacaagaagagacccctccagccactgagtccccgctggagccacgcctaggagagctgacagtgacagatgtgacccccaactctgtgggcctctcctggacagtccccgagggccagtttgactccttcatagtccagtacaaggacaaggacgggcagccccaggtggtgccggtggcggcagaccagcgagaggtcacagtctacaacctggagcctgagagaaaatataagatgaacatgtatggactacatgatgggcaacgcatgggccccctgtctgtggtcatcgtgacggctcccctcccaccagccccagccacagaggcctccaagcctcccctggagccacgcctaggggagctgacagtgacggatataacccctgactctgtgggcctctcatggacagtccctgagggtgaattcgactcctttgtggttcagtacaaggacagggacgggcagccccaggtggtgcccgtggctgcagatcagcgggaggtcactatccctgacctggaaccctcccgcaagtacaagttcctgctctttgggatccaggatgggaaacgacgcagcccagtctctgtggaggcaaagacggttgcccgaggtgacgccagcccaggggccccaccccgccttggggagctgtgggtgacagaccccaccccagactcactgcgcctctcctggacggttcctgagggccagttcgactcttttgtggtccagttcaaggacaaagacgggccccaggtggtgcccgtggagggccatgagcgctctgtcactgtcacccctctggatgccggccgcaagtacagattcctcctctatggcctcctgggcaagaagcgccatggccctctcactgccgacggcaccacggaagcccggagtgctatggatgatactggaacaaagcgtcccccaaaaccccgtctgggggaggagctgcaggtgaccaccgtgacccagaactccgtgggcctctcctggacagtccctgagggccagtttgactcctttgtggtccagtacaaagacagggacgggcagccccaggtggtgcccgtggagggcagcctcagggaggtcagcgtgccgggcctggaccctgcccacaggtacaagctgctgctctacgggctgcaccacggcaagcgtgtgggccccatctcggccgtcgccattactgccggcagggaagaaacggaaactgagaccacggccccgacccctccagcgcctgagccccacctcggggagttgacagtggaggaggccacgtcacacaccctgcatctctcctggatggtgactgagggagaatttgactccttcgaaatccagtacacagatagagacgggcaactccaaatggtccgcataggaggtgaccggaatgacatcaccctctctggcctggaatccgaccacagatacctggtgaccctgtatggtttcagtgatgggaagcatgtaggtcctgtccatgtcgaggccctgacagtcccggaggaggagaagccttcagaacctcccaccgcaacccccgagccccccatcaagcctcgcctgggggagctgaccgtgacagatgccacccctgactccctcagcctgtcctggacagttcccgagggacagtttgaccacttcctggtccagtacaggaatggagatgggcagcccaaggcagtgagggtgccagggcacgaggaaggggtcaccatctcgggcctggagccagaccataaatacaagatgaacctgtacggcttccacggtggccagcgcatgggccctgtgtctgtcgtcggggtgacagaacccagcatggaggccccggagcccgctgaggagccgctcctgggggagctaacagtgacaggatcctcccctgactcgctgagcctctcctggaccgtcccccagggccgcttcgactccttcaccgtgcagtacaaggacagggacgggcggccccaggtggtgcgtgttgggggcgaggagagtgaagtcaccgtggggggcctggagcctgggcgcaagtacaagatgcacctgtacggcctccacgaggggcggcgcgtgggcccagtgtctgctgtgggcgtcacggcccccgaagaggagtcccctgatgctcctcttgcaaagctgcgcctagggcagatgacagtgagagacatcacctccgactccctcagcctctcctggacagtccccgagggccagtttgaccatttcttggtccagtttaagaatggggacgggcagcccaaggcggtgcgggtgccgggacacgaggatggggtcaccatctcgggcctggagccagaccacaagtacaagatgaacctgtacggcttccacggtggccagcgcgtgggccccgtgtctgctgttggtttaactgcctcgacagaacctcccacccctgaaccccccatcaagcctcgcctggaggagctgaccgtgacagatgcgacccctgactccctcagcctgtcctggacggttcccgagggacagtttgaccacttcctggtccagtacaagaatggggatgggcagcccaaggcaacacgggtgccaggacatgaggacagggtcaccatctccggcctggagccagacaacaagtacaagatgaacctgtacggcttccacggtggccagcgtgtgggccccgtgtctgccatcggggtgacagctgcagaggaagagacccccagccccacagaacccagcatggaggccccggagccccctgaggagccgctcctgggggagctaacagtgacaggatcctcccctgactcgctgagcctctcctggaccgtcccccagggccgcttcgactccttcaccgtgcagtacaaggacagggacgggcggccccaggtggtgcgtgttgggggcgaggagagcgaggtcaccgtggggggcctggagcctgggcgcaaatacaagatgcacctgtacggcctccacgaggggcggcgtgtgggcccggtgtccaccgtgggcgtgactgccccacaagaggatgtggacgagacccccagccctacagaaccaggcacagaggccccagagccccccgaggagcctctcctgggggagctgacagtgacaggatcctcccctgactcgctgagcctttcctggaccgtcccccagggccgctttgactccttcaccgtgcagtacaaggacagggacgggcggccccaggcggtgcgtgttgggggccaggagagcaaggtcactgtgaggggcctggagcctgggcgcaagtacaagatgcacctgtacggcctccacgaggggcggcgcctaggcccggtgtctgccgtgggcgtcacagaggatgaagccgagaccacccaagcagtgcctaccatgacccctgagccccccatcaagcctcgcctgggggagctgaccatgacagatgccacccctgactccctcagcctgtcctggacggttcccgagggccagtttgaccacttcctggtccagtacaggaatggggatgggcagcccaaggcggtgcgggtgccggggcacgaggacggggtcaccatctcaggcctggagccagaccataaatacaagatgaacctgtacggcttccacggtggccagcgcgtgggccccatctctgtcattggggtgacggaggaagagacccccagccccacggaactcagcactgaggcccnggagccccctgaggagccgctcctgggggagctgacagtgacaggatcctcccctgactcgctgagcctctcctggaccatcccccagggccacttcgactccttcaccgtgcagtacaaggacagggacgggcggccccaggtgatgcgtgtcaggggcgaggagagcgaggtcaccgtggggggcctggagcccgggcgcaaatacaagatgcacctgtacggcctccacgaggggcggcgtgtgggcccggtgtccaccgtgggtgtgacagtgcccaccacaacccctgagccccccaacaagcctcgcctcggggagctgaccgtgacagatgccacccctgactccctcagcctgtcctggatggtccccgagggccagtttgaccacttcctggtccagtacaggaatggggatgggcagcccaaggtggtgcgggtgccggggcacgaggacggggtcaccatctcaggcctggagccagaccacaagtacaagatgaacctgtacggcttccacggtggccagcgcgtgggccccatctctgtcattggggtgacagaggaagaaactcccgcccccacagaacccagcacggaggccccggagccccctgaggagccgctcctgggggagctgacagtgacaggatcctcccctgactcgctgagcctctcctggaccatcccccagggccgcttcgactccttcactgtgcagtacaaggacagggacgggcggccccaggtggtgcgtgtcaggggcgaggagagcgaggtcaccgtggggggcctggagcccgggtgcaaatacaagatgcacctgtacggcctccacgaggggcagcgcgtgggcccagtgtccgctgtgggtgtgacagctccaaaggatgaagccgagaccacccaagcagtgcctaccatgacccctgagccccccatcaagcctcgcctgggggagctgaccgtgacagatgccacccccgactccctcagcctgtcctggatggttcccgagggccagtttgaccacttcctggtccagtacaggaatggggatgggcagcccaaggcggtgcgggtgccggggcacgaggacggggtcaccatctcaggcctggagccagaccataaatacaagatgaacctgtacggcttccacggtggccagcgcgtaggccctgtgtctgccattggggtgacggaggaagagacccccagccccacagaacccagcactgaggccccggaggcccctgaggagccgctcctgggggagttgacagtgacaggatcctcccctgactcgctgagcctctcctggaccgtcccccagggccgcttcgactccttcaccgtgcagtacaaggacagggacgggcagccccaggtggtgcgtgtcaggggcgaggagagcgaggtcaccgtggggggcctggagcccgggcgcaaatacaagatgcatctgtacggcctccacgaggggcagcgcgtgggcccagtgtccaccgtgggcatcacggcgcccctgcccacaccactgccggtggagccccgcctgggggagctggcggtggcggccgtgacctcggactcagtgggcctctcatggacggtggcccagggcccctttgactccttcctggtacagtacagggacgcgcaggggcagccccaggcagtgcctgtgagcggagacctccgagcggtcgccgtctcggggctggacccggcccgcaagtacaagttcctgctctttggactccagaatgggaaacgccacggcccagtccctgtggaggccaggaccgccccagacaccaaaccgtctccccgcctgggggagctgactgtgacagatgcgacccctgactccgtgggcctctcgtggacggtccctgagggcgaattcgactccttcgtggtccagtacaaggataaggatggtcggctccaggtggtgccggtggcagccaaccagcgggaggtcacagtccagggcctggagcccagtaggaaatacaggttcctgctctatggtctgtcaggcaggaaacgactgggccccatctctgctgacagcaccacagctcccctggagaaggagctacctccccacctgggggaactgaccgtggctgaggagacctccagctctctgcgcctgtcctggacggtagcccagggcccctttgactccttcgtggtccagtacagggacacggacgggcagcccagggcagtgcctgtggccgcagaccagcgcacagtcaccgtagaggacctggagcctggcaagaaatacaagtttctgctctacgggctccttgggggaaagcgcctgggcccggtctctgccctgggaatgacagccccagaagaggacacaccagccccagagttagccccagaggcccctgagcctcctgaagagccccgcctaggagtgctgaccgtgaccgacacaaccccagactccatgcgcctctcgtggagcgtggcccagggcccctttgattccttcgtggtccagtatgaggacacgaacgggcagccccaggccttgctcgtggacggcgaccagagcaagatcctcatctcaggcctggagcccagcaccccctacaggttcctcctctatggcctccatgaagggaagcgcctggggcccctctcagctgagggcaccacagggctggctcctgctggtcagacctcagaggagtcaaggccccgcctgtcccagctgtctgtgactgacgtgaccaccagttcactgaggctcaactgggaggccccaccgggggccttcgactccttcctgctccgctttggggttccatcaccaagcactctggagccgcatccgcgtccactgctgcagcgcgagctgatggtgccggggacgcggcactcggccgtgctccgggacctgcgttccgggactctgtacagcctgacactgtatgggctgcgaggaccccacaaggccgacagcatccagggaaccgcccgcaccctcagcccagttctggagagcccccgtgacctccaattcagtgaaatcagggagacctcagccaaggtcaactggatgcccccaccatcccgggcggacagcttcaaagtctcctaccagctggcggacggaggggagcctcagagtgtgcaggtggatggccaggcccggacccagaaactccaggggctgatcccaggcgctcgctatgaggtgaccgtggtctcggtccgaggctttgaggagagtgagcctctcacaggcttcctcaccacggttcctgacggtcccacacagttgcgtgcactgaacttgaccgagggattcgccgtgctgcactggaagcccccccagaatcctgtggacacctatgacgtccaggtcacagcccctggggccccgcctctgcaggcggagaccccaggcagcgcggtggactaccccctgcatgaccttgtcctccacaccaactacaccgccacagtgcgtggcctgcggggccccaacctcacttccccagccagcatcaccttcaccacagggctagaggcccctcgggacttggaggccaaggaagtgaccccccgcaccgccctgctcacttggactgagcccccagtccggcccgcaggctacctgctcagcttccacacccctggtggacagaaccaggagatcctgctcccaggagggatcacatctcaccagctccttggcctctttccctccacctcctacaatgcacggctccaggccatgtggggccagagcctcctgccgcccgtgtccacctctttcaccacgggtgggctgcggatccccttccccagggactgcggggaggagatgcagaacggagccggtgcctccaggaccagcaccatcttcctcaacggcaaccgcgagcggcccctgaacgtgttttgcgacatggagactgatgggggcggctggctggtgttccagcgccgcatggatggacagacagacttctggagggactgggaggactatgcccatggttttgggaacatctctggagagttctggctgggcaatgaggccctgcacagcctgacacaggcaggtgactactccatgcgcgtggacctgcgggctggggacgaggctgtgttcgcccagtacgactccttccacgtagactcggctgcggagtactaccgcctccacttggagggctaccacggcaccgcaggggactccatgagctaccacagcggcagtgtcttctctgcccgtgatcgggaccccaacagcttgctcatctcctgcgctgtctcctaccgaggggcctggtggtacaggaactgccactacgccaacctcaacgggctctacgggagcacagtggaccatcagggagtgagctggtaccactggaagggcttcgagttctcggtgcccttcacggaaatgaagctgagaccaagaaactttcgctccccagcggggggaggctgagctgctgcccacctctctcgcaccccagtatgactgccgagcactgaggggtcgccccgagagaagagccagggtccttcaccacccagccgctggaggaagccttctctgccagcgatctcgcagcactgtgtttacaggggggaggggaggggttcgtacgggagcaataaaggagaaactgaggtacccgga

SEQ ID NO: 375587 - DNA, 439 bp, Homo sapiens
cctgccgcccgtgtccacctctctcaccagctccttggcctctttccctccacgcgctgtctcctaccgaggggcctggtggtacaggaactgccactacgccaacctcaacgggctctacgggagcacagtggaccatcagggagtgagctggtaccactggaagggcttcgagttctcggtgcccttcacggaaatgaagctgagaccaagaaactttcgctccccagcggggggaggctgagctgctgcccacctctctcgcaccccagtatgactgccgagcactgaggggtcgccccgagagaagagccagggtccttcaccacccagccgctggaggaagccttctctgccagcgatctcgcagcactgtgtttacaggggggaggggaggggttcgtacgggagcaataaaggagaaactgaggtacccgga

SEQ ID NO: 375588 - DNA, 9775 bp, Homo sapiens
  misc_feature (5076)..(5076): n is a, c, g, or t
gagatgtgaaagggcctggctgggctcccctctttctgaagctccctgctgctctggtttgtggttggaggcagagccacactagtccacgcagtgcttccatgccgtttgaaagaaggcacccattccttaaagtggacaccactcctcaccagggcacacagctcggcaagcagagtgctggctggatttcagtccctctgtactccctcagcaaatgcacttttgtgcagtgaacaacctgcacagcctcacacagcattcctatgtgggatttggcttccccattctccttggacctaagtctctcccttctctctacccactcttcctagtgcctcagagtgacccaagtccagggactccaccccgcctgggaaacctgtgggtgacagaccctaccccagattcactgcacctctcctggactgtccctgagggccagtttgacaccttcatggtccagtacagggacagggatggacggccccaggtggtacctgtggaagggcccgagcgttcatttgttgtctcctcactggaccctgaccacaagtacagattcactctgtttggaattgcgaacaagaagcggtatggccccctcacggccgatggcaccactgctccagagaggaaagaggagcccccccgccctgagttcctggagcagcccctcctgggggaactgacagtgaccggcgtgaccccagactccttgcgtctctcatggacagtggcccagggccccttcgactcattcatggtccagtacaaggatgcacaggggcagccccaggcagtgcctgttgcgggggatgagaatgaggttactgtccccggcctggatcccgaccggaagtataagatgaacctctacgggcttcgtggcaggcagcgtgtggggcccgagtctgtggtggccaagactgctcctcaggaggatgtggacgagacccccagccccacagaactgggcacggaggccccggagtcccccgaggagccgctcctgggggagctgacagtgacaggatcctcccctgattcgctgagcctcttctggaccgtcccccagggcagcttcgactctttcaccgtgcagtacaaggacagggatgggcggccccgggcggtgcgtgttgggggcaaggagagtgaggtcaccgtgggaggcctagagcccgggcacaagtacaagatgcacctgtacggcctccacgaggggcagcgcgtgggcccggtgtccgccgtgggcgtgacagccccacaacaagaagagacccctccagccactgagtccccgctggagccacgcctaggagagctgacagtgacagatgtgacccccaactctgtgggcctctcctggacagtccccgagggccagtttgactccttcatagtccagtacaaggacaaggacgggcagccccaggtggtgccggtggcggcagaccagcgagaggtcacagtctacaacctggagcctgagagaaaatataagatgaacatgtatggactacatgatgggcaacgcatgggccccctgtctgtggtcatcgtgacggctcccctcccaccagccccagccacagaggcctccaagcctcccctggagccacgcctaggggagctgacagtgacggatataacccctgactctgtgggcctctcatggacagtccctgagggtgaattcgactcctttgtggttcagtacaaggacagggacgggcagccccaggtggtgcccgtggctgcagatcagcgggaggtcactatccctgacctggaaccctcccgcaagtacaagttcctgctctttgggatccaggatgggaaacgacgcagcccagtctctgtggaggcaaagacggttgcccgaggtgacgccagcccaggggccccaccccgccttggggagctgtgggtgacagaccccaccccagactcactgcgcctctcctggacggttcctgagggccagttcgactcttttgtggtccagttcaaggacaaagacgggccccaggtggtgcccgtggagggccatgagcgctctgtcactgtcacccctctggatgccggccgcaagtacagattcctcctctatggcctcctgggcaagaagcgccatggccctctcactgccgacggcaccacggaagcccggagtgctatggatgatactggaacaaagcgtcccccaaaaccccgtctgggggaggagctgcaggtgaccaccgtgacccagaactccgtgggcctctcctggacagtccctgagggccagtttgactcctttgtggtccagtacaaagacagggacgggcagccccaggtggtgcccgtggagggcagcctcagggaggtcagcgtgccgggcctggaccctgcccacaggtacaagctgctgctctacgggctgcaccacggcaagcgtgtgggccccatctcggccgtcgccattactgccggcagggaagaaacggaaactgagaccacggccccgacccctccagcgcctgagccccacctcggggagttgacagtggaggaggccacgtcacacaccctgcatctctcctggatggtgactgagggagaatttgactccttcgaaatccagtacacagatagagacgggcaactccaaatggtccgcataggaggtgaccggaatgacatcaccctctctggcctggaatccgaccacagatacctggtgaccctgtatggtttcagtgatgggaagcatgtaggtcctgtccatgtcgaggccctgacagtcccggaggaggagaagccttcagaacctcccaccgcaacccccgagccccccatcaagcctcgcctgggggagctgaccgtgacagatgccacccctgactccctcagcctgtcctggacagttcccgagggacagtttgaccacttcctggtccagtacaggaatggagatgggcagcccaaggcagtgagggtgccagggcacgaggaaggggtcaccatctcgggcctggagccagaccataaatacaagatgaacctgtacggcttccacggtggccagcgcatgggccctgtgtctgtcgtcggggtgacagctgcagaggaagagacccccagccccacagaacccagcatggaggccccggagcccgctgaggagccgctcctgggggagctaacagtgacaggatcctcccctgactcgctgagcctctcctggaccgtcccccagggccgcttcgactccttcaccgtgcagtacaaggacagggacgggcggccccaggtggtgcgtgttgggggcgaggagagtgaagtcaccgtggggggcctggagcctgggcgcaagtacaagatgcacctgtacggcctccacgaggggcggcgcgtgggcccagtgtctgctgtgggcgtcacggcccccgaagaggagtcccctgatgctcctcttgcaaagctgcgcctagggcagatgacagtgagagacatcacctccgactccctcagcctctcctggacagtccccgagggccagtttgaccatttcttggtccagtttaagaatggggacgggcagcccaaggcggtgcgggtgccgggacacgaggatggggtcaccatctcgggcctggagccagaccacaagtacaagatgaacctgtacggcttccacggtggccagcgcgtgggccccgtgtctgctgttggtttaactgccccaggaaaggatgaagaaatggccccagcctcgacagaacctcccacccctgaaccccccatcaagcctcgcctggaggagctgaccgtgacagatgcgacccctgactccctcagcctgtcctggacggttcccgagggacagtttgaccacttcctggtccagtacaagaatggggatgggcagcccaaggcaacacgggtgccaggacatgaggacagggtcaccatctccggcctggagccagacaacaagtacaagatgaacctgtacggcttccacggtggccagcgtgtgggccccgtgtctgccatcggggtgacagctgcagaggaagagacccccagccccacagaacccagcatggaggccccggagccccctgaggagccgctcctgggggagctaacagtgacaggatcctcccctgactcgctgagcctctcctggaccgtcccccagggccgcttcgactccttcaccgtgcagtacaaggacagggacgggcggccccaggtggtgcgtgttgggggcgaggagagcgaggtcaccgtggggggcctggagcctgggcgcaaatacaagatgcacctgtacggcctccacgaggggcggcgtgtgggcccggtgtccaccgtgggcgtgactgccccacaagaggatgtggacgagacccccagccctacagaaccaggcacagaggccccagagccccccgaggagcctctcctgggggagctgacagtgacaggatcctcccctgactcgctgagcctttcctggaccgtcccccagggccgctttgactccttcaccgtgcagtacaaggacagggacgggcggccccaggcggtgcgtgttgggggccaggagagcaaggtcactgtgaggggcctggagcctgggcgcaagtacaagatgcacctgtacggcctccacgaggggcggcgcctaggcccggtgtctgccgtgggcgtcacagaggatgaagccgagaccacccaagcagtgcctaccatgacccctgagccccccatcaagcctcgcctgggggagctgaccatgacagatgccacccctgactccctcagcctgtcctggacggttcccgagggccagtttgaccacttcctggtccagtacaggaatggggatgggcagcccaaggcggtgcgggtgccggggcacgaggacggggtcaccatctcaggcctggagccagaccataaatacaagatgaacctgtacggcttccacggtggccagcgcgtgggccccatctctgtcattggggtgacggaggaagagacccccagccccacggaactcagcactgaggcccnggagccccctgaggagccgctcctgggggagctgacagtgacaggatcctcccctgactcgctgagcctctcctggaccatcccccagggccacttcgactccttcaccgtgcagtacaaggacagggacgggcggccccaggtgatgcgtgtcaggggcgaggagagcgaggtcaccgtggggggcctggagcccgggcgcaaatacaagatgcacctgtacggcctccacgaggggcggcgtgtgggcccggtgtccaccgtgggtgtgacagtgcccaccacaacccctgagccccccaacaagcctcgcctcggggagctgaccgtgacagatgccacccctgactccctcagcctgtcctggatggtccccgagggccagtttgaccacttcctggtccagtacaggaatggggatgggcagcccaaggtggtgcgggtgccggggcacgaggacggggtcaccatctcaggcctggagccagaccacaagtacaagatgaacctgtacggcttccacggtggccagcgcgtgggccccatctctgtcattggggtgacagaggaagaaactcccgcccccacagaacccagcacggaggccccggagccccctgaggagccgctcctgggggagctgacagtgacaggatcctcccctgactcgctgagcctctcctggaccatcccccagggccgcttcgactccttcactgtgcagtacaaggacagggacgggcggccccaggtggtgcgtgtcaggggcgaggagagcgaggtcaccgtggggggcctggagcccgggtgcaaatacaagatgcacctgtacggcctccacgaggggcagcgcgtgggcccagtgtccgctgtgggtgtgacagctccaaaggatgaagccgagaccacccaagcagtgcctaccatgacccctgagccccccatcaagcctcgcctgggggagctgaccgtgacagatgccacccccgactccctcagcctgtcctggatggttcccgagggccagtttgaccacttcctggtccagtacaggaatggggatgggcagcccaaggcggtgcgggtgccggggcacgaggacggggtcaccatctcaggcctggagccagaccataaatacaagatgaacctgtacggcttccacggtggccagcgcgtaggccctgtgtctgccattggggtgacggaggaagagacccccagccccacagaacccagcactgaggccccggaggcccctgaggagccgctcctgggggagttgacagtgacaggatcctcccctgactcgctgagcctctcctggaccgtcccccagggccgcttcgactccttcaccgtgcagtacaaggacagggacgggcagccccaggtggtgcgtgtcaggggcgaggagagcgaggtcaccgtggggggcctggagcccgggcgcaaatacaagatgcatctgtacggcctccacgaggggcagcgcgtgggcccagtgtccaccgtgggcatcacggcgcccctgcccacaccactgccggtggagccccgcctgggggagctggcggtggcggccgtgacctcggactcagtgggcctctcatggacggtggcccagggcccctttgactccttcctggtacagtacagggacgcgcaggggcagccccaggcagtgcctgtgagcggagacctccgagcggtcgccgtctcggggctggacccggcccgcaagtacaagttcctgctctttggactccagaatgggaaacgccacggcccagtccctgtggaggccaggaccgccccagacaccaaaccgtctccccgcctgggggagctgactgtgacagatgcgacccctgactccgtgggcctctcgtggacggtccctgagggcgaattcgactccttcgtggtccagtacaaggataaggatggtcggctccaggtggtgccggtggcagccaaccagcgggaggtcacagtccagggcctggagcccagtaggaaatacaggttcctgctctatggtctgtcaggcaggaaacgactgggccccatctctgctgacagcaccacagctcccctggagaaggagctacctccccacctgggggaactgaccgtggctgaggagacctccagctctctgcgcctgtcctggacggtagcccagggcccctttgactccttcgtggtccagtacagggacacggacgggcagcccagggcagtgcctgtggccgcagaccagcgcacagtcaccgtagaggacctggagcctggcaagaaatacaagtttctgctctacgggctccttgggggaaagcgcctgggcccggtctctgccctgggaatgacagccccagaagaggacacaccagccccagagttagccccagaggcccctgagcctcctgaagagccccgcctaggagtgctgaccgtgaccgacacaaccccagactccatgcgcctctcgtggagcgtggcccagggcccctttgattccttcgtggtccagtatgaggacacgaacgggcagccccaggccttgctcgtggacggcgaccagagcaagatcctcatctcaggcctggagcccagcaccccctacaggttcctcctctatggcctccatgaagggaagcgcctggggcccctctcagctgagggcaccacagggctggctcctgctggtcagacctcagaggagtcaaggccccgcctgtcccagctgtctgtgactgacgtgaccaccagttcactgaggctcaactgggaggccccaccgggggccttcgactccttcctgctccgctttggggttccatcaccaagcactctggagccgcatccgcgtccactgctgcagcgcgagctgatggtgccggggacgcggcactcggccgtgctccgggacctgcgttccgggactctgtacagcctgacactgtatgggctgcgaggaccccacaaggccgacagcatccagggaaccgcccgcaccctcagcccagttctggagagcccccgtgacctccaattcagtgaaatcagggagacctcagccaaggtcaactggatgcccccaccatcccgggcggacagcttcaaagtctcctaccagctggcggacggaggggagcctcagagtgtgcaggtggatggccaggcccggacccagaaactccaggggctgatcccaggcgctcgctatgaggtgaccgtggtctcggtccgaggctttgaggagagtgagcctctcacaggcttcctcaccacggttcctgacggtcccacacagttgcgtgcactgaacttgaccgagggattcgccgtgctgcactggaagcccccccagaatcctgtggacacctatgacgtccaggtcacagcccctggggccccgcctctgcaggcggagaccccaggcagcgcggtggactaccccctgcatgaccttgtcctccacaccaactacaccgccacagtgcgtggcctgcggggccccaacctcacttccccagccagcatcaccttcaccacagggctagaggcccctcgggacttggaggccaaggaagtgaccccccgcaccgccctgctcacttggactgagcccccagtccggcccgcaggctacctgctcagcttccacacccctggtggacagaaccaggagatcctgctcccaggagggatcacatctcaccagctccttggcctctttccctccacctcctacaatgcacggctccaggccatgtggggccagagcctcctgccgcccgtgtccacctctttcaccacgggtgggctgcggatccccttccccagggactgcggggaggagatgcagaacggagccggtgcctccaggaccagcaccatcttcctcaacggcaaccgcgagcggcccctgaacgtgttttgcgacatggagactgatgggggcggctggctggtgttccagcgccgcatggatggacagacagacttctggagggactgggaggactatgcccatggttttgggaacatctctggagagttctggctgggcaatgaggccctgcacagcctgacacaggcaggtgactactccatgcgcgtggacctgcgggctggggacgaggctgtgttcgcccagtacgactccttccacgtagactcggctgcggagtactaccgcctccacttggagggctaccacggcaccgcaggggactccatgagctaccacagcggcagtgtcttctctgcccgtgatcgggaccccaacagcttgctcatctcctgcgctgtctcctaccgaggggcctggtggtacaggaactgccactacgccaacctcaacgggctctacgggagcacagtggaccatcagggagtgagctggtaccactggaagggcttcgagttctcggtgcccttcacggaaatgaagctgagaccaagaaactttcgctccccagcggggggaggctgagctgctgcccacctctctcgcaccccagtatgactgccgagcactgaggggtcgccccgagagaagagccagggtccttcaccacccagccgctggaggaagccttctctgccagcgatctcgcagcactgtgtttacaggggggaggggaggggttcgtacgggagcaataaaggagaaactgaggtacccgga

SEQ ID NO: 375589 - DNA, 13396 bp, Homo sapiens
  misc_feature (713)..(713): n is a, c, g, or t
  misc_feature (8735)..(8735): n is a, c, g, or t
ggtcctccccttctcctcccctgctcgctgcagactccctcctcactgtcgctgccgagatccacagtcggttgtggctcagcccctgttgcaggggacaagtgagggagacttccctgtcctgccctgagacgccgccctcccggggttggggacagagcaggtgcagaggcactgcagctgctcggttgcccagcctcctgaatgatgccagcccagtatgctctaacctccagcctggttctcctggtgctgctgagcacagccagagcaggccccttctcttcacggtccaatgtgacactgccagccccccggccccctccccagccagggggccacacagtgggggctggagtgggaagcccctcttctcagctttacgagcacacagtggaaggaggggagaagcaggtggtattcacccaccgcattaacctgcccccttccactggctgtggctgtcccccaggcaccgagcccccagtccttgcttcagaggtacaggccctgagggtccgtctagagatcctggaggagttggtgaaggggctcaaggaacagtgcactgggggatgttgtcctgcctctgcccaagctggcacaggtgagcaggtgatcacagaagagggtggagaggtggggtggggtgggcattgctagtccataaaggtccttggtatgaattagaagaaggcactccttcctcaccntgaggggtgtggatgcagcccagaacacaacttggagagcagagctgggctacatgtcaaccaaagcatatgcgagggccctgagaggctgcatacattacacatactagcaactgggagcagacatggccttatgagatgaggctagcctggctaggggcctgacataggagcactacataggctcagcctctctcccaggagagagactgagacttgcctctcccctcctactccaggtcagacagatgtgcggaccctctgcagtctccatggtgtgtttgatctgagccgctgcacctgttcctgtgagccaggctggggtgggcccacctgctcagaccccacagatgctgagatccctccctcttccccaccctcagcctcggggtcctgcccagatgactgcaatgatcagggtcgctgtgtccgtggtcgttgcgtgtgctttcccggctacactggccccagctgtggctggccatcctgtcccggggactgccaaggccgtgggcgctgcgtgcagggcgtgtgtgtgtgccgggcaggcttctcaggccccgactgcagccagcgctcctgccctcgaggttgcagccagaggggacgctgtgagggtgggcgctgcgtgtgtgacccaggctacactggtgacgactgtggcatgaggagctgccctcgcggttgcagtcagagggggcgctgtgagaatgggcgctgcgtgtgtaaccccggctacactggcgaggactgtggggtgaggagctgccctcggggctgcagccagcggggacgctgcaaggacgggcgctgcgtgtgtgaccccggctacactggcgaggactgtggtacgcggagctgcccctgggactgtggcgagggcgggcgctgcgtggacggccgctgcgtgtgctggcccgggtacacaggcgaggactgcagcacgcggacatgtccgagggactgccggggccgcgggcgctgcgaggacggcgaatgcatttgcgacacgggctacagcggggacgactgcggcgtgcgcagctgccctggcgactgcaaccaaaggggccgctgcgaggacggccgctgcgtgtgctggccggggtacactggaaccgattgcggctcgcgcgcctgcccacgcgactgtagaggtcgcgggcgctgcgagaacggcgtgtgtgtttgcaatgcgggctacagcggcgaggactgcggtgtgcgcagctgtcctggggactgtcgtggccggggccgctgtgagagtggccgctgcatgtgttggccggggtacacaggccgggactgcggcacgcgcgcctgtcctggcgactgtcgcgggcgcgggcgctgcgtggatggccgctgcgtgtgcaacccgggcttcaccggtgaggactgtgggagccgtcgctgtcccggggactgccgtgggcacggcctttgcgaggatggcgtgtgcgtgtgtgacgcaggctactcaggggaagactgcagcacgcgcagctgccccgggggctgccgaggccgcggccagtgcctagatgggcggtgtgtgtgcgaggacggctactctggcgaggattgcggtgtgaggcagtgcccgaatgactgcagccagcacggcgtgtgccaggacggtgtgtgcatctgttgggaaggctacgtgagtgaggactgcagcatccgcacctgcccctccaactgccacgggaggggccgctgtgaggaagggcgctgcctgtgcgacccaggctacaccggccctacctgtgccacccgcatgtgcccggctgactgccggggacgtgggcggtgtgtgcaaggagtgtgcctgtgccacgtgggctatggcggtgaggactgcgggcaggaagagcctccagccagcgcctgccctggaggctgcgggccccgggaactgtgccgggcaggccagtgtgtgtgtgtagagggcttccgaggccctgactgtgccatccagacatgcccaggggactgccgtggccgaggagagtgtcacgatggcagctgtgtctgcaaagatgggtatgctggcgaagactgcggagaagaggtgccaaccattgagggcatgaggatgcatctcttggaggagacaacagttcggacagagtggaccccggctcctggccccgtggatgcctatgaaattcagttcatccccacgacagagggggcgagccccccattcacagcacgggttccaagctctgcctcagcctatgaccagagaggactggcccctggacaggagtaccaggtcactgtccgagcccttcgagggaccagctggggccttcctgcctccaagaccatcaccaccatgatcgatgggccccaggacctccgagtggtggctgtgacaccgacaacactggagcttggctggctgcgtccccaggctgaggtggaccgatttgtggtgtcctacgtcagtgccggcaaccagagggtgaggctggaagtgccccctgaagcagacgggacgctgctgactgacctgatgccaggcgtagaatatgtggtgactgtcacagcggagcggggccgggcagtcagctacccagcttctgtcagggccaacacagggtcctcacccttgggcctcttggggactaccgatgagcctcctccctcaggcccctcgacgacgcaaggggcccaggctcctctcctgcagcagcgcccccaggagctgggagagttgagggtgctgggcagagatgagacagggcgcctccgtgtggtctggaccgcccagcctgacacctttgcctacttccaactgcgcatgcgggtgcccgaggggccgggggcacatgaggaagtgctgccaggggacgtccgccaggctctggtgcctccaccccctcctggaaccccgtatgagctgtcacttcatggggtccctcctgggggcaagccctctgaccccatcatctaccaaggcattatggacaaggatgaggagaagcctgggaagtcctcaggcccaccacgcctgggtgagctgacggtgacagacaggacctccgactccttgctcctgcgctggacggtccccgagggcgagtttgactccttcgtgatccagtacaaagacagggacgggcagccccaggtggtgcccgtggaaggaccccagcgctcggccgtcatcacctccctggatcctggccgcaagtacaaatttgtcctgtatgggtttgttggcaagaagaggcatggtccgctggtggctgaagccaagatcttgcctcagagtgacccaagtccagggactccaccccgcctgggaaacctgtgggtgacagaccctaccccagattcactgcacctctcctggactgtccctgagggccagtttgacaccttcatggtccagtacagggacagggatggacggccccaggtggtacctgtggaagggcccgagcgttcatttgttgtctcctcactggaccctgaccacaagtacagattcactctgtttggaattgcgaacaagaagcggtatggccccctcacggccgatggcaccactgctccagagaggaaagaggagcccccccgccctgagttcctggagcagcccctcctgggggaactgacagtgaccggcgtgaccccagactccttgcgtctctcatggacagtggcccagggccccttcgactcattcatggtccagtacaaggatgcacaggggcagccccaggcagtgcctgttgcgggggatgagaatgaggttactgtccccggcctggatcccgaccggaagtataagatgaacctctacgggcttcgtggcaggcagcgtgtggggcccgagtctgtggtggccaagactgctcctcaggaggatgtggacgagacccccagccccacagaactgggcacggaggccccggagtcccccgaggagccgctcctgggggagctgacagtgacaggatcctcccctgattcgctgagcctcttctggaccgtcccccagggcagcttcgactctttcaccgtgcagtacaaggacagggatgggcggccccgggcggtgcgtgttgggggcaaggagagtgaggtcaccgtgggaggcctagagcccgggcacaagtacaagatgcacctgtacggcctccacgaggggcagcgcgtgggcccggtgtccgccgtgggcgtgacagccccacaacaagaagagacccctccagccactgagtccccgctggagccacgcctaggagagctgacagtgacagatgtgacccccaactctgtgggcctctcctggacagtccccgagggccagtttgactccttcatagtccagtacaaggacaaggacgggcagccccaggtggtgccggtggcggcagaccagcgagaggtcacagtctacaacctggagcctgagagaaaatataagatgaacatgtatggactacatgatgggcaacgcatgggccccctgtctgtggtcatcgtgacggctcccctcccaccagccccagccacagaggcctccaagcctcccctggagccacgcctaggggagctgacagtgacggatataacccctgactctgtgggcctctcatggacagtccctgagggtgaattcgactcctttgtggttcagtacaaggacagggacgggcagccccaggtggtgcccgtggctgcagatcagcgggaggtcactatccctgacctggaaccctcccgcaagtacaagttcctgctctttgggatccaggatgggaaacgacgcagcccagtctctgtggaggcaaagacggttgcccgaggtgacgccagcccaggggccccaccccgccttggggagctgtgggtgacagaccccaccccagactcactgcgcctctcctggacggttcctgagggccagttcgactcttttgtggtccagttcaaggacaaagacgggccccaggtggtgcccgtggagggccatgagcgctctgtcactgtcacccctctggatgccggccgcaagtacagattcctcctctatggcctcctgggcaagaagcgccatggccctctcactgccgacggcaccacggaagcccggagtgctatggatgatactggaacaaagcgtcccccaaaaccccgtctgggggaggagctgcaggtgaccaccgtgacccagaactccgtgggcctctcctggacagtccctgagggccagtttgactcctttgtggtccagtacaaagacagggacgggcagccccaggtggtgcccgtggagggcagcctcagggaggtcagcgtgccgggcctggaccctgcccacaggtacaagctgctgctctacgggctgcaccacggcaagcgtgtgggccccatctcggccgtcgccattactgccggcagggaagaaacggaaactgagaccacggccccgacccctccagcgcctgagccccacctcggggagttgacagtggaggaggccacgtcacacaccctgcatctctcctggatggtgactgagggagaatttgactccttcgaaatccagtacacagatagagacgggcaactccaaatggtccgcataggaggtgaccggaatgacatcaccctctctggcctggaatccgaccacagatacctggtgaccctgtatggtttcagtgatgggaagcatgtaggtcctgtccatgtcgaggccctgacagtcccggaggaggagaagccttcagaacctcccaccgcaacccccgagccccccatcaagcctcgcctgggggagctgaccgtgacagatgccacccctgactccctcagcctgtcctggacagttcccgagggacagtttgaccacttcctggtccagtacaggaatggagatgggcagcccaaggcagtgagggtgccagggcacgaggaaggggtcaccatctcgggcctggagccagaccataaatacaagatgaacctgtacggcttccacggtggccagcgcatgggccctgtgtctgtcgtcggggtgacagctgcagaggaagagacccccagccccacagaacccagcatggaggccccggagcccgctgaggagccgctcctgggggagctaacagtgacaggatcctcccctgactcgctgagcctctcctggaccgtcccccagggccgcttcgactccttcaccgtgcagtacaaggacagggacgggcggccccaggtggtgcgtgttgggggcgaggagagtgaagtcaccgtggggggcctggagcctgggcgcaagtacaagatgcacctgtacggcctccacgaggggcggcgcgtgggcccagtgtctgctgtgggcgtcacggcccccgaagaggagtcccctgatgctcctcttgcaaagctgcgcctagggcagatgacagtgagagacatcacctccgactccctcagcctctcctggacagtccccgagggccagtttgaccatttcttggtccagtttaagaatggggacgggcagcccaaggcggtgcgggtgccgggacacgaggatggggtcaccatctcgggcctggagccagaccacaagtacaagatgaacctgtacggcttccacggtggccagcgcgtgggccccgtgtctgctgttggtttaactgccccaggaaaggatgaagaaatggccccagcctcgacagaacctcccacccctgaaccccccatcaagcctcgcctggaggagctgaccgtgacagatgcgacccctgactccctcagcctgtcctggacggttcccgagggacagtttgaccacttcctggtccagtacaagaatggggatgggcagcccaaggcaacacgggtgccaggacatgaggacagggtcaccatctccggcctggagccagacaacaagtacaagatgaacctgtacggcttccacggtggccagcgtgtgggccccgtgtctgccatcggggtgacagctgcagaggaagagacccccagccccacagaacccagcatggaggccccggagccccctgaggagccgctcctgggggagctaacagtgacaggatcctcccctgactcgctgagcctctcctggaccgtcccccagggccgcttcgactccttcaccgtgcagtacaaggacagggacgggcggccccaggtggtgcgtgttgggggcgaggagagcgaggtcaccgtggggggcctggagcctgggcgcaaatacaagatgcacctgtacggcctccacgaggggcggcgtgtgggcccggtgtccaccgtgggcgtgactgccccacaagaggatgtggacgagacccccagccctacagaaccaggcacagaggccccagagccccccgaggagcctctcctgggggagctgacagtgacaggatcctcccctgactcgctgagcctttcctggaccgtcccccagggccgctttgactccttcaccgtgcagtacaaggacagggacgggcggccccaggcggtgcgtgttgggggccaggagagcaaggtcactgtgaggggcctggagcctgggcgcaagtacaagatgcacctgtacggcctccacgaggggcggcgcctaggcccggtgtctgccgtgggcgtcacagaggatgaagccgagaccacccaagcagtgcctaccatgacccctgagccccccatcaagcctcgcctgggggagctgaccatgacagatgccacccctgactccctcagcctgtcctggacggttcccgagggccagtttgaccacttcctggtccagtacaggaatggggatgggcagcccaaggcggtgcgggtgccggggcacgaggacggggtcaccatctcaggcctggagccagaccataaatacaagatgaacctgtacggcttccacggtggccagcgcgtgggccccatctctgtcattggggtgacggaggaagagacccccagccccacggaactcagcactgaggcccnggagccccctgaggagccgctcctgggggagctgacagtgacaggatcctcccctgactcgctgagcctctcctggaccatcccccagggccacttcgactccttcaccgtgcagtacaaggacagggacgggcggccccaggtgatgcgtgtcaggggcgaggagagcgaggtcaccgtggggggcctggagcccgggcgcaaatacaagatgcacctgtacggcctccacgaggggcggcgtgtgggcccggtgtccaccgtgggtgtgacagtgcccaccacaacccctgagccccccaacaagcctcgcctcggggagctgaccgtgacagatgccacccctgactccctcagcctgtcctggatggtccccgagggccagtttgaccacttcctggtccagtacaggaatggggatgggcagcccaaggtggtgcgggtgccggggcacgaggacggggtcaccatctcaggcctggagccagaccacaagtacaagatgaacctgtacggcttccacggtggccagcgcgtgggccccatctctgtcattggggtgacagaggaagaaactcccgcccccacagaacccagcacggaggccccggagccccctgaggagccgctcctgggggagctgacagtgacaggatcctcccctgactcgctgagcctctcctggaccatcccccagggccgcttcgactccttcactgtgcagtacaaggacagggacgggcggccccaggtggtgcgtgtcaggggcgaggagagcgaggtcaccgtggggggcctggagcccgggtgcaaatacaagatgcacctgtacggcctccacgaggggcagcgcgtgggcccagtgtccgctgtgggtgtgacagctccaaaggatgaagccgagaccacccaagcagtgcctaccatgacccctgagccccccatcaagcctcgcctgggggagctgaccgtgacagatgccacccccgactccctcagcctgtcctggatggttcccgagggccagtttgaccacttcctggtccagtacaggaatggggatgggcagcccaaggcggtgcgggtgccggggcacgaggacggggtcaccatctcaggcctggagccagaccataaatacaagatgaacctgtacggcttccacggtggccagcgcgtaggccctgtgtctgccattggggtgacggaggaagagacccccagccccacagaacccagcactgaggccccggaggcccctgaggagccgctcctgggggagttgacagtgacaggatcctcccctgactcgctgagcctctcctggaccgtcccccagggccgcttcgactccttcaccgtgcagtacaaggacagggacgggcagccccaggtggtgcgtgtcaggggcgaggagagcgaggtcaccgtggggggcctggagcccgggcgcaaatacaagatgcatctgtacggcctccacgaggggcagcgcgtgggcccagtgtccaccgtgggcatcacggcgcccctgcccacaccactgccggtggagccccgcctgggggagctggcggtggcggccgtgacctcggactcagtgggcctctcatggacggtggcccagggcccctttgactccttcctggtacagtacagggacgcgcaggggcagccccaggcagtgcctgtgagcggagacctccgagcggtcgccgtctcggggctggacccggcccgcaagtacaagttcctgctctttggactccagaatgggaaacgccacggcccagtccctgtggaggccaggaccgccccagacaccaaaccgtctccccgcctgggggagctgactgtgacagatgcgacccctgactccgtgggcctctcgtggacggtccctgagggcgaattcgactccttcgtggtccagtacaaggataaggatggtcggctccaggtggtgccggtggcagccaaccagcgggaggtcacagtccagggcctggagcccagtaggaaatacaggttcctgctctatggtctgtcaggcaggaaacgactgggccccatctctgctgacagcaccacagctcccctggagaaggagctacctccccacctgggggaactgaccgtggctgaggagacctccagctctctgcgcctgtcctggacggtagcccagggcccctttgactccttcgtggtccagtacagggacacggacgggcagcccagggcagtgcctgtggccgcagaccagcgcacagtcaccgtagaggacctggagcctggcaagaaatacaagtttctgctctacgggctccttgggggaaagcgcctgggcccggtctctgccctgggaatgacagccccagaagaggacacaccagccccagagttagccccagaggcccctgagcctcctgaagagccccgcctaggagtgctgaccgtgaccgacacaaccccagactccatgcgcctctcgtggagcgtggcccagggcccctttgattccttcgtggtccagtatgaggacacgaacgggcagccccaggccttgctcgtggacggcgaccagagcaagatcctcatctcaggcctggagcccagcaccccctacaggttcctcctctatggcctccatgaagggaagcgcctggggcccctctcagctgagggcaccacagggctggctcctgctggtcagacctcagaggagtcaaggccccgcctgtcccagctgtctgtgactgacgtgaccaccagttcactgaggctcaactgggaggccccaccgggggccttcgactccttcctgctccgctttggggttccatcaccaagcactctggagccgcatccgcgtccactgctgcagcgcgagctgatggtgccggggacgcggcactcggccgtgctccgggacctgcgttccgggactctgtacagcctgacactgtatgggctgcgaggaccccacaaggccgacagcatccagggaaccgcccgcaccctcagcccagttctggagagcccccgtgacctccaattcagtgaaatcagggagacctcagccaaggtcaactggatgcccccaccatcccgggcggacagcttcaaagtctcctaccagctggcggacggaggggagcctcagagtgtgcaggtggatggccaggcccggacccagaaactccaggggctgatcccaggcgctcgctatgaggtgaccgtggtctcggtccgaggctttgaggagagtgagcctctcacaggcttcctcaccacggttcctgacggtcccacacagttgcgtgcactgaacttgaccgagggattcgccgtgctgcactggaagcccccccagaatcctgtggacacctatgacgtccaggtcacagcccctggggccccgcctctgcaggcggagaccccaggcagcgcggtggactaccccctgcatgaccttgtcctccacaccaactacaccgccacagtgcgtggcctgcggggccccaacctcacttccccagccagcatcaccttcaccacagggctagaggcccctcgggacttggaggccaaggaagtgaccccccgcaccgccctgctcacttggactgagcccccagtccggcccgcaggctacctgctcagcttccacacccctggtggacagaaccaggagatcctgctcccaggagggatcacatctcaccagctccttggcctctttccctccacctcctacaatgcacggctccaggccatgtggggccagagcctcctgccgcccgtgtccacctctttcaccacgggtgggctgcggatccccttccccagggactgcggggaggagatgcagaacggagccggtgcctccaggaccagcaccatcttcctcaacggcaaccgcgagcggcccctgaacgtgttttgcgacatggagactgatgggggcggctggctggtgttccagcgccgcatggatggacagacagacttctggagggactgggaggactatgcccatggttttgggaacatctctggagagttctggctgggcaatgaggccctgcacagcctgacacaggcaggtgactactccatgcgcgtggacctgcgggctggggacgaggctgtgttcgcccagtacgactccttccacgtagactcggctgcggagtactaccgcctccacttggagggctaccacggcaccgcaggggactccatgagctaccacagcggcagtgtcttctctgcccgtgatcgggaccccaacagcttgctcatctcctgcgctgtctcctaccgaggggcctggtggtacaggaactgccactacgccaacctcaacgggctctacgggagcacagtggaccatcagggagtgagctggtaccactggaagggcttcgagttctcggtgcccttcacggaaatgaagctgagctgctgcccacctctctcgcaccccagtatgactgccgagcactgaggggtcgccccgagagaagagccagggtccttcaccacccagccgctggaggaagccttctctgccagcgatctcgcagcactgtgtttacaggggggaggggaggggttcgtacgggagcaataaaggagaaactgaggtacccgga

SEQ ID NO: 375590 - DNA, 4583 bp, Homo sapiens
  misc_feature (713)..(713): n is a, c, g, or t
ggtcctccccttctcctcccctgctcgctgcagactccctcctcactgtcgctgccgagatccacagtcggttgtggctcagcccctgttgcaggggacaagtgagggagacttccctgtcctgccctgagacgccgccctcccggggttggggacagagcaggtgcagaggcactgcagctgctcggttgcccagcctcctgaatgatgccagcccagtatgctctaacctccagcctggttctcctggtgctgctgagcacagccagagcaggccccttctcttcacggtccaatgtgacactgccagccccccggccccctccccagccagggggccacacagtgggggctggagtgggaagcccctcttctcagctttacgagcacacagtggaaggaggggagaagcaggtggtattcacccaccgcattaacctgcccccttccactggctgtggctgtcccccaggcaccgagcccccagtccttgcttcagaggtacaggccctgagggtccgtctagagatcctggaggagttggtgaaggggctcaaggaacagtgcactgggggatgttgtcctgcctctgcccaagctggcacaggtgagcaggtgatcacagaagagggtggagaggtggggtggggtgggcattgctagtccataaaggtccttggtatgaattagaagaaggcactccttcctcaccntgaggggtgtggatgcagcccagaacacaacttggagagcagagctgggctacatgtcaaccaaagcatatgcgagggccctgagaggctgcatacattacacatactagcaactgggagcagacatggccttatgagatgaggctagcctggctaggggcctgacataggagcactacataggctcagcctctctcccaggagagagactgagacttgcctctcccctcctactccaggtcagacagatgtgcggaccctctgcagtctccatggtgtgtttgatctgagccgctgcacctgttcctgtgagccaggctggggtgggcccacctgctcagaccccacagatgctgagatccctccctcttccccaccctcagcctcggggtcctgcccagatgactgcaatgatcagggtcgctgtgtccgtggtcgttgcgtgtgctttcccggctacactggccccagctgtggctggccatcctgtcccggggactgccaaggccgtgggcgctgcgtgcagggcgtgtgtgtgtgccgggcaggcttctcaggccccgactgcagccagcgctcctgccctcgaggttgcagccagaggggacgctgtgagggtgggcgctgcgtgtgtgacccaggctacactggtgacgactgtggcatgaggagctgccctcgcggttgcagtcagagggggcgctgtgagaatgggcgctgcgtgtgtaaccccggctacactggcgaggactgtggggtgaggagctgccctcggggctgcagccagcggggacgctgcaaggacgggcgctgcgtgtgtgaccccggctacactggcgaggactgtggtacgcggagctgcccctgggactgtggcgagggcgggcgctgcgtggacggccgctgcgtgtgctggcccgggtacacaggcgaggactgcagcacgcggacatgtccgagggactgccggggccgcgggcgctgcgaggacggcgaatgcatttgcgacacgggctacagcggggacgactgcggcgtgcgcagctgccctggcgactgcaaccaaaggggccgctgcgaggacggccgctgcgtgtgctggccggggtacactggaaccgattgcggctcgcgcgcctgcccacgcgactgtagaggtcgcgggcgctgcgagaacggcgtgtgtgtttgcaatgcgggctacagcggcgaggactgcggtgtgcgcagctgtcctggggactgtcgtggccggggccgctgtgagagtggccgctgcatgtgttggccggggtacacaggccgggactgcggcacgcgcgcctgtcctggcgactgtcgcgggcgcgggcgctgcgtggatggccgctgcgtgtgcaacccgggcttcaccggtgaggactgtgggagccgtcgctgtcccggggactgccgtgggcacggcctttgcgaggatggcgtgtgcgtgtgtgacgcaggctactcaggggaagactgcagcacgcgcagctgccccgggggctgccgaggccgcggccagtgcctagatgggcggtgtgtgtgcgaggacggctactctggcgaggattgcggtgtgaggcagtgcccgaatgactgcagccagcacggcgtgtgccaggacggtgtgtgcatctgttgggaaggctacgtgagtgaggactgcagcatccgcacctgcccctccaactgccacgggaggggccgctgtgaggaagggcgctgcctgtgcgacccaggctacaccggccctacctgtgccacccgcatgtgcccggctgactgccggggacgtgggcggtgtgtgcaaggagtgtgcctgtgccacgtgggctatggcggtgaggactgcgggcaggaagagcctccagccagcgcctgccctggaggctgcgggccccgggaactgtgccgggcaggccagtgtgtgtgtgtagagggcttccgaggccctgactgtgccatccagacatgcccaggggactgccgtggccgaggagagtgtcacgatggcagctgtgtctgcaaagatgggtatgctggcgaagactgcggagaagaggtgccaaccattgagggcatgaggatgcatctcttggaggagacaacagttcggacagagtggaccccggctcctggccccgtggatgcctatgaaattcagttcatccccacgacagagggggcgagccccccattcacagcacgggttccaagctctgcctcagcctatgaccagagaggactggcccctggacaggagtaccaggtcactgtccgagcccttcgagggaccagctggggccttcctgcctccaagaccatcaccaccatgatcgatgggccccaggacctccgagtggtggctgtgacaccgacaacactggagcttggctggctgcgtccccaggctgaggtggaccgatttgtggtgtcctacgtcagtgccggcaaccagagggtgaggctggaagtgccccctgaagcagacgggacgctgctgactgacctgatgccaggcgtagaatatgtggtgactgtcacagcggagcggggccgggcagtcagctacccagcttctgtcagggccaacacagaggaaagggaggaggagtccccgcccaggccaagcctgtcccagcccccacggcggccttggggcaacctgacggccgagctgagccgtttccgcggcacggtgcaggacctggagcgccacctgcgggctcacggctacccactgcgggccaaccagacttacacgtcggtggcgcgccacatccatgaatacttgcagcggcaggtgctgggcagttccgccgatggcgcgcttctcgtgtctctcgacgggctccgcggccagttcgagcgcgtggtgctgcgctggcggcctcagccgcctgcagagggccccggcggtgagctgactgtgccgggcaccacgcgcaccgtcagcctgcccgacctcaggcccggcaccacctaccacgtggaggtccacggggtgcgggcggggcagacctccaagtcctacgccttcatcaccaccacaggcccctcgacgacgcaaggggcccaggctcctctcctgcagcagcgcccccaggagctgggagagttgagggtgctgggcagagatgagacagggcgcctccgtgtggtctggaccgcccagcctgacacctttgcctacttccaactgcgcatgcgggtgcccgaggggccgggggcacatgaggaagtgctgccaggggacgtccgccaggctctggtgcctccaccccctcctggaaccccgtatgagctgtcacttcatggggtccctcctgggggcaagccctctgaccccatcatctaccaaggcattatggacaaggatgaggagaagcctgggaagtcctcaggcccaccacgcctgggtgagctgacggtgacagacaggacctccgactccttgctcctgcgctggacggtccccgagggcgagtttgactccttcgtgatccagtacaaagacagggacgggcagccccaggtggtgcccgtggaaggaccccagcgctcggccgtcatcacctccctggatcctggccgcaagtacaaatttgtcctgtatgggtttgttggcaagaagaggcatggtccgctggtggctgaagccaagatctgtgagtgacagcagtaacaccctgccctctgtactgccctgaagaggttttctcagtgctttgggaacctgctttgggagctccgggaaggcttcctggaggcagtggtgcatgagctgaattctgaagggaaagtagtggtggggcaggcaaagagtttgagaagctcagtgcagcctgaggg

SEQ ID NO: 375591 - DNA, 345 bp, Homo sapiens
gccttctccatactggtaaggtggacacctgggtcttggtgatgtaggtgttgacactcaggagataaagagcctggtggaagttcgccaggggtcttttctgtcccccacgtagtccctcatgagctccttggtgggcacagctatgccttagactgcttctgggtgttcccaccccatcacctctccccactcaggcagaacccgttaggctaggatgcccagtaagtttgagataaaatggagttggcttgcaggtagggagttacaggaagaggcacgagcaccagggcttccctgttgccaaaatacacacaggaggaaggctgcctggcttcagctggc

SEQ ID NO: 375592 - DNA, 1800 bp, Homo sapiens
cattcgtgtcccctaaatctataaataataatataataaacaaaatacaagccctgaattggaaatgggagatggataccaaggcttgagtcctcagaacttagcttttcttggcctttacctctggagcaagagcccagctggtgcttttctttgctgttgcttctcagttccctctcctcaccctgggtggggtctctctcaggggtgttcattgcccgtataccttagtacttggcctagtgatcaaagcaccagtcctgggttccatgtctcatcaccagatggggctggtgaccaccccacatggtgctgtgagagttaaatggggagtatgtgtagtgcacttagcatagtagattgcaccagacatatcttccaacagtagctattgttattcactagtggagagtagaatgaggccctggggagggtgagagcagttctctaagaagtgtggaagtctaaaccgcagatgtggccaggaggaccctcccaatccacacactggcctccctgccccttcctgtatcagtgccaactttgtcctgtgcatcaaaaccctgactccatttcatgggttgctactgctcatttggctgcgggaaggccccgcttctgaaaataaaattgcctgtcagagaaaccctaaggatcaggattccggatctgggcagggcatggacaagttgggtggcagtggcaaaagcccctccccatggtctgccttttcccccagaagcaagttgctgggactgttgcataaaatggctcccacctccagtgcccagacagcctgcgctggggtgaagctggctacacgtgcactgaagctggcaggcttggggagaggtgagctgaggccaggtatctgcttcctttgcccaggattttgatggtctctcccctacacccacagtgggtgtgaacaacaaagacccaatctttgatggtggtgaggattcctctgcacacgctcacactcacgttctctacccccttcttttcaacgtggcccacagcacgattccagaccctgctctattgtgctcagaggaagcagctgctggctccagcccgaatttgggagtgctttgatatgcagccctctctggggccctgccagtactgactctagatgagccctctgcggctgctgggctcacaaatcagccttctcaccccttcctccaggagcagtgttggatgagaatctcccccttacacacatagatcctgtgtttgttttgtctgcttttgtttgtttgtttgtttttgttttcctgttctgttcaattttataaggaggcatagcttttggacttggttgcagggttgggtttggaacttaataataccttggattgacaaaggcgccttttcttctaaagaacacaaaccttgatggttcttgcctgggtgtggttctcacctgggtgagcctggctgtgagggtagggggcctgaggtcaccccaaccacagcttctgtggtcctactggcagcatgttctagacagacctgtgtggagctggggaaaggagagtggagaagtttgaggaagctgcatgtttatgttttgtgttcctccctcccccaggttggggtcagcgggactttatttggatccaccacaggtcttttcaaccaaagccttgcagaaacaggctttaccccatacacacagaagagcaacgacttccttgttaagagtctgaaaatctgggtgagagcctgtcagacccatggcctcagagagcaggaaaaatcctttgcaactgggaaggaaattcagaagac

SEQ ID NO: 375593 - DNA, 86 bp, Homo sapiens
gtttctggactgagcacctgggtggacagtggagctgtacaccaacatatggactcctggagaggactggattgagaaggagtgtg

SEQ ID NO: 375594 - DNA, 426 bp, Homo sapiens
gactcagaaagagcactcatgaaaaaactaacccagtgtcactgttttggaatagacaaagatttcttaagattgtgaagatattctcaagtatattcatctagatgctttactgttccactttttgtatcttagtcagttttactcagtgtgtatgtggtgtgaggccaggtcagttaggaaactcaatttaaaatgatatttatattatccagaaacatcaaatgaatctaaagaaagatctgtaaaacctctacatacaaagtaaaatattgctgaaagaattaaagaaaagttaaataaatgtgggatatatcattacaatatttgagtttcccccacattgacccagtgattcaatgtagttccaaataaaatctcagcaggattgtgtgtgtatgtataaattgagaagttgattcaaaa

SEQ ID NO: 375595 - DNA, 855 bp, Homo sapiens
aaattaaagttttgaaagtaggtttttcctgttagatggattcattcttgactcagaaccaaatcctatggatatgtaagatgtgtgcacgtcccagtgtttgtaacctgagaattttatttaaaccgtcatttgaatctacagtaatctggtgttggggaggaataggatctttatcaacaaagagctgccaaaaccccaactgcttcttgagtagctgtaatagatgaataatgttacagccaaccatgcatttcaagttttgctcaaaaggcttttcaactaatgctggtggtattccatatccgtgtgttcatctcagagtgcagtagtttccatctgattttcattacctttcttgagaggatcaactttacaaccggaatcagaaaagcagtcaaagtcattgcaagtggcaatcagtgaaatataacaatttgagcttgggaacatatgtttcattataaagaaaaaaaaaatggttaccccgtaattccaagattcatatttcccagggtagaagggatcatgcacaagttctagtgtaccttcccatatcatgctgacattcctataaagtgcttgttctcccctacagatagccaactcatgaccttccaaggaaacttaactccctttttgattctgaccatttgaaaatgctttattgtatttgagatgaaattcatgtttctgtagttaaatctttcagaatttaaaacttggaactcaacagagtaaatctaaacctctcttcttctcacaggcagctcttatcccaattcctaccatttcctttgctaggctataatatgcattctttctcttatggagtagctttcattcccttaatca

SEQ ID NO: 375596 - DNA, 9518 bp, Homo sapiens
  misc_feature (1440)..(1440): n is a, c, g, or t
  misc_feature (1554)..(1554): n is a, c, g, or t
  misc_feature (6238)..(6238): n is a, c, g, or t
  misc_feature (6477)..(6477): n is a, c, g, or t
  misc_feature (6544)..(6545): n is a, c, g, or t
  misc_feature (6550)..(6550): n is a, c, g, or t
  misc_feature (6560)..(6560): n is a, c, g, or t
  misc_feature (6631)..(6631): n is a, c, g, or t
  misc_feature (6635)..(6635): n is a, c, g, or t
  misc_feature (6645)..(6645): n is a, c, g, or t
cgatgggccctactccaaaggaggcaaggacgcaggaggggccgacgtttccctggcgtgccgcagacagagcattccagaggagttccgagggatcactgtggtggagctgatcaagaaagaaggcagcacgctgggcctgactatctcaggtggcaccgacaaggatggaaagcccagggtctccaacctgagacctgggggacttgcagccaggagtgatctgctgaacattggtgactatattcggtctgtgaacgggatccacctgaccaggctccgccacgatgagatcatcaccctgctcaagaatgtgggcgagcgcgtggtgctggaggtggagtatgagctgcccccgcccgctcctgagaataaccccaggatcatttcaaagacagtggacgtctccctctacaaggagggcaatagctttggctttgtccttagaggaggtgcccatgaagatgggcacaagtcccgcccgcttgtcctgacctacgtgcggcccggtggccctgccgacagggagggctccctgaaggtgggcgacaggctgctcagcgtcgatggaatcccgctgcacggggccagccatgccaccgccctggccaccctgcggcagtgcagccacgaggcactctttcaggtggagtatgatgtggccacccctgacacggtggctaatgcttcgggacccttgatggtggaaatagtcaagacgccagggtctgccctggggatctcgctcaccaccacctccctccggaacaagtcagtcattaccatcgaccgcatcaagccagccagcgtggtggacaggagcggagccctgcaccctggagaccacatcctgtccatcgatggcaccagcatggaacactgctcgctgcttgaggccaccaagctcctggccagcatttcagagaaggtgcggctggagatcctgcctgtgccccagagtcagcggccactgaggcctcagaggcagtgaaagtgcagaggagtgagcagctgcaccgctgggacccctgcgtgccctcctgccacagcccccggcccggccactgcaggatgcccacctgggccacacctgctggccaggaccaaagccgatccttgtcttcaactcccttttcctcgccgaccttgaaccacgccttttcctgcaacaaccccagcacccttccccgtggatcccagcccatgagtcctcgaactacaatggggcggaggaggcagcgaagaagggaacacaagagctcgttgtcgctagcctccagcacggtggggccgggcgggcagattgtgcacacggagaccacggaggtcgtgctctgtggagaccccctcagcggctttggcctccagctccagggcggcatcttcgccaccgagaccctgtcctccccacccctcgtgtgcttcatcgagcctgacagnccggctgagaggtgtgggctgctgcaggtgggggaccgtgtcctgtccatcaatggcattgccaccgaggacgggactatggaggaagccaaccagctcctgcgggacgccgcnctggcccacaaggtcgtgctggaggtggagttcgatgtggcggagtccgtcatcccaagcagtggcaccttccacgtgaagctgcccaagaagcgcagcgtggagctgggcatcaccatcagctcggccagcaggaaacgaggggagcccttgatcatctccgacatcaagaaaggcagcgtggcacacaggacgggcaccctggagccaggcgacaagctactggccattgacaatatccgcctggacaactgccccatggaggacgccgtgcaaatcctgcggcagtgcgaggacctggtgaagctgaagatccggaaggacgaggacaactctgatgagctggagaccacaggtgccgtcagttacacagtggagctgaagcgctacgggggtcccctgggcatcaccatttcgggcacggaggaaccttttgaccccattgtcatctcaggcctcaccaagcgtggcctggctgagaggactggtgccatccacgtgggggaccgcattctggccatcaacaacgttagcctcaagggccggccgctgagcgaggccatccacctcctgcaggtggctggagagaccgtcacactgaagatcaagaagcaactagaccgtcccctcctaccccgcaagtcgggcagcctcagtgagaccagtgatgctgatgaggacccagcagatgccctgaaaggaggcctgccagcagcccgcttctcgccggctgtgcccagtgtggacagtgctgtggagtcttgggacagctcggccaccgagggtggctttgggggcccagggtcctatacaccacaggcagcagcccggggcacgaccccccaggagcggaggcctggctggctgaggggcagccccccacccaccgagccccggaggacgagctataccccaaccccagctgacgagagctttccagaggaggaggaggaggatgattgggagccgccaacgagcccagcccctggccctgcccgagaggagggcttctggcgcatgtttggagaagctctcgaagacctggagtcatgtggtcagtcagagctgctgagggaactggaggcatccatcatgacgggcaccgtgcagagggtggccctcgagggcaggcctggccaccggccttggcagaggggccgggaggtacgagcctctcctgcagaaatggaggagctgttgctgcctacacccttggagatgcacaaggtgaccctgcacaaggaccccatgcggcatgactttggtttcagcgtctcagatggcctcctggaaaaaggtgtctatgtccacactgtgcgccctgatgggccagcccaccgtggaggcctccagcccttcgacagggtcctgcaggtcaaccacgtccgtacacgggacttcgactgctgcctggcggtgccactcctggccgaggcgggtgatgtcttggagctgatcatcagccgcaagccgcacacggcacacagcagccgggccccccgatcgccaggccccagcagtccccggatgctctgaagtcagcatgtgggccgaactcctaaggggccacccaggcagatcctggctcccagacacgtagctgggctggagaagcggccacccactcattcatctgttggtctggcagactctgagcctgggatgatgcttggtctctgttccccaggtctgtggtgactggggtgccaggcagggaggtcctgccctagttggagtgacagctggggtctctcgccaagttgggtctccaagatgcccagaggagcctcccttaagaagggttggcacaggctgctcagccgagaggagagaggcctgggggctgtcccaggtctctgtggggcctccttggagaggtcgaagatgtagggagcacttcctcccagcaaagccatggagctggaatgagctgcaaggaggagtgagttctcggtcacaggaggtgagcaggcaggagctggataccccagcgcagtcatgcattggggtatgaggcattcccatgatgcgtgcacacgcgcttgggggttggcttcctgatggggagccacttcatctagagactcggccaccaggaaggatgctgcttcggatgggagcccagctccttcgcttctccagaataggggtttggggcttgctagtcctgagattctgagattcccagaatctggtccccacttatgagactcttaagttggggcgtctgggatcccaggaagtgctggccctttgattctgaaagtgggtgattctttgatttcagcatctcagtctgaagcttctgggacttgagactgtggttctgggcccattgggcaggctctatgggccttgggctctcagccctcctgcttcttctgtaggccgtgtggccactgacccatctgcacgtccgctcagcccaagcccctccatgtgggaggggtcattttggggcaaaagaccctggagcttccattcacctgccatccagtgaaaattgaaaagcgatggacgcaggacctgtgaggcggtagcgctcctctttacagccagatcagtggaggaagaggagaaagagggagggagatgggagagaaatgggccagagaaaaagatgggacactcttgcccagtggagggtgtccaaagtgcttattcaaagaagtctattcccacttgaaatctggaagcaccagcatcccttaaaatcattgtcctcagtgtccacaaatcagagaccctcttcattttgagaagggtgtgggcctcccctggtggtctagtgagtggtgcctgggatggagtgggcgggcaggtgtagccagggctggggatgtgctttgcctggcccagttctcacaggggtctcaggaaaacggggcacccactcccacctccatctgtctccaacctggggtccctggaggccagaaaagtgctcttccatttgagggaacagatgaggagtcaagaggtctgttcttttcaccctgggtctgttacctgtttgctgtgtgaccctgtctgggttggacccccagcccctctggacgatcacgggtggacagtctgagcagacacaggcctcctggtcagggccggaaccatctctgccgacccaccaaggcccccttggggacctgcccacgctgtctcctggaggcctgcctcccttacccctcccctccacttcgctgggctctgccccttggtgccctccctgagggccctgcatgcttgtgcctggggtgctcagcgcctctgctatcttggattcccgtgtactcagcccagagtgaaagggcactgtctacctgtcacagggcaccaagtgaaagccaagagccctcacttttgagggtgagggacagcacagcagaggtgtggcttctggatgcaagcagccatagctgtgtgaccttggacaggtggctcagcctctctggacctctgctaagcaacagggctggacaggacacactctcagggcctctcggcttgggaaaactgcattgactccaggactccaggcgagggaagatgcacccgactctaactaatacccccctccctcctcgggctgaggcctctgccattctcccaaaagtatgcaatcaggcccgcggtgggcctcccagccatgccggcctcctcatatgcaatatttcttctggcttctcatggggatggttcatccccgacttgaaatttcctgacacctttccccagtgagcgccctgcctgcctatgcattttgggaacagcccctgtgacatgtccccttccacctgccctctcccccaaagctgtatttttctctggctgagattagaacacattccttgtaaagtatttttctacatcgggttttcttagggctctcgggaagcacaaggggctgtattgcaaaggccgcttatggtctgtttggggccctcgtctaagtctttgtcccaccaggggttgcagtggcttgggggtaggtgccatggggatgattttttaaaataaaattatttaaatccacctagagtagaagtttgctttttaaaaaaatcatggattggcaagagtcagcttctgtatgggtctggtgacatctcacctgcttttgatgattcattaattcaaaaagtttgccatttgcttccatcatccagcccctgggcaacatgaatcagacagatttaggtcatgtctgcacattctggtggcaggcagacaatcaacaagtaagcaaataaataattatttcaaaaggcatcaagtgcaacaaagaaaacaagggagtaacgggatagagggaccagggtgaggggctttagctcacaatattaggaggggtttctctcaagaggcgacatttgcaatgagacctgaagacaggagccagcctccatggagacctggaggaagagtgtctcaggcagcgggcacagctagtgcaaaggccctgagataggaacgagtttgacggtctcaaggaagagaaagaaggcctgggaggggaatggggctggagactaggttggaggtagcaggaatcagtcgtgaaggcttgggtagggggagcaaatttgattctctgcgcagcagaaagccagaggcaggcagtggtgcctgcatatggagtctctttagcccaggttgggaaggtagtggcaggagggcagcctcnggtctggctgctgccctggagtgtccagagagtgtctagggcaggtgagctacagggtctgggacccagaggccagggccaggccccactggggaggccacagttctgtgagcagaggaagagcttctttccaggaagcgagtactctgtcttgggagtggtgtaggcagggggaaggccaagggaggcagcaggccttgctctaagcgctttgcaagagcttgctggatcctcccaanagcctttggaggtgggctctattcctgtcccatcattacagatgaggaaacaggcacagagaggttnngtaanttgcccaagnccacacaggtagtaagggatggaaccagggcttgaacacaagccacatggccagtacacatagagagaggnaggnaggtaggcanaggctgtcagaaagagccagaaaatgggggtagggtggtcttctattctaacattgtctataaatgagttactgagaattttgtctggttagttgggcaaagggctcaactgactcccgagtttgtccatcccaaagggtggggggcgctgttggcaggaaggctgccccaaacatggacctgttgtgaccccagagagcccctaactgggtattaatgagcgcctgcacctgacggtgggggagtgggagaagggcaatcaggtttgctccccctctaccctttcccccactccgccacccgctttctgcccttctggcaggtcagcccaaggctaaagaggagggactgaaagccgcagcaggtgagcacctaaggccaagagcatcacctccaatcatcctggtggccttgatggggacaatggtttattccagatggggaaactgaggctcaggtgactgctgccagatctcccagctgtacagggctgggcatgtagcaggtagaatcagtagagccagtagagccaagagctcatgggcccgggtgcgaatccaggttctttcatggacttgctgtgtacccctgagtgagcaagctgcttcctctgtgagcctccatgtgggaacctctaacctgggaaaatacctacctttgaggagcgtcctgggattggacgggaagccctttataaaatgtaaagcgtttggcaaacgttgagggggaaatacctcaccagaacacaacccacacatgttggatgttaaaaaggaaatgtttattttcatgttataaggtgattacaaactcctctaaaaaaagcaaagatgaatttaaaatattgatatacatatttatctaaaaagcaaaagagaaaaaaacccctgcaaaatacagggaatcatatcataaaacatttatacacaaaagcttgtatactgcaagactgaactacacaccaaggatcttgttcaaatacaaatgttcctcctcagaaaagtctcttgttggttgattttttttttataaaagtttaaaatatcttaaaaatattttgaagttttaaaaaaatgtcctgatgagccagacatatttctggaaggaggcaagacccacattctcagctttctcttgtgctaaatacagagtcacagttgctagggattgggagattaattgggtaaaaaaaaaaaatgaagccaacatctcaatttgaagtcaaatatataacaggatgctccatccctcggagaacacgccagaacatgtctgtagtgacacccacaagagaacaatgcaaaaatgcttcctattacaacaatatatattctgaggatcagggagagaaggaaagggggagggctgccccctgctttctggactgcccacctctacaagtttggctctctgggtttgttttgtttagtcttgtggttttgtacttcgatttttgcacacagtggtatttaccgtgtcccagacagcctggcctgggaccacatgggtctgagggagggatgggacctcaggccaccttgaaggattttctcttgggtcctttcctggcttgtgtctgaatcttgggtggggtgggctgcggggagcagttaggtgcctctgcctttagactggctacccagagcatttccccagggagaggggctgtgctgggagatgctggctgggtgggggaccagtgtggcggtacccgggtgatacaagagtgccctgaagtgggctggaggggccatgctgtgctctccccttgtgtttccccactgtctttgggggtatgctggggatccagggggcagtgaaggagctgcacatggcccaggggttatgctgtcctggaaggagagcatccaaggccacttcctgctgcctggaaactccccgcagagcctcggggtcagtctggagccagggcgacttcatctaaatcctgcctaaggatctggcacacctctggcttctctgcacctcagttccctctttcacaaacagggatctcaattcctagctcaccaagggctgctgggaggaaggagggccccgtgcagggctggggtgtgcaggtgaggctggagtcacccagctcacggagccaccgcatgggtccaggaattctgtgaggatggtgggagtgtggctgctgctgctcccctcatccctgaacatggaggggagcgcatttccttttccataaaggcttgtctttggttgtcaggaagaccttgaggatgttgctggatgtagccctggttagacactcaccattccctgcacctacctcggagaacctgcagctagagctgtttcaagaaaatccattcctggctcacagtgcctccctgagcctcagttacctcatttacaacaagggcgttgggttaggggaccctggaggcccttctctccctgaccgtcaggaaatctctgtggccctagcatggcccatctcaacgcagtgtctcccacttcttcatcttaaaaaattgatttaaacaaccccctcgcttcctttccagatctggctggctgggctatgtgcgggcatcagcatttctgacccatcccaagcagaaagcaggtgaaggactttgcccattctctatagacaggtggaccagagtcatgagctctcatggaaagtttcgtttatacggagacatgaaggttgagcattattacacaggtactcgcagagctatgctctgcacacagagccagggctggctgggcgagagggctctgattggagacaggtgccttggggagagttgaggaacgacttccttccaggcggggcctggggacttggtctgcctgtgtctttggtctagaatttggtctgagaatcttataag

SEQ ID NO: 375597 - DNA, 9348 bp, Homo sapiens
  misc_feature (1440)..(1440): n is a, c, g, or t
  misc_feature (1554)..(1554): n is a, c, g, or t
  misc_feature (6238)..(6238): n is a, c, g, or t
  misc_feature (6477)..(6477): n is a, c, g, or t
  misc_feature (6544)..(6545): n is a, c, g, or t
  misc_feature (6550)..(6550): n is a, c, g, or t
  misc_feature (6560)..(6560): n is a, c, g, or t
  misc_feature (6631)..(6631): n is a, c, g, or t
  misc_feature (6635)..(6635): n is a, c, g, or t
  misc_feature (6645)..(6645): n is a, c, g, or t
cgatgggccctactccaaaggaggcaaggacgcaggaggggccgacgtttccctggcgtgccgcagacagagcattccagaggagttccgagggatcactgtggtggagctgatcaagaaagaaggcagcacgctgggcctgactatctcaggtggcaccgacaaggatggaaagcccagggtctccaacctgagacctgggggacttgcagccaggagtgatctgctgaacattggtgactatattcggtctgtgaacgggatccacctgaccaggctccgccacgatgagatcatcaccctgctcaagaatgtgggcgagcgcgtggtgctggaggtggagtatgagctgcccccgcccgctcctgagaataaccccaggatcatttcaaagacagtggacgtctccctctacaaggagggcaatagctttggctttgtccttagaggaggtgcccatgaagatgggcacaagtcccgcccgcttgtcctgacctacgtgcggcccggtggccctgccgacagggagggctccctgaaggtgggcgacaggctgctcagcgtcgatggaatcccgctgcacggggccagccatgccaccgccctggccaccctgcggcagtgcagccacgaggcactctttcaggtggagtatgatgtggccacccctgacacggtggctaatgcttcgggacccttgatggtggaaatagtcaagacgccagggtctgccctggggatctcgctcaccaccacctccctccggaacaagtcagtcattaccatcgaccgcatcaagccagccagcgtggtggacaggagcggagccctgcaccctggagaccacatcctgtccatcgatggcaccagcatggaacactgctcgctgcttgaggccaccaagctcctggccagcatttcagagaaggtgcggctggagatcctgcctgtgccccagagtcagcggccactgaggcctcagaggcagtgaaagtgcagaggagtgagcagctgcaccgctgggacccctgcgtgccctcctgccacagcccccggcccggccactgcaggatgcccacctgggccacacctgctggccaggaccaaagccgatccttgtcttcaactcccttttcctcgccgaccttgaaccacgccttttcctgcaacaaccccagcacccttccccgtggatcccagcccatgagtcctcgaactacaatggggcggaggaggcagcgaagaagggaacacaagagctcgttgtcgctagcctccagcacggtggggccgggcgggcagattgtgcacacggagaccacggaggtcgtgctctgtggagaccccctcagcggctttggcctccagctccagggcggcatcttcgccaccgagaccctgtcctccccacccctcgtgtgcttcatcgagcctgacagnccggctgagaggtgtgggctgctgcaggtgggggaccgtgtcctgtccatcaatggcattgccaccgaggacgggactatggaggaagccaaccagctcctgcgggacgccgcnctggcccacaaggtcgtgctggaggtggagttcgatgtggcggagtccgtcatcccaagcagtggcaccttccacgtgaagctgcccaagaagcgcagcgtggagctgggcatcaccatcagctcggccagcaggaaacgaggggagcccttgatcatctccgacatcaagaaaggcagcgtggcacacaggacgggcaccctggagccaggcgacaagctactggccattgacaatatccgcctggacaactgccccatggaggacgccgtgcaaatcctgcggcagtgcgaggacctggtgaagctgaagatccggaaggacgaggacaactctgatgagctggagaccacaggtgccgtcagttacacagtggagctgaagcgctacgggggtcccctgggcatcaccatttcgggcacggaggaaccttttgaccccattgtcatctcaggcctcaccaagcgtggcctggctgagaggactggtgccatccacgtgggggaccgcattctggccatcaacaacgttagcctcaagggccggccgctgagcgaggccatccacctcctgcaggtggctggagagaccgtcacactgaagatcaagaagcaactagaccgtcccctcctaccccgcaagtcgggcagcctcagtgagaccagtgatgctgatgaggacccagcagatgccctgaaaggaggcctgccagcagcccgcttctcgccggctgtgcccagtgtggacagtgctgtggagtcttgggacagctcggccaccgagggtggctttgggggcccagggtcctatacaccacaggcagcagcccggggcacgaccccccaggagcggaggcctggctggctgaggggcagccccccacccaccgagccccggaggacgagctataccccaaccccagctgacgagagctttccagaggaggaggaggaggatgattgggagccgccaacgagcccagcccctggccctgcccgagaggagggcttctggcgcatgtttggagaagctctcgaagacctggagtcatgtggtcagtcagagctgctgagggaactggaggcatccatcatgacgggcaccgtgcagagggtggccctcgagggcaggcctggccaccggccttggcagaggggccgggaggtacgagcctctcctgcagaaatggaggagctgttgctgcctacacccttggagatgcacaaggtgaccctgcacaaggaccccatgcggcatgactttggtttcagcgtctcagatggcctcctggaaaaaggtgtctatgtccacactgtgcgccctgatgggccagcccaccgtggaggcctccagcccttcgacagggtcctgcaggtcaaccacgtccgtacacgggacttcgactgctgcctggcggtgccactcctggccgaggcgggtgatgtcttggagctgatcatcagccgcaagccgcacacggcacacagcagccgggccccccgatcgccaggccccagcagtccccggatgctctgaagtcagcatgtgggccgaactcctaaggggccacccaggcagatcctggctcccagacacgtagctgggctggagaagcggccacccactcattcatctgttggtctggcagactctgagcctgggatgatgcttggtctctgttccccaggtctgtggtgactggggtgccaggcagggaggtcctgccctagttggagtgacagctggggtctctcgccaagttgggtctccaagatgcccagaggagcctcccttaagaagggttggcacaggctgctcagccgagaggagagaggcctgggggctgtcccaggtctctgtggggcctccttggagaggtcgaagatgtagggagcacttcctcccagcaaagccatggagctggaatgagctgcaaggaggagtgagttctcggtcacaggaggtgagcaggcaggagctggataccccagcgcagtcatgcattggggtatgaggcattcccatgatgcgtgcacacgcgcttgggggttggcttcctgatggggagccacttcatctagagactcggccaccaggaaggatgctgcttcggatgggagcccagctccttcgcttctccagaataggggtttggggcttgctagtcctgagattctgagattcccagaatctggtccccacttatgagactcttaagttggggcgtctgggatcccaggaagtgctggccctttgattctgaaagtgggtgattctttgatttcagcatctcagtctgaagcttctgggacttgagactgtggttctgggcccattgggcaggctctatgggccttgggctctcagccctcctgcttcttctgtaggccgtgtggccactgacccatctgcacgtccgctcagcccaagcccctccatgtgggaggggtcattttggggcaaaagaccctggagcttccattcacctgccatccagtgaaaattgaaaagcgatggacgcaggacctgtgaggcggtagcgctcctctttacagccagatcagtggaggaagaggagaaagagggagggagatgggagagaaatgggccagagaaaaagatgggacactcttgcccagtggagggtgtccaaagtgcttattcaaagaagtctattcccacttgaaatctggaagcaccagcatcccttaaaatcattgtcctcagtgtccacaaatcagagaccctcttcattttgagaagggtgtgggcctcccctggtggtctagtgagtggtgcctgggatggagtgggcgggcaggtgtagccagggctggggatgtgctttgcctggcccagttctcacaggggtctcaggaaaacggggcacccactcccacctccatctgtctccaacctggggtccctggaggccagaaaagtgctcttccatttgagggaacagatgaggagtcaagaggtctgttcttttcaccctgggtctgttacctgtttgctgtgtgaccctgtctgggttggacccccagcccctctggacgatcacgggtggacagtctgagcagacacaggcctcctggtcagggccggaaccatctctgccgacccaccaaggcccccttggggacctgcccacgctgtctcctggaggcctgcctcccttacccctcccctccacttcgctgggctctgccccttggtgccctccctgagggccctgcatgcttgtgcctggggtgctcagcgcctctgctatcttggattcccgtgtactcagcccagagtgaaagggcactgtctacctgtcacagggcaccaagtgaaagccaagagccctcacttttgagggtgagggacagcacagcagaggtgtggcttctggatgcaagcagccatagctgtgtgaccttggacaggtggctcagcctctctggacctctgctaagcaacagggctggacaggacacactctcagggcctctcggcttgggaaaactgcattgactccaggactccaggcgagggaagatgcacccgactctaactaatacccccctccctcctcgggctgaggcctctgccattctcccaaaagtatgcaatcaggcccgcggtgggcctcccagccatgccggcctcctcatatgcaatatttcttctggcttctcatggggatggttcatccccgacttgaaatttcctgacacctttccccagtgagcgccctgcctgcctatgcattttgggaacagcccctgtgacatgtccccttccacctgccctctcccccaaagctgtatttttctctggctgagattagaacacattccttgtaaagtatttttctacatcgggttttcttagggctctcgggaagcacaaggggctgtattgcaaaggccgcttatggtctgtttggggccctcgtctaagtctttgtcccaccaggggttgcagtggcttgggggtaggtgccatggggatgattttttaaaataaaattatttaaatccacctagagtagaagtttgctttttaaaaaaatcatggattggcaagagtcagcttctgtatgggtctggtgacatctcacctgcttttgatgattcattaattcaaaaagtttgccatttgcttccatcatccagcccctgggcaacatgaatcagacagatttaggtcatgtctgcacattctggtggcaggcagacaatcaacaagtaagcaaataaataattatttcaaaaggcatcaagtgcaacaaagaaaacaagggagtaacgggatagagggaccagggtgaggggctttagctcacaatattaggaggggtttctctcaagaggcgacatttgcaatgagacctgaagacaggagccagcctccatggagacctggaggaagagtgtctcaggcagcgggcacagctagtgcaaaggccctgagataggaacgagtttgacggtctcaaggaagagaaagaaggcctgggaggggaatggggctggagactaggttggaggtagcaggaatcagtcgtgaaggcttgggtagggggagcaaatttgattctctgcgcagcagaaagccagaggcaggcagtggtgcctgcatatggagtctctttagcccaggttgggaaggtagtggcaggagggcagcctcnggtctggctgctgccctggagtgtccagagagtgtctagggcaggtgagctacagggtctgggacccagaggccagggccaggccccactggggaggccacagttctgtgagcagaggaagagcttctttccaggaagcgagtactctgtcttgggagtggtgtaggcagggggaaggccaagggaggcagcaggccttgctctaagcgctttgcaagagcttgctggatcctcccaanagcctttggaggtgggctctattcctgtcccatcattacagatgaggaaacaggcacagagaggttnngtaanttgcccaagnccacacaggtagtaagggatggaaccagggcttgaacacaagccacatggccagtacacatagagagaggnaggnaggtaggcanaggctgtcagaaagagccagaaaatgggggtagggtggtcttctattctaacattgtctataaatgagttactgagaattttgtctggttagttgggcaaagggctcaactgactcccgagtttgtccatcccaaagggtggggggcgctgttggcaggaaggctgccccaaacatggacctgttgtgaccccagagagcccctaactgggtattaatgagcgcctgcacctgacggtgggggagtgggagaagggcaatcaggtttgctccccctctaccctttcccccactccgccacccgctttctgcccttctggcaggtcagcccaaggctaaagaggagggactgaaagccgcagcaggtgagcacctaaggccaagagcatcacctccaatcatcctggtggccttgatggggacaatggtttattccagatggggaaactgaggctcaggtgactgctgccagatctcccagctgtacagggctgggcatgtagcaggtagaatcagtagagccagtagagccaagagctcatgggcccgggtgcgaatccaggttctttcatggacttgctgtgtacccctgagtgagcaagctgcttcctctgtgagcctccatgtgggaacctctaacctgggaaaatacctacctttgaggagcgtcctgggattggacgggaagccctttataaaatgtaaagcgtttggcaaacgttgagggggaaatacctcaccagaacacaacccacacatgttggatgttaaaaaggaaatgtttattttcatgttataaggtgattacaaactcctctaaaaaaagcaaagatgaatttaaaatattgatatacatatttatctaaaaagcaaaagagaaaaaaacccctgcaaaatacagggaatcatatcataaaacatttatacacaaaagcttgtatactgcaagactgaactacacaccaaggatcttgttcaaatacaaatgttcctcctcagaaaagtctcttgttggttgattttttttttataaaagtttaaaatatcttaaaaatattttgaagttttaaaaaaatgtcctgatgagccagacatatttctggaaggaggcaagacccacattctcagctttctcttgtgctaaatacagagtcacagttgctagggattgggagattaattgggtaaaaaaaaaaaatgaagccaacatctcaatttgaagtcaaatatataacaggatgctccatccctcggagaacacgccagaacatgtctgtagtgacacccacaagagaacaatgcaaaaatgcttcctattacaacaatatatattctgaggatcagggagagaaggaaagggggagggctgccccctgctttctggactgcccacctctacaagtttggctctctgggtttgttttgtttagtcttgtggttttgtacttcgatttttgcacacagtggtatttaccgtgtcccagacagcctggcctgggaccacatgggtctgagggagggatgggacctcaggccaccttgaaggattttctcttgggtcctttcctggcttgtgtctgaatcttgggtggggtgggctgcggggagcagttaggtgcctctgcctttagactggctacccagagcatttccccagggagaggggctgtgctgggagatgctggctgggtgggggaccagtgtggcggtacccgggtgatacaagagtgccctgaagtgggctggaggggccatgctgtgctctccccttgtgtttccccactgtctttgggggtatgctggggatccagggggcagtgaaggagctgcacatggcccaggggttatgctgtcctggaaggagagcatccaaggccacttcctgctgcctggaaactccccgcagagcctcggggtcagtctggagccagggcgacttcatctaaatcctgcctaaggatctggcacacctctggcttctctgcacctcagttccctctttcacaaacagggatctcaattcctagctcaccaagggctgctgggaggaaggagggccccgtgcagggctggggtgtgcaggtgaggctggagtcacccagctcacggagccaccgcatgggtccaggaattctgtgaggatggtgggagtgtggctgctgctgctcccctcatccctgaacatggaggggagcgcatttccttttccataaaggcttgtctttggttgtcaggaagaccttgaggatgttgctggatgtagccctggttagacactcaccattccctgcacctacctcggagaacctgcagctagagctgtttcaagaaaatccattcctggctcacagtgcctccctgagcctcagttacctcatttacaacaagggcgttgggttaggggaccctgggaagttgtatgaaattaggacatggacggggtggggctgggggctcagcatgtaaaataacaaaaccaactgatgaccaccctccaagtaaactgtgcagggccggggaagggtggagaggtcggaaaggtggactttgaggatcctgggagcctgagggaatcccataacccaagccactgcaattaaagctacagacccaggacctcaagcagccatggccaagtcccagaatcgaggcacctgagagattgcagattctagcaactgaaggccccatgattctcaggttc

SEQ ID NO: 375598 - DNA, 5867 bp, Homo sapiens
  misc_feature (1440)..(1440): n is a, c, g, or t
  misc_feature (1554)..(1554): n is a, c, g, or t
cgatgggccctactccaaaggaggcaaggacgcaggaggggccgacgtttccctggcgtgccgcagacagagcattccagaggagttccgagggatcactgtggtggagctgatcaagaaagaaggcagcacgctgggcctgactatctcaggtggcaccgacaaggatggaaagcccagggtctccaacctgagacctgggggacttgcagccaggagtgatctgctgaacattggtgactatattcggtctgtgaacgggatccacctgaccaggctccgccacgatgagatcatcaccctgctcaagaatgtgggcgagcgcgtggtgctggaggtggagtatgagctgcccccgcccgctcctgagaataaccccaggatcatttcaaagacagtggacgtctccctctacaaggagggcaatagctttggctttgtccttagaggaggtgcccatgaagatgggcacaagtcccgcccgcttgtcctgacctacgtgcggcccggtggccctgccgacagggagggctccctgaaggtgggcgacaggctgctcagcgtcgatggaatcccgctgcacggggccagccatgccaccgccctggccaccctgcggcagtgcagccacgaggcactctttcaggtggagtatgatgtggccacccctgacacggtggctaatgcttcgggacccttgatggtggaaatagtcaagacgccagggtctgccctggggatctcgctcaccaccacctccctccggaacaagtcagtcattaccatcgaccgcatcaagccagccagcgtggtggacaggagcggagccctgcaccctggagaccacatcctgtccatcgatggcaccagcatggaacactgctcgctgcttgaggccaccaagctcctggccagcatttcagagaaggtgcggctggagatcctgcctgtgccccagagtcagcggccactgaggcctcagaggcagtgaaagtgcagaggagtgagcagctgcaccgctgggacccctgcgtgccctcctgccacagcccccggcccggccactgcaggatgcccacctgggccacacctgctggccaggaccaaagccgatccttgtcttcaactcccttttcctcgccgaccttgaaccacgccttttcctgcaacaaccccagcacccttccccgtggatcccagcccatgagtcctcgaactacaatggggcggaggaggcagcgaagaagggaacacaagagctcgttgtcgctagcctccagcacggtggggccgggcgggcagattgtgcacacggagaccacggaggtcgtgctctgtggagaccccctcagcggctttggcctccagctccagggcggcatcttcgccaccgagaccctgtcctccccacccctcgtgtgcttcatcgagcctgacagnccggctgagaggtgtgggctgctgcaggtgggggaccgtgtcctgtccatcaatggcattgccaccgaggacgggactatggaggaagccaaccagctcctgcgggacgccgcnctggcccacaaggtcgtgctggaggtggagttcgatgtggcggagtccgtcatcccaagcagtggcaccttccacgtgaagctgcccaagaagcgcagcgtggagctgggcatcaccatcagctcggccagcaggaaacgaggggagcccttgatcatctccgacatcaagaaaggcagcgtggcacacaggacgggcaccctggagccaggcgacaagctactggccattgacaatatccgcctggacaactgccccatggaggacgccgtgcaaatcctgcggcagtgcgaggacctggtgaagctgaagatccggaaggacgaggacaactctgatgagctggagaccacaggtgccgtcagttacacagtggagctgaagcgctacgggggtcccctgggcatcaccatttcgggcacggaggaaccttttgaccccattgtcatctcaggcctcaccaagcgtggcctggctgagaggactggtgccatccacgtgggggaccgcattctggccatcaacaacgttagcctcaagggccggccgctgagcgaggccatccacctcctgcaggtggctggagagaccgtcacactgaagatcaagaagcaactagaccgtcccctcctaccccgcaagtcgggcagcctcagtgagaccagtgatgctgatgaggacccagcagatgccctgaaaggaggcctgccagcagcccgcttctcgccggctgtgcccagtgtggacagtgctgtggagtcttgggacagctcggccaccgagggtggctttgggggcccagggtcctatacaccacaggcagcagcccggggcacgaccccccaggagcggaggcctggctggctgaggggcagccccccacccaccgagccccggaggacgagctataccccaaccccagctgacgagagctttccagaggaggaggaggaggatgattgggagccgccaacgaggcatcctgtgtcaccgctctccaccccgtctcatctgcccctgttctaactggccaccgacagtcctggtcgcccctaactgcgtctttcccctattccgtgtcaccaaccactgccccggggccccagaactgccaccgaggacgcccgcctgcctgcccgcccacccaccctatggcccctcgagcccaacgctgggccctggggccccgaagactcctcaggccccagcccgcccacccgcctgccaggagttgacgctctctggttcctacgttacagcccagcccctggccctgcccgagaggagggcttctggcgcatgtttggagaagctctcgaagacctggagtcatgtggtcagtcagagctgctgagggaactggaggcatccatcatgacgggcaccgtgcagagggtggccctcgagggcaggcctggccaccggccttggcagaggggccgggaggtacgagcctctcctgcagaaatggaggagctgttgctgcctacacccttggagatgcacaaggtgaccctgcacaaggaccccatgcggcatgactttggtttcagcgtctcagatggcctcctggaaaaaggtgtctatgtccacactgtgcgccctgatgggccagcccaccgtggaggcctccagcccttcgacagggtcctgcaggtcaaccacgtccgtacacgggacttcgactgctgcctggcggtgccactcctggccgaggcgggtgatgtcttggagctgatcatcagccgcaagccgcacacggcacacagcagccgggccccccgatcgccaggccccagcagtccccggatgctctgaagtcagcatgtgggccgaactcctaaggggccacccaggcagatcctggctcccagacacgtagctgggctggagaagcggccacccactcattcatctgttggtctggcagactctgagcctgggatgatgcttggtctctgttccccaggtctgtggtgactggggtgccaggcagggaggtcctgccctagttggagtgacagctggggtctctcgccaagttgggtctccaagatgcccagaggagcctcccttaagaagggttggcacaggctgctcagccgagaggagagaggcctgggggctgtcccaggtctctgtggggcctccttggagaggtcgaagatgtagggagcacttcctcccagcaaagccatggagctggaatgagctgcaaggaggagtgagttctcggtcacaggaggtgagcaggcaggagctggataccccagcgcagtcatgcattggggtatgaggcattcccatgatgcgtgcacacgcgcttgggggttggcttcctgatggggagccacttcatctagagactcggccaccaggaaggatgctgcttcggatgggagcccagctccttcgcttctccagaataggggtttggggcttgctagtcctgagattctgagattcccagaatctggtccccacttatgagactcttaagttggggcgtctgggatcccaggaagtgctggccctttgattctgaaagtgggtgattctttgatttcagcatctcagtctgaagcttctgggacttgagactgtggttctgggcccattgggcaggctctatgggccttgggctctcagccctcctgcttcttctgtaggccgtgtggccactgacccatctgcacgtccgctcagcccaagcccctccatgtgggaggggtcattttggggcaaaagaccctggagcttccattcacctgccatccagtgaaaattgaaaagcgatggacgcaggacctgtgaggcggtagcgctcctctttacagccagatcagtggaggaagaggagaaagagggagggagatgggagagaaatgggccagagaaaaagatgggacactcttgcccagtggagggtgtccaaagtgcttattcaaagaagtctattcccacttgaaatctggaagcaccagcatcccttaaaatcattgtcctcagtgtccacaaatcagagaccctcttcattttgagaagggtgtgggcctcccctggtggtctagtgagtggtgcctgggatggagtgggcgggcaggtgtagccagggctggggatgtgctttgcctggcccagttctcacaggggtctcaggaaaacggggcacccactcccacctccatctgtctccaacctggggtccctggaggccagaaaagtgctcttccatttgagggaacagatgaggagtcaagaggtctgttcttttcaccctgggtctgttacctgtttgctgtgtgaccctgtctgggttggacccccagcccctctggacgatcacgggtggacagtctgagcagacacaggcctcctggtcagggccggaaccatctctgccgacccaccaaggcccccttggggacctgcccacgctgtctcctggaggcctgcctcccttacccctcccctccacttcgctgggctctgccccttggtgccctccctgagggccctgcatgcttgtgcctggggtgctcagcgcctctgctatcttggattcccgtgtactcagcccagagtgaaagggcactgtctacctgtcacagggcaccaagtgaaagccaagagccctcacttttgagggtgagggacagcacagcagaggtgtggcttctggatgcaagcagccatagctgtgtgaccttggacaggtggctcagcctctctggacctctgctaagcaacagggctggacaggacacactctcagggcctctcggcttgggaaaactgcattgactccaggactccaggcgagggaagatgcacccgactctaactaatacccccctccctcctcgggctgaggcctctgccattctcccaaaagtatgcaatcaggcccgcggtgggcctcccagccatgccggcctcctcatatgcaatatttcttctggcttctcatggggatggttcatccccgacttgaaatttcctgacacctttccccagtgagcgccctgcctgcctatgcattttgggaacagcccctgtgacatgtccccttccacctgccctctcccccaaagctgtatttttctctggctgagattagaacacattccttgtaaagtatttttctacatcgggttttcttagggctctcgggaagcacaaggggctgtattgcaaaggccgcttatggtctgtttggggccctcgtctaagtctttgtcccaccaggggttgcagtggcttgggggtaggtgccatggggatgattttttaaaataaaattatttaaatcc

SEQ ID NO: 375599 - DNA, 620 bp, Homo sapiens
tggatcccagcccatgagtcctcgaactacaatggggcggaggaggcagcgaagaagggaacacaagagctcgtgtaagctgtggtctcttccctcctccttgggctgcttgtatgtctgagagtgaggcttgccaaagggtgtatgtcagggcgaggggaggtattttgggcagagctccaggtgtatgcgtgggaatgttaaataacatgagtggaacaccaggctgtcatggatggttgggcaggttgtgcactgctcaagaggaccactgagaggtgccagttactttgtacacttttattcttgtatttttattatgaaaaattcctaggatttggtgataacgtccttgaggaaaggaagtcttttcagatgtgcatgaagttttcacattttttgccattcagtcctgattcattcatggataaagcctcagtgctgcgttactatatccttaccacctctctgccatttgttaatttcccctaagacaaagacatggcctgagactctagctgtccagaatgtaataatttccagtcttacttctctgcttatttattgttcaaaattgcccttttgaaataaagatatttacatgttaagaaaagtaaatc

SEQ ID NO: 375600 - DNA, 8032 bp, Homo sapiens
  misc_feature (1440)..(1440): n is a, c, g, or t
  misc_feature (1554)..(1554): n is a, c, g, or t
  misc_feature (6238)..(6238): n is a, c, g, or t
  misc_feature (6477)..(6477): n is a, c, g, or t
  misc_feature (6544)..(6545): n is a, c, g, or t
  misc_feature (6550)..(6550): n is a, c, g, or t
  misc_feature (6560)..(6560): n is a, c, g, or t
  misc_feature (6631)..(6631): n is a, c, g, or t
  misc_feature (6635)..(6635): n is a, c, g, or t
  misc_feature (6645)..(6645): n is a, c, g, or t
cgatgggccctactccaaaggaggcaaggacgcaggaggggccgacgtttccctggcgtgccgcagacagagcattccagaggagttccgagggatcactgtggtggagctgatcaagaaagaaggcagcacgctgggcctgactatctcaggtggcaccgacaaggatggaaagcccagggtctccaacctgagacctgggggacttgcagccaggagtgatctgctgaacattggtgactatattcggtctgtgaacgggatccacctgaccaggctccgccacgatgagatcatcaccctgctcaagaatgtgggcgagcgcgtggtgctggaggtggagtatgagctgcccccgcccgctcctgagaataaccccaggatcatttcaaagacagtggacgtctccctctacaaggagggcaatagctttggctttgtccttagaggaggtgcccatgaagatgggcacaagtcccgcccgcttgtcctgacctacgtgcggcccggtggccctgccgacagggagggctccctgaaggtgggcgacaggctgctcagcgtcgatggaatcccgctgcacggggccagccatgccaccgccctggccaccctgcggcagtgcagccacgaggcactctttcaggtggagtatgatgtggccacccctgacacggtggctaatgcttcgggacccttgatggtggaaatagtcaagacgccagggtctgccctggggatctcgctcaccaccacctccctccggaacaagtcagtcattaccatcgaccgcatcaagccagccagcgtggtggacaggagcggagccctgcaccctggagaccacatcctgtccatcgatggcaccagcatggaacactgctcgctgcttgaggccaccaagctcctggccagcatttcagagaaggtgcggctggagatcctgcctgtgccccagagtcagcggccactgaggcctcagaggcagtgaaagtgcagaggagtgagcagctgcaccgctgggacccctgcgtgccctcctgccacagcccccggcccggccactgcaggatgcccacctgggccacacctgctggccaggaccaaagccgatccttgtcttcaactcccttttcctcgccgaccttgaaccacgccttttcctgcaacaaccccagcacccttccccgtggatcccagcccatgagtcctcgaactacaatggggcggaggaggcagcgaagaagggaacacaagagctcgttgtcgctagcctccagcacggtggggccgggcgggcagattgtgcacacggagaccacggaggtcgtgctctgtggagaccccctcagcggctttggcctccagctccagggcggcatcttcgccaccgagaccctgtcctccccacccctcgtgtgcttcatcgagcctgacagnccggctgagaggtgtgggctgctgcaggtgggggaccgtgtcctgtccatcaatggcattgccaccgaggacgggactatggaggaagccaaccagctcctgcgggacgccgcnctggcccacaaggtcgtgctggaggtggagttcgatgtggcggagtccgtcatcccaagcagtggcaccttccacgtgaagctgcccaagaagcgcagcgtggagctgggcatcaccatcagctcggccagcaggaaacgaggggagcccttgatcatctccgacatcaagaaaggcagcgtggcacacaggacgggcaccctggagccaggcgacaagctactggccattgacaatatccgcctggacaactgccccatggaggacgccgtgcaaatcctgcggcagtgcgaggacctggtgaagctgaagatccggaaggacgaggacaactctgatgagctggagaccacaggtgccgtcagttacacagtggagctgaagcgctacgggggtcccctgggcatcaccatttcgggcacggaggaaccttttgaccccattgtcatctcaggcctcaccaagcgtggcctggctgagaggactggtgccatccacgtgggggaccgcattctggccatcaacaacgttagcctcaagggccggccgctgagcgaggccatccacctcctgcaggtggctggagagaccgtcacactgaagatcaagaagcaactagaccgtcccctcctaccccgcaagtcgggcagcctcagtgagaccagtgatgctgatgaggacccagcagatgccctgaaaggaggcctgccagcagcccgcttctcgccggctgtgcccagtgtggacagtgctgtggagtcttgggacagctcggccaccgagggtggctttgggggcccagggtcctatacaccacaggcagcagcccggggcacgaccccccaggagcggaggcctggctggctgaggggcagccccccacccaccgagccccggaggacgagctataccccaaccccagctgacgagagctttccagaggaggaggaggaggatgattgggagccgccaacgagcccagcccctggccctgcccgagaggagggcttctggcgcatgtttggagaagctctcgaagacctggagtcatgtggtcagtcagagctgctgagggaactggaggcatccatcatgacgggcaccgtgcagagggtggccctcgagggcaggcctggccaccggccttggcagaggggccgggaggtacgagcctctcctgcagaaatggaggagctgttgctgcctacacccttggagatgcacaaggtgaccctgcacaaggaccccatgcggcatgactttggtttcagcgtctcagatggcctcctggaaaaaggtgtctatgtccacactgtgcgccctgatgggccagcccaccgtggaggcctccagcccttcgacagggtcctgcaggtcaaccacgtccgtacacgggacttcgactgctgcctggcggtgccactcctggccgaggcgggtgatgtcttggagctgatcatcagccgcaagccgcacacggcacacagcagccgggccccccgatcgccaggccccagcagtccccggatgctctgaagtcagcatgtgggccgaactcctaaggggccacccaggcagatcctggctcccagacacgtagctgggctggagaagcggccacccactcattcatctgttggtctggcagactctgagcctgggatgatgcttggtctctgttccccaggtctgtggtgactggggtgccaggcagggaggtcctgccctagttggagtgacagctggggtctctcgccaagttgggtctccaagatgcccagaggagcctcccttaagaagggttggcacaggctgctcagccgagaggagagaggcctgggggctgtcccaggtctctgtggggcctccttggagaggtcgaagatgtagggagcacttcctcccagcaaagccatggagctggaatgagctgcaaggaggagtgagttctcggtcacaggaggtgagcaggcaggagctggataccccagcgcagtcatgcattggggtatgaggcattcccatgatgcgtgcacacgcgcttgggggttggcttcctgatggggagccacttcatctagagactcggccaccaggaaggatgctgcttcggatgggagcccagctccttcgcttctccagaataggggtttggggcttgctagtcctgagattctgagattcccagaatctggtccccacttatgagactcttaagttggggcgtctgggatcccaggaagtgctggccctttgattctgaaagtgggtgattctttgatttcagcatctcagtctgaagcttctgggacttgagactgtggttctgggcccattgggcaggctctatgggccttgggctctcagccctcctgcttcttctgtaggccgtgtggccactgacccatctgcacgtccgctcagcccaagcccctccatgtgggaggggtcattttggggcaaaagaccctggagcttccattcacctgccatccagtgaaaattgaaaagcgatggacgcaggacctgtgaggcggtagcgctcctctttacagccagatcagtggaggaagaggagaaagagggagggagatgggagagaaatgggccagagaaaaagatgggacactcttgcccagtggagggtgtccaaagtgcttattcaaagaagtctattcccacttgaaatctggaagcaccagcatcccttaaaatcattgtcctcagtgtccacaaatcagagaccctcttcattttgagaagggtgtgggcctcccctggtggtctagtgagtggtgcctgggatggagtgggcgggcaggtgtagccagggctggggatgtgctttgcctggcccagttctcacaggggtctcaggaaaacggggcacccactcccacctccatctgtctccaacctggggtccctggaggccagaaaagtgctcttccatttgagggaacagatgaggagtcaagaggtctgttcttttcaccctgggtctgttacctgtttgctgtgtgaccctgtctgggttggacccccagcccctctggacgatcacgggtggacagtctgagcagacacaggcctcctggtcagggccggaaccatctctgccgacccaccaaggcccccttggggacctgcccacgctgtctcctggaggcctgcctcccttacccctcccctccacttcgctgggctctgccccttggtgccctccctgagggccctgcatgcttgtgcctggggtgctcagcgcctctgctatcttggattcccgtgtactcagcccagagtgaaagggcactgtctacctgtcacagggcaccaagtgaaagccaagagccctcacttttgagggtgagggacagcacagcagaggtgtggcttctggatgcaagcagccatagctgtgtgaccttggacaggtggctcagcctctctggacctctgctaagcaacagggctggacaggacacactctcagggcctctcggcttgggaaaactgcattgactccaggactccaggcgagggaagatgcacccgactctaactaatacccccctccctcctcgggctgaggcctctgccattctcccaaaagtatgcaatcaggcccgcggtgggcctcccagccatgccggcctcctcatatgcaatatttcttctggcttctcatggggatggttcatccccgacttgaaatttcctgacacctttccccagtgagcgccctgcctgcctatgcattttgggaacagcccctgtgacatgtccccttccacctgccctctcccccaaagctgtatttttctctggctgagattagaacacattccttgtaaagtatttttctacatcgggttttcttagggctctcgggaagcacaaggggctgtattgcaaaggccgcttatggtctgtttggggccctcgtctaagtctttgtcccaccaggggttgcagtggcttgggggtaggtgccatggggatgattttttaaaataaaattatttaaatccacctagagtagaagtttgctttttaaaaaaatcatggattggcaagagtcagcttctgtatgggtctggtgacatctcacctgcttttgatgattcattaattcaaaaagtttgccatttgcttccatcatccagcccctgggcaacatgaatcagacagatttaggtcatgtctgcacattctggtggcaggcagacaatcaacaagtaagcaaataaataattatttcaaaaggcatcaagtgcaacaaagaaaacaagggagtaacgggatagagggaccagggtgaggggctttagctcacaatattaggaggggtttctctcaagaggcgacatttgcaatgagacctgaagacaggagccagcctccatggagacctggaggaagagtgtctcaggcagcgggcacagctagtgcaaaggccctgagataggaacgagtttgacggtctcaaggaagagaaagaaggcctgggaggggaatggggctggagactaggttggaggtagcaggaatcagtcgtgaaggcttgggtagggggagcaaatttgattctctgcgcagcagaaagccagaggcaggcagtggtgcctgcatatggagtctctttagcccaggttgggaaggtagtggcaggagggcagcctcnggtctggctgctgccctggagtgtccagagagtgtctagggcaggtgagctacagggtctgggacccagaggccagggccaggccccactggggaggccacagttctgtgagcagaggaagagcttctttccaggaagcgagtactctgtcttgggagtggtgtaggcagggggaaggccaagggaggcagcaggccttgctctaagcgctttgcaagagcttgctggatcctcccaanagcctttggaggtgggctctattcctgtcccatcattacagatgaggaaacaggcacagagaggttnngtaanttgcccaagnccacacaggtagtaagggatggaaccagggcttgaacacaagccacatggccagtacacatagagagaggnaggnaggtaggcanaggctgtcagaaagagccagaaaatgggggtagggtggtcttctattctaacattgtctataaatgagttactgagaattttgtctggttagttgggcaaagggctcaactgactcccgagtttgtccatcccaaagggtggggggcgctgttggcaggaaggctgccccaaacatggacctgttgtgaccccagagagcccctaactgggtattaatgagcgcctgcacctgacggtgggggagtgggagaagggcaatcaggtttgctccccctctaccctttcccccactccgccacccgctttctgcccttctggcaggtcagcccaaggctaaagaggagggactgaaagccgcagcaggtgagcacctaaggccaagagcatcacctccaatcatcctggtggccttgatggggacaatggtttattccagatggggaaactgaggctcaggtgactgctgccagatctcccagctgtacagggctgggcatgtagcaggtagaatcagtagagccagtagagccaagagctcatgggcccgggtgcgaatccaggttctttcatggacttgctgtgtacccctgagtgagcaagctgcttcctctgtgagcctccatgtgggaacctctaacctgggaaaatacctacctttgaggagcgtcctgggattggacgggaagccctttataaaatgtaaagcgtttggcaaacgttgagggggaaatacctcaccagaacacaacccacacatgttggatgttaaaaaggaaatgtttattttcatgttataaggtgattacaaactcctctaaaaaaagcaaagatgaatttaaaatattgatatacatatttatctaaaaagcaaaagagaaaaaaacccctgcaaaatacagggaatcatatcataaaacatttatacacaaaagcttgtatactgcaagactgaactacacaccaaggatcttgttcaaatacaaatgttcctcctcagaaaagtctcttgttggttgattttttttttataaaagtttaaaatatcttaaaaatattttgaagttttaaaaaaatgtcctgatgagccagacatatttctggaaggaggcaagacccacattctcagctttctcttgtgctaaatacagaagtcatgagctctcatggaaagtttcgtttatacggagacatgaaggttgagcattattacacaggtactcgcagagctatgctctgcacacagagccagggctggctgggcgagagggctctgattggagacaggtgccttggggagagttgaggaacgacttccttccaggcggggcctggggacttggtctgcctgtgtctttggtctagaatttggtctgagaatcttataag

SEQ ID NO: 375601 - DNA, 667 bp, Homo sapiens
aactctccctgtactgtgcctaagcctagcacttgtgatgcctccatgccccgaggccctggttagacactcaccattccctgcacctacctcggagaacctgcagctagagctgtttcaagaaaatccattcctggctcacagtgcctccctgagcctcagttacctcatttacaacaagggcgttgggttaggggaccctggaggcccttctctccctgaccgtcaggaaatctctgtggccctagcatggcccatctcaacgcagtgtctcccacttcttcatcttaaaaaattgatttaaacaaccccctcgcttcctttccagatctggctggctgggctatgtgcgggcatcagcatttctgacccatcccaagcagaaagcaggtgaaggactttgcccattctctatagacaggtggaccagagtcatgagctctcatggaaagtttcgtttatacggagacatgaaggttgagcattattacacaggtactcgcagagctatgctctgcacacagagccagggctggctgggcgagagggctctgattggagacaggtgccttggggagagttgaggaacgacttccttccaggcggggcctggggacttggtctgcctgtgtctttggtctagaatttggtctgagaatcttataag

SEQ ID NO: 375602 - DNA, 1148 bp, Homo sapiens
ggaaatgaaacaaactccagagaaacattcttgggaagaataaatgattgctataaacgatcattggaaagaaagcttccaccaagttgcatgataggtgggataaaggaaactcagggcaagcatgttattctgagtgggagcacagaagtgattagtaatgaagggggccggttctgttacccagagttttccagtggcgaggagagtgaagaggatgtacttttcagtaacatggaggaggagcacgagagttgggatgagagtgatgaagagctgttggccatggagattcgcatgagagggcaacctcgctttgccaacttcagagcaaacacattgtctcctgttcgattctttgtggacaaaaaatggaataccatccccctgcgaaacaagtctctgcagagaatctgtgctgtggactatgatgacagctatgatgaaatcctgaatggttatgaggaaaattctgtggtctcttatggacaaggaagcattcagagcatggtgtcatctgactccacatcaccagattcttctttaacagaagaatcacgttctgagacagccagtagtttatcccagaagatttgtaatgggggattatctcctggtaacccaggagattctaaggacatgaaggaaattgagcccaattatgaaagtccctctagtaataatcaggataaagattcatcacaggcttccaaaagctcaataaaagttccagagacccacaaagcagtccttgctctccgattagaagagaaagatggcaagattgctgtacaaactgagaaggaagaaagtaaagcctctacagatgttgctgggcaagcagtaaccataaaccttgtccccacagaagagcaagcaaaaccttaccgagttgtgaacctggaacagccattgtgcaagccatatactgtcgtggatgtgtcagcagccatggccagtgagcacctcgagggccctgttaacagccccaagacaaaaagctcatcctctactccaaactctccagttacatcatcttcattgacaccaggacaaataagtgcccatttccaaaaatccagtgcaattcgataccaagaagtatggacttctagcaccagtccgacgacttaagtatcaggtagaac

SEQ ID NO: 375603 - DNA, 370 bp, Homo sapiens
catgtaagtgatggagaggtttccttttcaataaaatattgaatttccatttactcagactcctttggtttcaattaatagctttttaatttttttcttattatggttcttatgttttatttgttttgagatattttatctttttgttttgattacatgtggaatattttactaatatatcctataggtattattattttcttaaaagcaagctactgaattcagcatattcattatatacagtaatttttcagttcattctcttggattttctacttatacaattctaactgctgtaaatagtgacaattgttcctcctccttaatttttttgtacatccaatttctttcattttctaactgactgcta

SEQ ID NO: 375604 - DNA, 580 bp, Homo sapiens
ccaaacccaagtactgtgtccaggaagatggttacaaaggagtttctaactcatcatatactcttcccaaaccagccttcctctccatcttgagcctgtccttaagatgtcctgtctgtcttgagcctgtccacactctgcctgccctaatgataacatcactcccctttggggactcccttatcattcatgcagagtggttcacttccttccaagtattcagctctgcataccacaggggactctccaggctagccatggtgaggtttctaaggtttttagtacacctttctttgtaactacggaggtatcattcaagtggcttcccagaagaaatgtgatctgcatccaggtgacctcaatagattcctagttgtaggaggggctgccatgatttttaagaactcctccgatgggtgttttgcttactctgcaaaagacacataatacacaacatccaaatgaatattggccttgggctgggcacatggctcatgcctgtaattccagcactttgggaggctgaggcgagaggatcccttgacgctgggagttcgagaccaggctgggcaacatagca

SEQ ID NO: 375605 - DNA, 517 bp, Homo sapiens
gaacaatgatactatttaccatggcaagtggtaggaaaactgttgtccttggacataattgttttttaggagttgcttttgatacccatatcaatttataattctttgtttgaaatgaagtctttacatggttcattgaagagatagattggttatttcatactgataagcattctactcttatttgttatgcattttccttagtgatatattttacttgtactgaacttgaaaatataaaggagaatacatttctaaattattttaaatggctaacactatgatttgtcttatttaaatagatgtctctgcaccggtaagattaatacaatatgtgaatgtctattttttatatcttaactcacaatgagtatatgaaagataatacacgaatatattacattattcatttttagtcatgagtttatttcaataagtttttctaattgtagatactgttttttattctttccttgtatctaaatataaatcaaccattaaaatcattctaactcta

SEQ ID NO: 375606 - DNA, 216 bp, Homo sapiens
tcccacttctgggtatttgcaaatcactttattaggtttttaaaagtattgttgcaggcatgcgaaggggccgatatacttttgccatgtccagagtgtattcaggtcttgtaatgatcatatgggtgtaatattgagtaacaggcaaatgtgggcagaaaatatcaaatgtggttttcagctaagaagtctggttgctcttaattttcagttact

SEQ ID NO: 375607 - DNA, 453 bp, Homo sapiens
catttatagaaagtaagcaaaagttaacatctctcatcaaatcattcattacaatttcagaactgtaaacagtttggtagtggaataagtgaatattattggacattcttaaagtgaatatggcaaatctgtctacctcagtggatacaccggtctcagaagacacctgactggttaaaaatgtctgacccatccccgcaagcccttttttttttttttaaatgtttcccgatcttgtggtagtcttatggtaaatctaagctcctaaaggattttaaaggagcttagcaattaggaactgcttacagttaaatgggattttttaatggggcacactaactaggagtgtaatgtgtatattatttgtgatcatagccttagttcttttttctgctattaccctggcatatctttcaaagtcacaggtgtgtgtcctgccatctcattagtgaa

SEQ ID NO: 375608 - DNA, 1895 bp, Homo sapiens
agcggtgtaaaatacttgaaaaaaattaaaacttcaaaagggacgaatttctctgttaacttttgtttatcctatactgacttattttgaaatgtgaaaaaacaggcagctaccatataaattggtatctatgaaaatactgattactttcttcctgtgattttcactgttaagaaaactttgtcttgaaatgatggacaatcttaatacttgttcagataaagaaatgtgactttcaatacctttaccatttgtatttctttagggaaatattttaataatgattgtaaaaataaaagaaatatggttgagaaaaatagaagaaattaagatgaaatttgaacagttgtaatccacagtcccatttttccctctattttattgccttctactaagttattgaaggcccagatctgcaaaatttacaagctactaattcattgtctcctttaagaatttggagcaaaaattattccgactatgcggaaatgaattcacatcatcatggcaggttttgactatgagggaattcaggttaggttcaaatagaataatggtccatggagaaaaatactttctgatttttcttcaagttggatggaaaggtttttctttatttaaaaaaaaaaaaaaaagtcctcctggagaattttgccttcgaaaaagaagttttataacagctggcctgtagctacattataacttcggtaattaagtgacaaaactgtctcattatgcttttaaaatactgaattaagtgcattccagaaataatacatatcattcatttcaaaatcaacctacctgaattctgactcttcaatcatgagtagccattttacaaaaccaaagggtctcatttcccaaacagtactttaaatatcatcctaatagtaatatcctaatagtaataatcctattaatactcacttcaatgcataaaataaacagccaatgcacttccatcaagtctgcaggcactatataataataaataggtttccaaaatcacttaataaaaacacacagttataatgtgctcggccttcattagcatcctctgcatggggtggttttcatttaacctgaattattttaacattttggctaatttgtttgctgcaatttcatgggtctaaatttttggtttggtttgcaatgtaaatcatattgtatatctgctcctttgttattagatttactttgtgaataatatcttttaaaaattgagttatcaaaaacttaaattataatgtcatcaactaataccaggtaaatatactaatatatatgtagggcatgattaaattgcatatattttgaaatgtcaaactattttttgtttttttaaaaaaatgaatgcatctcttaaacctgtaccattaattttaaaaaagtttcatttggtatttcatattatattttaaaatatttttctttatctagtagtacaggtttaaagaaactttttctgattgaaatgataaaatatgcctcatttcactagaattttaagaataatacatgtaaaagtataactcatataagattataaatatccacaatatcttctttgattttcatgtaacaccactttttactcattcttttatttgttattattcgaaatcattcacaatgtaaatagcatgtttcatgatgtaaaatgtctttgcatttacagactgcagaacaaggtgaatttgtatatgaaaaataagtgatggaaacgtgggattcttataaaacaaagtggaaatgatagttctgtgttatatttacataattcattacaaaattgtctagttaagtcatgcatttatttaccttaaaagtgtccaaactgtcacttataaaatatttaaatcaataaataataccaaaaaggaaaagaa

SEQ ID NO: 375609 - DNA, 732 bp, Homo sapiens
gatactgttcttatattctcttcatgtctagattgtagaaattattaaaaatagctatttagggctatactgagggagcggaaatattcttggttaaagtctgtttatcggcaagagcatttggggatgaaggaaataattccttcctatgaatttgctaggtttctggggattggattcaaagagcagaagtatgatgccaggggctggtaaggactcagccatatagagatttcagctgcattataatgtatatttgagaaattgagttcttattatcagaaaattgacctatgtaatgaaatactagaagaaaactctaaattagaatggctttgttatgaatttttaatgataagtactaacacttaaaagggaaaaaatttttcaaagaaaatgcctaaaaatgtgttgtatctgagatcatcatatatgtagtattacagtgcaaacactattaatgttaatgaggtaggtggatttttttaatgaaaaaacttgaaatattatcaggttgtccccatttatggaatttaagcttgtcagaaagatccagatagctatattaatattttatctgtatttggttgcggttgcttttaaaaataagttttcttataagtcatttcaattttttggtttagagtccatatttcaaaataaaaagttaaaaaaagagtaccttatgtaatttagcaaggtattccataaactcagggaggaaaaaaaaaa

SEQ ID NO: 375610 - DNA, 1099 bp, Homo sapiens
agattaagttatgaaatttatttatattttaccttttaaaagccagaacataacaaatctcactttctggaaagtcatcttattagaaatacaagaagtgcacttaatacaaggaagtaagtttctcggtgccaccagtgaggtggacatacactcacatcagtccctcaaacgaaggtttcgccagatttccctccagacttctgagatgatctgaattcaggaaggtctgagtgaacttcttccagaaattacagtgaacaagctgaccttaacttttgggtcctcccgagaaatcggcagactaggatggaagtgccctgtgagctggggggcccttcaaagggccaaggagaaaacgcaggccgagggaccagccttccaaatgggcttcaagctccaatgacctccgctcgccccctcgaaatgtctggaaaacataatgggcagattttctgtcttcaaagtttccggctaaacctcttcaagttctttattgtttgggactgagacactcagccatgttaatgggtagtttcttttgtatttgccttgaaaggccaaaatatttttatattgccacagacaaagccacctatttaaaaatgaactccatgtccgtcgtttcccaccaggagactatgtaccatgtgtgtgtctctatgtattctggggtcttgaaacaggtttctcatggggatggtcattcaccacggtccagaggggcagaacaggcggcgcttgccttgcccagggggcctggggaacgtgggccctcatctcagatctgcccccagtatgtttaggacgcgagccccagaaggatctgggagtaaacttaacattcactgtgtctctgctctgcatccgccatttgtgtgtgtttctggactgtgggctgtgtgtaccttggttggtgactcagtgagaagaagcaggaatgccaaagatactgtgaatgttctgagttttgttgctgttgttgttgagaggttgtttcactggtatctattgcattgtataataaatgaccagatgaatgaatgagtgaagcaagagagaatgaataaacaagtaaataggtaaagaagtaagcggc

SEQ ID NO: 375611 - DNA, 297 bp, Homo sapiens
aagggaatccgtgctggtgctaagggaattcgtgctggtgcttcgtgctggtgctaagggaattcgtgctggtgcttcgtgctggtgctaagggaattgtgtgtaccttggttggtgactcagtgagaagaagcaggaatgccaaagatactgtgaatgttctgagttttgttgctgttgttgttgagaggttgtttcactggtatctattgcattgtataataaatgaccagatgaatgaatgagtgaagcaagagagaatgaataaacaagtaaataggtaaagaagtaagcggc

SEQ ID NO: 375612 - DNA, 467 bp, Homo sapiens
ccacctcatcctctccttctttggccctgccgctcccatccattctctgggttgtggatcattctctgacacacgggcctcagaggctgcattgtgaagctccaggtctcggggctggggaagagccaaggggcatgaatttgtacttatccggaatactcaggacacacaggcatcccggcctccctcctgtgccacctgcctgaagttgagctgatgccttcaagatctgtttccccaaggcccttctgctgttaggtagccagtgagctgtcctcaggtgcaccctctcctggcccatccccacggggttccctcacaacattccactcccctccctgtactgaccccgggctctgcacagccctggagtccagggccctgaacctggactagcagtcctcacaggtggtggcagggtcacagctagccaaaccaaacacagccggtcattgccagttgctgct

SEQ ID NO: 375613 - DNA, 305 bp, Homo sapiens
aatgtctctgtcatatcactctacacaactggaatcatgtttgtttgcatctctgttatctgtctcctgcctgccttgaatccataaggacaggaaccttgtctgtgttatctctgctgtatccctggtgcctggaatggggttggtgcggagccagcactccatatgttgttgtggaatgaatgatggcacctgggtgctatcctcccagaccctgagcaagtcagctctctaccgccatcgaggccttctgctgctgtcccccactccccagtcacttggcccccaacccatccctggccacc

SEQ ID NO: 375614 - DNA, 449 bp, Homo sapiens
tgacttcacatatctttttcagcgcttatacaaaacggcactatagaacctccattttacagcaccatatgaagtgggaaaattaggtgaaaattttcctgaagcaaccttaacatgcgcagcccttgttggtttgtgacttgtggcctagctcatcagatgagccacgagaatcagacctggattttgatctggccctgttctgacatgcaatgaggcatttgtaggatttagtaatattgctagttcaaagaatactagaaatattagtaagaacctattcaaaagtattcatgagtattttctgcatatgaatcaggaattagaatattttgaaaatgatgttaataaaattttcctctggaaggcctttataatttttattcccaatcatttttcaaatttagaaagtttaatctgtcacaggagaaaaaaaattaaaaattttc

SEQ ID NO: 375615 - DNA, 149 bp, Homo sapiens
ctgatcacaactcatctcacctgttgctgctgaggacatccagacttagtggtgcctggtgtgtactcagaaagggtaattgcccacatttgactgcatattcacaatctgtgaatgaaaaaaaagccaaaagaaaagttggggaatct

SEQ ID NO: 375616 - DNA, 674 bp, Homo sapiens
cggtaattattgagctatttttatagttgattcaagaattagggtggctgatagactttaaacaatattttttcgtttctataaaatgtaacttaaataacaactcttgatttgaaaccataaaatgggatgtagatatttgggggacagaagaaggattgaacaaccagtttatttctctgttgcctgttgccttgtagcttgtcgtcattgttacagccatatttgactctgtgtagaagacattgttgatgccctattgcaaatccacccttctttgcttccttgcccacagaaccatgaattgtttacatatttacccatcagggaagaggactttatcaccacaaagggctatatcttaaatagtcttagcaggtgggataatccctctttccttatccataagtggaggagaggtgaaagtgtcacccaagtctggccagtatgcagggcagtttgcagggggatgtctgcaagaagtttcttccttcacaaataaatatatgaggagttgcgtttcttttcttttcttttttttttttgagactgtgtcttgctctgtctcctatgccagagtgcagtggcatgatcatggctctttgcggtctcaacctccttggctccagtgatccccccacctcagcctctcaagtagctaggccctcaccacc

SEQ ID NO: 375617 - DNA, 377 bp, Homo sapiens
caatccattttgaaggtggtgaatgtaaggctcagagaggttaattgattttcccatgatcacacagcaattgagcagccagtgcagcactcaaaacgggtttctcactgctaggtcccttctcttccactactgtgtctttctcccagtgtctctgtttatacttaggtatcattgtatttatttttcccccagctttatattttgaactcttattatacaaattttcaaacatacagaaaagctaagactagtacagggaacacacttaggtctttatctacattcaccaattgttaacatttgccatatttagctgtataatgtgtgttttgttttggaatgatatggaagttggaggcatctcaatctttcat

SEQ ID NO: 375618 - DNA, 815 bp, Homo sapiens
tgtcgcccaggctgaagtgtagagtgcagtggcatgatctcagctcattgcaacttccacctcctgggttgaagcaattcttctgcctcagcctccggagtagctgggaatacaggtgcaggctgccacgcccggctcatttttgtgttttagtagagatagggtttcaccatgttgcccaggctggtctcaactcctgagctcaggcaatcctcccgccttagcctcccaaagtggtaggattacaggcgtgagccactgcacctggccctcgactcacagattttcaaaatacttttgaacagtaagctgaggacagtgtttattatgactatactggtctcctttcactagctcacaaaatttaactacatcacttgtcagtctcctaaaaatgcagtgtatgtgctttgaaacttgtgaatgatctgctgatttgtgctattttatattcaatgttgttgaaagaatagtttttaaaccaagtaatgcaaaaatttagtgtaacatgaatgcttgtgctgtaaaacatactggaaaatcaatagctctggaataaactttggatttttaattaaaattgattttgatgtacttatgctgttaaattggtagagactagtctgaaaagctgagaaaagataaagcagaattaaaacaaaatctatcttattcgtagagccatgtcaagaatgcattctctctacacctattccaatgggcacattagtacttgattatgcagggagtgaatcatgccaagtcttcacgtacacattgctcctatcactgctgtgcagtgagccgtgactgcg

SEQ ID NO: 375619 - DNA, 577 bp, Homo sapiens
aaaggtcctgccatcagtgagtgtatgtcctggtagcctttaatacacttcatgtttatattatgaaacagtttatagtaagataatatatgaagtatacatgtattaatatatgttatatattttatatgctttaggtttaagttaaagtttttataaaatgttcctcagcttaatgtaactataagtaaaaatgtaaatggttttatgtgggatatgtttgtttctacgtctgtgaatttaatagtaggcctcaaatgattgaaaataagagtaaaatcatacgtgagatttatatcaacatcagactaaaactcattattactaagtgtgatttttctcatatttttctttaagcaaagttactttacttaagtaactttaattctttcctcaatctataaaactcttaattcaaatggggagtttattgtagaaaaaagtatttgtaagtcacattgagtataattggcacattatagacagatactgaaatcaaaaggttgtttggcctattttaatattaagtgcatattgtaattcattttatatctagtagttataatttaatagtttt

SEQ ID NO: 375620 - DNA, 428 bp, Homo sapiens
cccatgtactctgccaactaaattgatttctacagctgggagtagtggacctatcaaaaagtttctaatctctcctgaatttagataaacctgtgcattatatctttttttaaaaagttcaatttaaaagaatttgatcttaagatcttaaagtagaaaattaaacaatttttatttttctgacgaggtcacaaaagatcatcctgtgaacaaagcaaatgtatacctgaactactttcagaaagaagaatatttctattttacttctaaacttcagagacatttagtaagaaaggccatgagctctcctgaataagaagttccaccctcaccaggaggacctagcaattataaatacatacatctgacatcagagcacccaaatatataaagcaaaaaaaaaatttttttcaaactccaccaaaaaa

SEQ ID NO: 375621 - DNA, 478 bp, Homo sapiens
ctttgcatctcatctccaagtggagctgacctggatagtcatcccctggttcctaggtctggccatcggatcctagaacttgcaactgagaagggggagacctggcttccatgtagaggacacacgatttcctcccctctgagggggctcgtgagggtgactgtcgggcctctcctggagcctcagagaaggactcacttgtctgtgggtgaatttggaaggagaacctgggcatacagagcccagccctttggctcactcttcctcttgggagctgacccgcccactgctctatctcttccagccatgcatgttgtggggcctggtcccctgtggatggcccatggtggcctagagctgtctctgccagggggcatatttgtctaattccatcatgcagttttaggcagtccatttgcctgtagatcgaggccatgccctccaacggtggctttatcagcagtaaaacttgcaggtt

SEQ ID NO: 375622 - DNA, 405 bp, Homo sapiens
aaaaaggttaaatacttgcttaaagtcaagttcatgaagcagaactaaaattcaaacctaagttcactaggctccaagcatataccatcaaatgccctaataaattccattttaaaatacatttagtcctgtccaattcttgtaatcaagagcctcaattctttagttgtgtcaaacattctttttaatgccaacttaactacagtaataactactatgcacacagaaaatatcagctggacttttgaggttttattgctaccacactggccttgaacatatgtggaaagacatagataatacaaaacttcagattccataaccttgtaatattaaaacgttttcatgcttctgaaaatttaaggttttgagaatggagtaaagtaagaagatgataagcaacta

SEQ ID NO: 375623 - DNA, 435 bp, Homo sapiens
tcatggcagaaatattaagctcacttatcagagttataaaggcttttaaaatatatatatttcatggcatttcaagcaattgatcacaccagttgggggaagacaagagggtgaccacttgtatgcagaaaaaaaaatactggcaagaaaatgtggcaagtgcttccagtaaagacgcttctttggaattaaatggtgatggatgtttagaaaccagtctcaatgcaaaactgtaatttttgcaaatggttgtgtcttgggatggcattaacatactcagtgttctctatagaaacgaggacatgctattaaaaaagcatccagttcctgcacacaaactgaagtttgatcttaagcgggatgagatattactgcaaattggtttttacttcaaaaacggtttaataacaatcacgcccagagctcaagtgcaca

SEQ ID NO: 375624 - DNA, 332 bp, Homo sapiens
gtcgacggataatactaacagcaataatagtagtcacagtattgtcattgggccagtttctgacccaggagtttcatcttttagcagtattcatgaaattttggcatgcaaacttgttagtgttgaaactcagaaaacaataccccaaaatggcctcaaaagcagaaatttttctctgccctcctatctctcagtcccccaaggatagccatagaaattagaattccttttccccaaggcaggtcatagaaaccagaacccctttttcctaaagccagtcttgaaaccttaaaatattactctttctctctgcctttctgtggaataactgg

SEQ ID NO: 375625 - DNA, 528 bp, Homo sapiens
cctatgtttgaaattaaagctataattgaagataatccgtacaaaatgactaataatttggaaggttttttaaatttttgagcactctaattttgttaaaactgtgaaacaccatagttattgctgtctagagaattgtcatgagcttatctaaatgtttataattgcagtattaaagcactgccattaaaacaaagcctattatatatccccagattaaaagttattctacctcgtgttgagggattttttaaactattgacattttcttttttgctcaaaaacatgctttcaaaatctgccattattttgttaatgattttgagtctgaaaccatttaatattgtgtttattaatgttggtgttctttcactttgctgttaggtcaaaattatgaatgtgcatatagcaacttccagcaggaagggtgggtaaaggttttaatacgtacagtttgttccaactaccatcttattatgctgtattcaaacttgaaaaaaaaaaagatattttaagatggtaggatgg

SEQ ID NO: 375626 - DNA, 362 bp, Homo sapiens
gggctgtttatttagattcaggcctagtgtcaaggtcaaggagacatgaccacagaggcgtgagtggaggaagaggggtttgcagcacatggctccatccccagaggatctgggtggaaacaggaattcattagcttggagtgttcatcatctgggagaaaaacagaggccaaaagccattgggagaaagagtgattcttatttgggatattgccacacctggggagtcaaggcatgagtgagatgaaagctctagtcctggctgggtgtggtggtttatgcctgaaatcccagtgctttaggaagccaaagtgggccaggagttcaggaccagcctgggcaacatagcaagacactatctc

SEQ ID NO: 375627 - DNA, 919 bp, Homo sapiens
aaattagtgatttagtaaatttgcttactggaataaaaaagaaagaattgcaccattatgaataatgtgtcaaattctatgaggttctaaatgtgtggatcttgttgctctgctatttttttccagcagtcgacttcaatcgacatccccctaggtttctgactcaattacatatagatataactttagggatataatacatttttattaaaagataaaatctgtcataatgtctaatttttgtatttttaatggagacagggtttcaccatgttggccagaatgatgtcgatctcctgaactcgtgatccgcccgcctcagcctcccaaagtagcctacattgcctctactttgaagggacaaagttgtcctggtttttttttcccttttattatttcattataactatcctaaaacttacatacattgcctatgtttggcattccataacataataattataataatcccccaatgtcagaaatgtatgtgtgagttcccatgtttattggcaatttataagctttttaatattgtactattttaaactaaaatgtagaaagaatattatgtttatatacagtcagataaattattaactgttgtaatttaagctgaaaatgaaactattttagtatcagtatagaagaaaagtatagtttctaatcatctataattttaaaatgcaaagcctataaaactttcaagatgttttgcctgtttgtttttaagatttataataattttctatctttagcaagtagctatttttaagccaggtaacttctttatttgaactgtattatactctcagaccctcatcctgcctagaaatgaataagtaataaataattactctgtattatttacttcttttattttatagtaaaatattcatttggatggacattaatttga

SEQ ID NO: 375628 - DNA, 1145 bp, Homo sapiens
ctacccaacctacgactctctaagcgacctgaaccgccgggtgcccggccgttgcgcgggctgatgacgtacggaagctgccggcgttgccctctcccaagatggcggccaggtcgcctgctcgggcctcccaggcgactttgccccactgcgcccgcgctctcttctcctttccatttctggaccaaggggctgccataaggagtctgtgactagagatgggaggtggtggccacggcctctcgctgtatgctgtgtggaaggtcgaatcatcatcatcataaaacttaatattgcccttatgtgccaggaactactatctcagcaatggagatgtggtgcttggccgcaatcgtgaatcggccctggaggggacacaggaaggggctgcctgcgactcatgacctcctgcgtgcctgcctgctgacctatgacccttcaagttcccacccctcagccacgcctgtgaggagggtcttgttttgtcgcctacgctggagtgcagtggtgtgatcacagctcactgcagcctcaacttcctggactcaagcgattttcctgcctcaacctcccaagaactaggaccccagatccccatggacaaggcacttgcatgaattgtgaggctcatggagttggggtcggacaacacagagccggctccctccaggagctgcatgtccagagagggaaacaggatgtggacagcaagaatgaatacatgcagaccagtgcccatgggcggagggcagaagagaccgcgcctgaagcctcatccatcctgtgctcatctgcacacggtcagcttctgtgggtcccaagccattctgcccacacatctcctaactgacgtttgggaggcagcagcatctctcctcctcctcgtgcagctgaccacctccagctcagctctgaggcttctccccttcattctcctccagctgaatctgagtcagagtttctaagctggaagaggaccaggaggcctggccctatcctcttaagttttgagcagcagaaaagacaaagccttccgggttttcactatatgatttcattattttcaagagttccaaatttgagtataaaattacggccaggcgcggtggctcatgcctgtaatcccagcactttgggaggccgag

SEQ ID NO: 375629 - DNA, 1068 bp, Homo sapiens
ctacccaacctacgactctctaagcgacctgaaccgccgggtgcccggccgttgcgcgggctgatgacgtacggaagctgccggcgttgccctctcccaagatggcggccaggtcgcctgctcgggcctcccaggcgactttgccccactgcgcccgcgctctcttctcctttccatttctggaccaaggggctgccataaggagtctgtgactagagatgggaggtggtggccacggcctctcgctgtatgctgtgtggaaggtcgaatcatcatcatcataaaacttaatattgcccttatgtgccaggaactactatctcagcaatggagatgtggtgcttggccgcaatcgtgaatcggccctggaggggacacaggaaggggctgcctgcgactcatgacctcctgcgtgcctgcctgctgacctatgacccttcaagttcccacccctcagccacgcctgtgaggaggtatgaagaagacctgaggtgtgaagaagatcgagagggtcttgttttgtcgcctacgctggagtgcagtggtgtgatcacagctcactgcagcctcaacttcctggactcaagcgattttcctgcctcaacctcccaagaactaggaccccaggtgcatgccactacaccaggctaatttgttgtagagaggaggtcttgctatgttgcccaggctggtctcgaactcctgtgcccaaaagatcctcccacctcagcctcccaacatgccaggattacaggcatgagccaccctgcccagctcaataacctaagttctatgaatgaaaaccatgactgcctgtggagtgagggggccgtcaggctggtggggagctgggtgaagacccagccagcccaggccagctcaggtgacctaatccccccagctcccacttccccctccccaagtggtttggccgcagaataagaacagtgctgggggtgctgaaagaggggacgcaaggctggggcaatgcagtgggacccgggggtgtcaggacaagcaagcagcccttaccatgtctgtgtagatctcgattgctcgcatcaaaca

SEQ ID NO: 375630 - DNA, 1031 bp, Homo sapiens
ctacccaacctacgactctctaagcgacctgaaccgccgggtgcccggccgttgcgcgggctgatgacgtacggaagctgccggcgttgccctctcccaagatggcggccaggtcgcctgctcgggcctcccaggcgactttgccccactgcgcccgcgctctcttctcctttccatttctggaccaaggggctgccataaggagtctgtgactagagatgggaggtggtggccacggcctctcgctgtatgctgtgtggaaggtcgaatcatcatcatcataaaacttaatattgcccttatgtgccaggaactactatctcagcaatggagatgtggtgcttggccgcaatcgtgaatcggccctggaggggacacaggaaggggctgcctgcgactcatgacctcctgcgtgcctgcctgctgacctatgacccttcaagttcccacccctcagccacgcctgtgaggagggtcttgttttgtcgcctacgctggagtgcagtggtgtgatcacagctcactgcagcctcaacttcctggactcaagcgattttcctgcctcaacctcccaagaactaggaccccaggtgcatgccactacaccaggctaatttgttgtagagaggaggtcttgctatgttgcccaggctggtctcgaactcctgtgcccaaaagatcctcccacctcagcctcccaacatgccaggattacaggcatgagccaccctgcccagctcaataacctaagttctatgaatgaaaaccatgactgcctgtggagtgagggggccgtcaggctggtggggagctgggtgaagacccagccagcccaggccagctcaggtgacctaatccccccagctcccacttccccctccccaagtggtttggccgcagaataagaacagtgctgggggtgctgaaagaggggacgcaaggctggggcaatgcagtgggacccgggggtgtcaggacaagcaagcagcccttaccatgtctgtgtagatctcgattgctcgcatcaaaca

SEQ ID NO: 375631 - DNA, 700 bp, Homo sapiens
aaggggcaactgagattaaaccacataacatcttcccatctactcccctttccaagtcctgtttctttttccacagctccccaaagctcttcctgattctcccaactcctctgcctctgttcacattctgttcccttcactgcagatccccatggacaaggcacttgcatgaattgtgaggctcatggagttggggtcggacaacacagagccggctccctccaggagctgcatgtccagagagggaaacaggatgtggacagcaagaatgaatacatgcagaccagtgcccatgggcggagggcagaagagaccgcgcctgaagcctcatccatcctgtgctcatctgcacacggtcagcttctgtgggtcccaagccattctgcccacacatctcctaactgacgtttgggaggcagcagcatctctcctcctcctcgtgcagctgaccacctccagctcagctctgaggcttctccccttcattctcctccagctgaatctgagtcagagtttctaagctggaagaggaccaggaggcctggccctatcctcttaagttttgagcagcagaaaagacaaagccttccgggttttcactatatgatttcattattttcaagagttccaaatttgagtataaaattacggccaggcgcggtggctcatgcctgtaatcccagcactttgggaggccgag

SEQ ID NO: 375632 - DNA, 423 bp, Homo sapiens
ctccctatttaacaccctcccactaatgctttgcatcctaaaccttctccccagcactctatcccccaacaccttatttcttcaaaatgctttctccccaacacaaacccctcctaaaccccattgtccccaaccccgcatacctctaacacccttcatttgtgacaccaatccaccctcatctccctcttgcatgctttacctgtcccacacccatgccaatgtgccaagtctcccttggggacccagctgagtctgggtgttcccattgggttgggccaggcaaggcctctggtgcccgctgccgtccccctgcagtgggctctgctaggcctgtgctgagcaacagctgttattgtcatggtttataaacaataaactgtgatgccaggcacatctctgccttccctgaaaaaaatcatt

SEQ ID NO: 375633 - DNA, 1076 bp, Homo sapiens
ggggcaagctcaaacgcagggctgacagggagggatggccccacagccggctgcacagtgcccctgccaccccgcctgggcatctgcctggactatgagcggggccgggtttccttcctggatgctgtttccttccgtgggctcttggagtgccccctggactgctcagggcctgtgtgccctgccttttgcttcatcgggggtggcgcagtacagctccaggagccagtgggcactaagcctgagaggaaagtcaccattgggggcttcgccaagctggactgagccttccaggcccctcatgcagacctggggtcctcctgggccctggcccccaaacctcttggcacccggttgttaccccctggcagcttctcccccaaactctcctaccatgtggccctgctccttctcccgtgtctgtcttcccacagttttctcttgacccaggggctctcttctgcccacctctctggatggcccccgttctctccattgcttgttagccaggcccccacccccactgagtctgccctatgacctgcctttggcatgttacccaagccatggagagagccccttctccatccctgtcctgtgccccccaggctgattgggagggagggcacctggaacactgggcatgatctccagctctgcccttgccctgccaagctccctgccctgttgatgctgaactacagccttgggacaggcaggctttggggctggacgctgtccaggcattcctggtgaggggaaggggaccctgtcatcctgctttatttatttgggtcccaacaccccgcagccgcatgccccttatgtccctcttctccctcttgcatgctttacctgtcccacacccatgccaatgtgccaagtctcccttggggacccagctgagtctgggtgttcccattgggttgggccaggcaaggcctctggtgcccgctgccgtccccctgcagtgggctctgctaggcctgtgctgagcaacagctgttattgtcatggtttataaacaataaactgtgatgccaggcacatctctgccttccctgaaaaaaatcatt

SEQ ID NO: 375634 - DNA, 510 bp, Homo sapiens
cgaagcccgaggagatattgggagctaaccccggggcagtctccagggtcttggcctctctgggcctgggaccggttccaacactctcctggcattgggagccacagttgcagatcccccgaggccagaagccagcactgggccccctgcataaagttaagcatctcagagaatcccctgggcgacagagtgagactccatctgaaaaaaaaaaaaaaaaaaaaaaagactcaggggctgttactcagggagcacttgttagaacaatgaccaggggcaaactccggctggatgactggaaagctgccccaaggactggggcagagtgtggaaccggaatctctggaaacaagtcttttttttatttgtcttaatcaaacaaaagagatttctaagttttttgcgttccttaaaagtgaaggctttgtcaaacatttttgtctactctgggaaatgtacaatgattagaaaagtgcatgtcataatagtttccttttttttctttgagac

SEQ ID NO: 375635 - DNA, 417 bp, Homo sapiens
gtgtgctctgggccatctgcctctctcatccccatggcttgtgctcaggctactctactgggaacaaggagagaaatgaccacttctgacccagtagggatgttagctcctgaataccttgtctacttccccctactccctgcttctggctgtaccccccgccctgcaactgtggtcagtgtgtctggaagtattcaatgcacaatggattatgattatgattacatgtgtctgtgttttccactggaatctgagggacagaatacttgggcaatcagaagggagccacctaagccttctgcaaaaaccaccaccctttgagttttcaaaaagtttcagcaggggtcaagttctacttctttccggaacctgacctgggtcccgtactcattagagtaatctccaagccagtggtta

SEQ ID NO: 375636 - DNA, 747 bp, Homo sapiens
tgaatatcatcagcttacttgtctggcaagggcagaagcctggggttggcctgaactctgccaaacaaatatcaaagtgtatttaatagttaaatttgtgccctttcccttcttgctgcacccatgttgtcacttaacccccaggagttatttattatctttttgtcaaagtcaggctcatttggggtaatgtgatgactgtttaggtttacatgaccctcctctcctttccctacccccaaatatgtatatatacatatataaaatatgtatatattttacctatataaaatatatatatatatacacatatatgtatctatattcctttgtttctttgcctgcttatactggccataaaagagggagctgccttcaatgtataaagtataagaagagtgccagggaatgccataatggaggtttttggatctgaatttggaccatttcactaaagagaacatgagtttgctcaaccctttcctcacaagagggagggccccggttccccagacttctccacgcactggctccataaaggccagctttggccaggctgccacaggggcctgaggagctcactctgggcctacctggtttcagttagagggtcctcctgttatttttccatttaaaaagtatgtcctcataaaactgtactggaaggatgggtggcaggaacttgtatagttcagcttccaacactttggaacagattaaaaagggaatcttttaaataaaaactta

SEQ ID NO: 375637 - DNA, 1001 bp, Homo sapiens
taatcttaaggctgctgtatctgccatataacaaaagtgaagaaaatctaccctcttattctatgtgggatgtgaaaatctaacatatggaagacatttggggataattattaagtcacctaggttaaaatttgtgggcagtggtgcttaaatctagcacattatgaatactcaaattggataaccactaagtatactgaaattggtttattttataaaactttttattaaaagcttaattttttcatccagaattcctagtatcccaaattgtcctaggcagctatacccttctgatagtgatggtaaatctttgataagccgataaacaatgtggactttctagaggtatataacagtaatatttcacttccaattcccagctcttctcccatttctcctaccttctggaccaatgaggacaaacagaattgaagtttaattccactgcacaagtatcttctcaaatctgtgaaatctaccccttttacactataccattccactgctactagttcagctcttattgcctagattatacagccttttaactaatctcactgcttaataaacatgttttcttctagtctgtctgcttcactgcattctaaggtatctttcttaaaatggaactttgatttaaaaatcttccagtagcttcaagaatcagcctataaaattctgacttcttaaagaccctttgtgatccaatctagaccatgcctctttctagccaccacccctcatctttcttgataagaaatgaaggtactccttatttatttttcaccttaggagttctgaactgtgaactgagttccaagtaatgtccctatacctagaacattctctgcctcctactcttcctggctcccttatcttttaagacccatttatggcaatttgaggccatcactatcttttccaatctggattaggtgcccttcctgctagtacatgtcacactgtattgcaacagtccttccttgtctacttccttc

SEQ ID NO: 375638 - DNA, 859 bp, Homo sapiens
gcccccttcggagggactgagctttcacctgcgaatcagcgtcttactggcacttggagaatgtgaatgacaatgtacttgactgcggcttttcctctccccccttcagaggttttatacacctgaaagaagagaatgtcaagacgaagtagccgtttacaagctaagcagcagccccagcccagccagacggaatccccccaagaagcccagataatccaggccaagaagaggaaaactacccaggatgtcaaaaaaagaagagaggaggtcaccaagaaacatcagtatgaaattagggtaatgcagaactgggctgggtgggtttgggggaaaaatggaggatagatgaataagaatagaattatgtgtttattgctttgcgatagattcctctgacacttttacttttaatgcccctagaggtcagcaggaaggcgcctatctttgggtgggtttctatgtgcccgaatcctactacagctgcagaataagtgccttcaagcagctggttcctttttgtaaatccctccctcttggaactgcctggtgcaccagggcccgcctaatctgtccaatatactgctctttgttccctcgcagactctagtagacggtcctaatagctgcttcttgggcataaataggatgtgagatcactgacagcctggcacgcagccctttggtacctcttcttcctatgtgttttacagaaagcagcactttggagatagtgattgcgtttgaaaccagcattattgggaaaagaatcgtttaagtaatcgattccatttttaaggttttgctttcaaatattcaaaagtatcagagcacactttttttaaaaagagcttatttg

SEQ ID NO: 375639 - DNA, 2796 bp, Homo sapiens
  misc_feature (2765)..(2765): n is a, c, g, or t
  misc_feature (2789)..(2789): n is a, c, g, or t
agcgggtgcggggcgggaccggcccggcctatatattgggttggcgccggcgccagctgagccgagcggtagctggtctggcgaggttttatacacctgaaagaagagaatgtcaagacgaagtagccgtttacaagctaagcagcagccccagcccagccagacggaatccccccaagaagcccagataatccaggccaagaagaggaaaactacccaggatgtcaaaaaaagaagagaggaggtcaccaagaaacatcagtatgaaattaggaattgttggccacctgtattatctggggggatcagtccttgcattatcattgaaacacctcacaaagaaataggaacaagtgatttctccagatttacaaattacagatttaaaaatctttttattaatccttcacctttgcctgatttaagctggggatgttcaaaagaagtctggctaaacatgttaaaaaaggagagcagatatgttcatgacaaacattttgaagttctgcattctgacttggaaccacagatgaggtccatacttctagactggcttttagaggtatgtgaagtatacacacttcatagggaaacattttatcttgcacaagacttttttgatagatttatgttgacacaaaaggatataaataaaaatatgcttcaactcattggaattacctcattattcattgcttccaaacttgaggaaatctatgctcctaaactccaagagtttgcttacgtcactgatggtgcttgcagtgaagaggatatcttaaggatggaactcattatattaaaggctttaaaatgggaactttgtcctgtaacaatcatctcctggctaaatctctttctccaagttgatgctcttaaagatgctcctaaagttcttctacctcagtattctcaggaaacattcattcaaatagctcagcttttagatctgtgtattctagccattgattcattagagttccagtacagaatactgactgctgctgccttgtgccattttacctccattgaagtggttaagaaagcctcaggtttggagtgggacagtatttcagaatgtgtagattggatggtaccttttgtcaatgtagtaaaaagtactagtccagtgaagctgaagacttttaagaagattcctatggaagacagacataatatccagacacatacaaactatttggctatgctggaggaagtaaattacataaacaccttcagaaaagggggacagttgtcaccagtgtgcaatggaggcattatgacaccaccgaagagcactgaaaaaccaccaggaaaacactaaagaagataactaagcaaacaagttggaattcaccaagattgggtagaactggtatcactgaactactaaagttttacagaaagtagtgctgtgattgattgccctagccaattcacaagttacactgccattctgattttaaaacttacaattggcactaaagaatacatttaattatttcctatgttagctgttaaagaaacagcaggacttgtttacaaagatgtcttcattcccaaggttactggatagaagccaaccacagtctataccatagcaatgtttttcctttaatccagtgttactgtgtttatcttgataaactaggaattttgtcactggagttttggactggataagtgctaccttaaagggtatactaagtgatacagtactttgaatctagttgttagattctcaaaattcctacactcttgactagtgcaatttggttcttgaaaattaaatttaaacttgtttacaaaggtttagttttgtaataaggtgactaatttatctatagctgctatagcaagctattataaaacttgaatttctacaaatggtgaaatttaatgttttttaaactagtttatttgccttgccataacacattttttaactaataaggcttagatgaacatggtgttcaacctgtgctctaaacagtgggagtaccaaagaaattataaacaagataaatgctgtggctccttcctaactggggctttcttgacatgtaggttgcttggtaataacctttttgtatatcacaatttgggtgaaaaacttaagtaccctttcaaactatttatatgaggaagtcactttactactctaagatatccctaaggaatttttttttttaatttagtgtgactaaggctttatttatgtttgtgaaactgttaaggtcctttctaaattcctccattgtgagataaggacagtgtcaaagtgataaagcttaacacttgacctaaacttctattttcttaaggaagaagagtattaaatatatactgactcctagaaatctatttattaaaaaaagacatgaaaacttgctgtacataggctagctatttctaaatattttaaattagcttttctaaaaaaaaaatccagcctcataaagtagattagaaaactagattgctagtttattttgttatcagatatgtgaatctcttctccctttgaagaaactatacatttattgttacggtatgaagtcttctgtatagtttgtttttaaactaatatttgtttcagtattttgtctgaaaagaaaacaccactaattgtgtacatatgtattatataaacttaaccttttaatactgtttatttttagcccattgtttaaaaaataaaagttaaaaaaatttaactgcttaaaagtaaagttttgccattgcttggagaaacttttttttcncttctctgcgctgccagctgtaancacttct

SEQ ID NO: 375640 - DNA, 2880 bp, Homo sapiens
ctccgggccgcgaggctccgtctccccggcgcggcccgctcgccgtccggctcgctcagggcctgggcagacgcggccgcccgagctaccgcgggttccgagacgccttcgcactgctcctccacccgggggatctttgttcccggagctgttccccgcctcgctgctcccgccgcaaaacctgtttgcggaatacccgccgcaagtctgacttgacgatgtgcagttttgggaggttttatacacctgaaagaagagaatgtcaagacgaagtagccgtttacaagctaagcagcagccccagcccagccagacggaatccccccaagaagcccagataatccaggccaagaagaggaaaactacccaggatgtcaaaaaaagaagagaggaggtcaccaagaaacatcagtatgaaattaggaattgttggccacctgtattatctggggggatcagtccttgcattatcattgaaacacctcacaaagaaataggaacaagtgatttctccagatttacaaattacagatttaaaaatctttttattaatccttcacctttgcctgatttaagctggggatgttcaaaagaagtctggctaaacatgttaaaaaaggagagcagatatgttcatgacaaacattttgaagttctgcattctgacttggaaccacagatgaggtccatacttctagactggcttttagaggtatgtgaagtatacacacttcatagggaaacattttatcttgcacaagacttttttgatagatttatgttgacacaaaaggatataaataaaaatatgcttcaactcattggaattacctcattattcattgcttccaaacttgaggaaatctatgctcctaaactccaagagtttgcttacgtcactgatggtgcttgcagtgaagaggatatcttaaggatggaactcattatattaaaggctttaaaatgggaactttgtcctgtaacaatcatctcctggctaaatctctttctccaagttgatgctcttaaagatgctcctaaagttcttctacctcagtattctcaggaaacattcattcaaatagctcagcttttagatctgtgtattctagccattgattcattagagttccagtacagaatactgactgctgctgccttgtgccattttacctccattgaagtggttaagaaagcctcaggtttggagtgggacagtatttcagaatgtgtagattggatggtaccttttgtcaatgtagtaaaaagtactagtccagtgaagctgaagacttttaagaagattcctatggaagacagacataatatccagacacatacaaactatttggctatgctggaggaagtaaattacataaacaccttcagaaaagggggacagttgtcaccagtgtgcaatggaggcattatgacaccaccgaagagcactgaaaaaccaccaggaaaacactaaagaagataactaagcaaacaagttggaattcaccaagattgggtagaactggtatcactgaactactaaagttttacagaaagtagtgctgtgattgattgccctagccaattcacaagttacactgccattctgattttaaaacttacaattggcactaaagaatacatttaattatttcctatgttagctgttaaagaaacagcaggacttgtttacaaagatgtcttcattcccaaggttactggatagaagccaaccacagtctataccatagcaatgtttttcctttaatccagtgttactgtgtttatcttgataaactaggaattttgtcactggagttttggactggataagtgctaccttaaagggtatactaagtgatacagtactttgaatctagttgttagattctcaaaattcctacactcttgactagtgcaatttggttcttgaaaattaaatttaaacttgtttacaaaggtttagttttgtaataaggtgactaatttatctatagctgctatagcaagctattataaaacttgaatttctacaaatggtgaaatttaatgttttttaaactagtttatttgccttgccataacacattttttaactaataaggcttagatgaacatggtgttcaacctgtgctctaaacagtgggagtaccaaagaaattataaacaagataaatgctgtggctccttcctaactggggctttcttgacatgtaggttgcttggtaataacctttttgtatatcacaatttgggtgaaaaacttaagtaccctttcaaactatttatatgaggaagtcactttactactctaagatatccctaaggaatttttttttttaatttagtgtgactaaggctttatttatgtttgtgaaactgttaaggtcctttctaaattcctccattgtgagataaggacagtgtcaaagtgataaagcttaacacttgacctaaacttctattttcttaaggaagaagagtattaaatatatactgactcctagaaatctatttattaaaaaaagacatgaaaacttgctgtacataggctagctatttctaaatattttaaattagcttttctaaaaaaaaaatccagcctcataaagtagattagaaaactagattgctagtttattttgttatcagatatgtgaatctcttctccctttgaagaaactatacatttattgttacggtatgaagtcttctgtatagtttgtttttaaactaatatttgtttcagtattttgtctgaaaagaaaacaccactaattgtgtacatatgtattatataaacttaaccttttaatactgtttatttttagcccattgtttaaaaaataaaagttaaaaaaatttaactgcttaaaagta

SEQ ID NO: 375641 - DNA, 2745 bp, Homo sapiens
ctccgggccgcgaggctccgtctccccggcgcggcccgctcgccgtccggctcgctcagggcctgggcagacgcggccgcccgagctaccgcgggttccgagacgccttcgcactgctcctccacccgggggatctttgttcccggagctgttccccgcctcgctgctcccgccgcaaaacctgtttgcggaatacccgccgcaagtctgacttgacgatgtgcagttttgggaggttttatacacctgaaagaagagaatgtcaagacgaagtagccgtttacaagctaagcagcagccccagcccagccagacggaatccccccaagaagcccagataatccaggccaagaagaggaaaactacccaggatgtcaaaaaaagaagagaggaggtcaccaagaaacatcagtatgaaattaggaattgttggccacctgtattatctggggggatcagtccttgcattatcattgaaacacctcacaaagaaataggaacaagtgatttctccagatttacaaattacagatttaaaaatctttttattaatccttcacctttgcctgatttaagctggggatgttcaaaagaagtctggctaaacatgttaaaaaaggagagcagatatgttcatgacaaacattttgaagttctgcattctgacttggaaccacagatgaggtccatacttctagactggcttttagaggtatgtgaagtatacacacttcatagggaaacattttattttgcttacgtcactgatggtgcttgcagtgaagaggatatcttaaggatggaactcattatattaaaggctttaaaatgggaactttgtcctgtaacaatcatctcctggctaaatctctttctccaagttgatgctcttaaagatgctcctaaagttcttctacctcagtattctcaggaaacattcattcaaatagctcagcttttagatctgtgtattctagccattgattcattagagttccagtacagaatactgactgctgctgccttgtgccattttacctccattgaagtggttaagaaagcctcaggtttggagtgggacagtatttcagaatgtgtagattggatggtaccttttgtcaatgtagtaaaaagtactagtccagtgaagctgaagacttttaagaagattcctatggaagacagacataatatccagacacatacaaactatttggctatgctggaggaagtaaattacataaacaccttcagaaaagggggacagttgtcaccagtgtgcaatggaggcattatgacaccaccgaagagcactgaaaaaccaccaggaaaacactaaagaagataactaagcaaacaagttggaattcaccaagattgggtagaactggtatcactgaactactaaagttttacagaaagtagtgctgtgattgattgccctagccaattcacaagttacactgccattctgattttaaaacttacaattggcactaaagaatacatttaattatttcctatgttagctgttaaagaaacagcaggacttgtttacaaagatgtcttcattcccaaggttactggatagaagccaaccacagtctataccatagcaatgtttttcctttaatccagtgttactgtgtttatcttgataaactaggaattttgtcactggagttttggactggataagtgctaccttaaagggtatactaagtgatacagtactttgaatctagttgttagattctcaaaattcctacactcttgactagtgcaatttggttcttgaaaattaaatttaaacttgtttacaaaggtttagttttgtaataaggtgactaatttatctatagctgctatagcaagctattataaaacttgaatttctacaaatggtgaaatttaatgttttttaaactagtttatttgccttgccataacacattttttaactaataaggcttagatgaacatggtgttcaacctgtgctctaaacagtgggagtaccaaagaaattataaacaagataaatgctgtggctccttcctaactggggctttcttgacatgtaggttgcttggtaataacctttttgtatatcacaatttgggtgaaaaacttaagtaccctttcaaactatttatatgaggaagtcactttactactctaagatatccctaaggaatttttttttttaatttagtgtgactaaggctttatttatgtttgtgaaactgttaaggtcctttctaaattcctccattgtgagataaggacagtgtcaaagtgataaagcttaacacttgacctaaacttctattttcttaaggaagaagagtattaaatatatactgactcctagaaatctatttattaaaaaaagacatgaaaacttgctgtacataggctagctatttctaaatattttaaattagcttttctaaaaaaaaaatccagcctcataaagtagattagaaaactagattgctagtttattttgttatcagatatgtgaatctcttctccctttgaagaaactatacatttattgttacggtatgaagtcttctgtatagtttgtttttaaactaatatttgtttcagtattttgtctgaaaagaaaacaccactaattgtgtacatatgtattatataaacttaaccttttaatactgtttatttttagcccattgtttaaaaaataaaagttaaaaaaatttaactgcttaaaagta

SEQ ID NO: 375642 - DNA, 2676 bp, Homo sapiens
agcgggtgcggggcgggaccggcccggcctatatattgggttggcgccggcgccagctgagccgagcggtagctggtctggcgaggttttatacacctgaaagaagagaatgtcaagacgaagtagccgtttacaagctaagcagcagccccagcccagccagacggaatccccccaagaagcccagataatccaggccaagaagaggaaaactacccaggatgtcaaaaaaagaagagaggaggtcaccaagaaacatcagtatgaaattaggaattgttggccacctgtattatctggggggatcagtccttgcattatcattgaaacacctcacaaagaaataggaacaagtgatttctccagatttacaaattacagatttaaaaatctttttattaatccttcacctttgcctgatttaagctggggatgttcaaaagaagtctggctaaacatgttaaaaaaggagagcagatatgttcatgacaaacattttgaagttctgcattctgacttggaaccacagatgaggtccatacttctagactggcttttagaggtatgtgaagtatacacacttcatagggaaacattttatcttgcacaagacttttttgatagatttatgttgacacaaaaggatataaataaagaaatctatgctcctaaactccaagagtttgcttacgtcactgatggtgcttgcagtgaagaggatatcttaaggatggaactcattatattaaaggctttaaaatgggaactttgtcctgtaacaatcatctcctggctaaatctctttctccaagttgatgctcttaaagatgctcctaaagttcttctacctcagtattctcaggaaacattcattcaaatagctcagcttttagatctgtgtattctagccattgattcattagagttccagtacagaatactgactgctgctgccttgtgccattttacctccattgaagtggttaagaaagcctcaggtttggagtgggacagtatttcagaatgtgtagattggatggtaccttttgtcaatgtagtaaaaagtactagtccagtgaagctgaagacttttaagaagattcctatggaagacagacataatatccagacacatacaaactatttggctatgctggaggaagtaaattacataaacaccttcagaaaagggggacagttgtcaccagtgtgcaatggaggcattatgacaccaccgaagagcactgaaaaaccaccaggaaaacactaaagaagataactaagcaaacaagttggaattcaccaagattgggtagaactggtatcactgaactactaaagttttacagaaagtagtgctgtgattgattgccctagccaattcacaagttacactgccattctgattttaaaacttacaattggcactaaagaatacatttaattatttcctatgttagctgttaaagaaacagcaggacttgtttacaaagatgtcttcattcccaaggttactggatagaagccaaccacagtctataccatagcaatgtttttcctttaatccagtgttactgtgtttatcttgataaactaggaattttgtcactggagttttggactggataagtgctaccttaaagggtatactaagtgatacagtactttgaatctagttgttagattctcaaaattcctacactcttgactagtgcaatttggttcttgaaaattaaatttaaacttgtttacaaaggtttagttttgtaataaggtgactaatttatctatagctgctatagcaagctattataaaacttgaatttctacaaatggtgaaatttaatgttttttaaactagtttatttgccttgccataacacattttttaactaataaggcttagatgaacatggtgttcaacctgtgctctaaacagtgggagtaccaaagaaattataaacaagataaatgctgtggctccttcctaactggggctttcttgacatgtaggttgcttggtaataacctttttgtatatcacaatttgggtgaaaaacttaagtaccctttcaaactatttatatgaggaagtcactttactactctaagatatccctaaggaatttttttttttaatttagtgtgactaaggctttatttatgtttgtgaaactgttaaggtcctttctaaattcctccattgtgagataaggacagtgtcaaagtgataaagcttaacacttgacctaaacttctattttcttaaggaagaagagtattaaatatatactgactcctagaaatctatttattaaaaaaagacatgaaaacttgctgtacataggctagctatttctaaatattttaaattagcttttctaaaaaaaaaatccagcctcataaagtagattagaaaactagattgctagtttattttgttatcagatatgtgaatctcttctccctttgaagaaactatacatttattgttacggtatgaagtcttctgtatagtttgtttttaaactaatatttgtttcagtattttgtctgaaaagaaaacaccactaattgtgtacatatgtattatataaacttaaccttttaatactgtttatttttagcccattgtttaaaaaataaaagttaaaaaaatttaactgcttaaaagta

SEQ ID NO: 375643 - DNA, 2162 bp, Homo sapiens
ctccaagatgacaaagaaaagaaggaacaatggtcgtgccaaaaagggccgcggccacgtgcagcctattcgctgcactaactgtgcccgatgcgtgcccaaggacaaggccattaagaaattcgtcattcgaaacatagtggaggccgcagcagtcagggacatttctgaagcgagcgtcttcgatgcctatgtgcttcccaagctgtatgtgaagctacattactgtgtgagttgtgcaattcacagcaaagtagtcaggaatcgatctcgtgaagcccgcaaggaccgaacacccccaccccgatttagacctgcgggtgctgccccacgtcccccaccaaagcccatgtaaggagctgagttcttaaagactgaagacaggctattctctggagaaaaataaaatggaaattgtacagaatactgactgctgctgccttgtgccattttacctccattgaagtggttaagaaagcctcaggtttggagtgggacagtatttcagaatgtgtagattggatggtaccttttgtcaatgtagtaaaaagtactagtccagtgaagctgaagacttttaagaagattcctatggaagacagacataatatccagacacatacaaactatttggctatgctggaggaagtaaattacataaacaccttcagaaaagggggacagttgtcaccagtgtgcaatggaggcattatgacaccaccgaagagcactgaaaaaccaccaggaaaacactaaagaagataactaagcaaacaagttggaattcaccaagattgggtagaactggtatcactgaactactaaagttttacagaaagtagtgctgtgattgattgccctagccaattcacaagttacactgccattctgattttaaaacttacaattggcactaaagaatacatttaattatttcctatgttagctgttaaagaaacagcaggacttgtttacaaagatgtcttcattcccaaggttactggatagaagccaaccacagtctataccatagcaatgtttttcctttaatccagtgttactgtgtttatcttgataaactaggaattttgtcactggagttttggactggataagtgctaccttaaagggtatactaagtgatacagtactttgaatctagttgttagattctcaaaattcctacactcttgactagtgcaatttggttcttgaaaattaaatttaaacttgtttacaaaggtttagttttgtaataaggtgactaatttatctatagctgctatagcaagctattataaaacttgaatttctacaaatggtgaaatttaatgttttttaaactagtttatttgccttgccataacacattttttaactaataaggcttagatgaacatggtgttcaacctgtgctctaaacagtgggagtaccaaagaaattataaacaagataaatgctgtggctccttcctaactggggctttcttgacatgtaggttgcttggtaataacctttttgtatatcacaatttgggtgaaaaacttaagtaccctttcaaactatttatatgaggaagtcactttactactctaagatatccctaaggaatttttttttttaatttagtgtgactaaggctttatttatgtttgtgaaactgttaaggtcctttctaaattcctccattgtgagataaggacagtgtcaaagtgataaagcttaacacttgacctaaacttctattttcttaaggaagaagagtattaaatatatactgactcctagaaatctatttattaaaaaaagacatgaaaacttgctgtacataggctagctatttctaaatattttaaattagcttttctaaaaaaaaaatccagcctcataaagtagattagaaaactagattgctagtttattttgttatcagatatgtgaatctcttctccctttgaagaaactatacatttattgttacggtatgaagtcttctgtatagtttgtttttaaactaatatttgtttcagtattttgtctgaaaagaaaacaccactaattgtgtacatatgtattatataaacttaaccttttaatactgtttatttttagcccattgtttaaaaaataaaagttaaaaaaatttaactgcttaaaagta

SEQ ID NO: 375644 - DNA, 357 bp, Homo sapiens
atccctaaggttttagcaagagacatttagtactcatctttctcctaaattgcttgtacttttgtttttcctgttagcttttagatctgtgtattctagccattgattcattagagttccagtacagaatactgactgctgctgccttgtgccattttacctccattgaagtggttaagaaagcctcaggtaagactctctatttgttgtcttcttaccttttcacaacttctaatgggactacagtctctgaactttaacattctgctaaacatgcatttaaaactttggcaaaaaaaaaattagctgttcagtaattatctttctgttagaagtactttccaatcctgaatgtgt

SEQ ID NO: 375645 - DNA, 2730 bp, Homo sapiens
agcgggtgcggggcgggaccggcccggcctatatattgggttggcgccggcgccagctgagccgagcggtagctggtctggcgaggttttatacacctgaaagaagagaatgtcaagacgaagtagccgtttacaagctaagcagcagccccagcccagccagacggaatccccccaagaagcccagataatccaggccaagaagaggaaaactacccaggatgtcaaaaaaagaagagaggaggtcaccaagaaacatcagtatgaaattaggaattgttggccacctgtattatctggggggatcagtccttgcattatcattgaaacacctcacaaagaaataggaacaagtgatttctccagatttacaaattacagatttaaaaatctttttattaatccttcacctttgcctgatttaagctggggatgttcaaaagaagtctggctaaacatgttaaaaaaggagagcagatatgttcatgacaaacattttgaagttctgcattctgacttggaaccacagatgaggtccatacttctagactggcttttagaggtatgtgaagtatacacacttcatagggaaacattttatcttgcacaagacttttttgatagatttatgttgacacaaaaggatataaataaaaatatgcttcaactcattggaattacctcattattcattgcttccaaacttgaggaaatctatgctcctaaactccaagagtttgcttacgtcactgatggtgcttgcagtgaagaggatatcttaaggatggaactcattatattaaaggctttaaaatgggaactttgtcctgtaacaatcatctcctggctaaatctctttctccaagttgatgctcttaaagatgctcctaaagttcttctacctcagtattctcaggaaacattcattcaaatagctcagcttttagatctgtgtattctagccattgattcattagagttccagtacagaatactgactgctgctgccttgtgccattttacctccattgaagtggttaagaaagcctcaggtttggagtgggacagtatttcagaatgtgtagattggatggtaccttttgtcaatgtagtaaaaagtactagtccagtgaagctgaagacttttaagaagattcctatggaagacagacataatatccagacacatacaaactatttggctatgctggaggaagtaaattacataaacaccttcagaaaagggggacagttgtcaccagtgtgcaatggaggcattatgacaccaccgaagagcactgaaaaaccaccaggaaaacactaaagaagataactaagcaaacaagttggaattcaccaagattgggtagaactggtatcactgaactactaaagttttacagaaagtagtgctgtgattgattgccctagccaattcacaagttacactgccattctgattttaaaacttacaattggcactaaagaatacatttaattatttcctatgttagctgttaaagaaacagcaggacttgtttacaaagatgtcttcattcccaaggttactggatagaagccaaccacagtctataccatagcaatgtttttcctttaatccagtgttactgtgtttatcttgataaactaggaattttgtcactggagttttggactggataagtgctaccttaaagggtatactaagtgatacagtactttgaatctagttgttagattctcaaaattcctacactcttgactagtgcaatttggttcttgaaaattaaatttaaacttgtttacaaaggtttagttttgtaataaggtgactaatttatctatagctgctatagcaagctattataaaacttgaatttctacaaatggtgaaatttaatgttttttaaactagtttatttgccttgccataacacattttttaactaataaggcttagatgaacatggtgttcaacctgtgctctaaacagtgggagtaccaaagaaattataaacaagataaatgctgtggctccttcctaactggggctttcttgacatgtaggttgcttggtaataacctttttgtatatcacaatttgggtgaaaaacttaagtaccctttcaaactatttatatgaggaagtcactttactactctaagatatccctaaggaatttttttttttaatttagtgtgactaaggctttatttatgtttgtgaaactgttaaggtcctttctaaattcctccattgtgagataaggacagtgtcaaagtgataaagcttaacacttgacctaaacttctattttcttaaggaagaagagtattaaatatatactgactcctagaaatctatttattaaaaaaagacatgaaaacttgctgtacataggctagctatttctaaatattttaaattagcttttctaaaaaaaaaatccagcctcataaagtagattagaaaactagattgctagtttattttgttatcagatatgtgaatctcttctccctttgaagaaactatacatttattgttacggtatgaagtcttctgtatagtttgtttttaaactaatatttgtttcagtattttgtctgaaaagaaaacaccactaattgtgtacatatgtattatataaacttaaccttttaatactgtttatttttagcccattgtttaaaaaataaaagttaaaaaaatttaactgcttaaaagta

SEQ ID NO: 375646 - DNA, 2524 bp, Homo sapiens
agcgggtgcggggcgggaccggcccggcctatatattgggttggcgccggcgccagctgagccgagcggtagctggtctggcgaggttttatacacctgaaagaagagaatgtcaagacgaagtagccgtttacaagctaagcagcagccccagcccagccagacggaatccccccaagaagcccagataatccaggccaagaagaggaaaactacccagctggggatgttcaaaagaagtctggctaaacatgttaaaaaaggagagcagatatgttcatgacaaacattttgaagttctgcattctgacttggaaccacagatgaggtccatacttctagactggcttttagaggtatgtgaagtatacacacttcatagggaaacattttatcttgcacaagacttttttgatagatttatgttgacacaaaaggatataaataaaaatatgcttcaactcattggaattacctcattattcattgcttccaaacttgaggaaatctatgctcctaaactccaagagtttgcttacgtcactgatggtgcttgcagtgaagaggatatcttaaggatggaactcattatattaaaggctttaaaatgggaactttgtcctgtaacaatcatctcctggctaaatctctttctccaagttgatgctcttaaagatgctcctaaagttcttctacctcagtattctcaggaaacattcattcaaatagctcagcttttagatctgtgtattctagccattgattcattagagttccagtacagaatactgactgctgctgccttgtgccattttacctccattgaagtggttaagaaagcctcaggtttggagtgggacagtatttcagaatgtgtagattggatggtaccttttgtcaatgtagtaaaaagtactagtccagtgaagctgaagacttttaagaagattcctatggaagacagacataatatccagacacatacaaactatttggctatgctggaggaagtaaattacataaacaccttcagaaaagggggacagttgtcaccagtgtgcaatggaggcattatgacaccaccgaagagcactgaaaaaccaccaggaaaacactaaagaagataactaagcaaacaagttggaattcaccaagattgggtagaactggtatcactgaactactaaagttttacagaaagtagtgctgtgattgattgccctagccaattcacaagttacactgccattctgattttaaaacttacaattggcactaaagaatacatttaattatttcctatgttagctgttaaagaaacagcaggacttgtttacaaagatgtcttcattcccaaggttactggatagaagccaaccacagtctataccatagcaatgtttttcctttaatccagtgttactgtgtttatcttgataaactaggaattttgtcactggagttttggactggataagtgctaccttaaagggtatactaagtgatacagtactttgaatctagttgttagattctcaaaattcctacactcttgactagtgcaatttggttcttgaaaattaaatttaaacttgtttacaaaggtttagttttgtaataaggtgactaatttatctatagctgctatagcaagctattataaaacttgaatttctacaaatggtgaaatttaatgttttttaaactagtttatttgccttgccataacacattttttaactaataaggcttagatgaacatggtgttcaacctgtgctctaaacagtgggagtaccaaagaaattataaacaagataaatgctgtggctccttcctaactggggctttcttgacatgtaggttgcttggtaataacctttttgtatatcacaatttgggtgaaaaacttaagtaccctttcaaactatttatatgaggaagtcactttactactctaagatatccctaaggaatttttttttttaatttagtgtgactaaggctttatttatgtttgtgaaactgttaaggtcctttctaaattcctccattgtgagataaggacagtgtcaaagtgataaagcttaacacttgacctaaacttctattttcttaaggaagaagagtattaaatatatactgactcctagaaatctatttattaaaaaaagacatgaaaacttgctgtacataggctagctatttctaaatattttaaattagcttttctaaaaaaaaaatccagcctcataaagtagattagaaaactagattgctagtttattttgttatcagatatgtgaatctcttctccctttgaagaaactatacatttattgttacggtatgaagtcttctgtatagtttgtttttaaactaatatttgtttcagtattttgtctgaaaagaaaacaccactaattgtgtacatatgtattatataaacttaaccttttaatactgtttatttttagcccattgtttaaaaaataaaagttaaaaaaatttaactgcttaaaagta

SEQ ID NO: 375647 - DNA, 1558 bp, Homo sapiens
agcgggtgcggggcgggaccggcccggcctatatattgggttggcgccggcgccagctgagccgagcggtagctggtctggcgaggttttatacacctgaaagaagagaatgtcaagacgaagtagccgtttacaagctaagcagcagccccagcccagccagacggaatccccccaagaagcccagataatccaggccaagaagaggaaaactacccaggatgtcaaaaaaagaagagaggaggtcaccaagaaacatcagtatgaaattaggaattgttggccacctgtattatctggggggatcagtccttgcattatcattgaaacacctcacaaagaaataggaacaagtgatttctccagatttacaaattacagatttaaaaatctttttattaatccttcacctttgcctgatttaagctggggatgttcaaaagaagtctggctaaacatgttaaaaaaggagagcagatatgttcatgacaaacattttgaagttctgcattctgacttggaaccacagatgaggtccatacttctagactggcttttagaggtatgtgaagtatacacacttcatagggaaacattttatcttgcacaagacttttttgatagatttatgttgacacaaaaggatataaataaaaatatgcttcaactcattggaattacctcattattcattgcttccaaacttgaggaaatctatgctcctaaactccaagagtttgcttacgtcactgatggtgcttgcagtgaagaggatatcttaaggatggaactcattatattaaaggctttaaaatgggaactttgtcctgtaacaatcatctcctggctaaatctctttctccaagttgatgctcttaaagatgctcctaaagttcttctacctcagtattctcaggaaacattcattcaaatagctcagctcttctcccatttctcctaccttctggaccaatgaggacaaacagaattgaagtttaattccactgcacaagtatcttctcaaatctgtgaaatctaccccttttacactataccattccactgctactagttcagctcttattgcctagattatacagccttttaactaatctcactgcttaataaacatgttttcttctagtctgtctgcttcactgcattctaaggtatctttcttaaaatggaactttgatttaaaaatcttccagtagcttcaagaatcagcctataaaattctgacttcttaaagaccctttgtgatccaatctagaccatgcctctttctagccaccacccctcatctttcttgataagaaatgaaggtactccttatttatttttcaccttaggagttctgaactgtgaactgagttccaagtaatgtccctatacctagaacattctctgcctcctactcttcctggctcccttatcttttaagacccatttatggcaatttgaggccatcactatcttttccaatctggattaggtgcccttcctgctagtacatgtcacactgtattgcaacagtccttccttgtctacttccttc

SEQ ID NO: 375648 - DNA, 2578 bp, Homo sapiens
agcgggtgcggggcgggaccggcccggcctatatattgggttggcgccggcgccagctgagccgagcggtagctggtctggcgaggttttatacacctgaaagaagagaatgtcaagacgaagtagccgtttacaagctaagcagcagccccagcccagccagacggaatccccccaagaagcccagataatccaggccaagaagaggaaaactacccaggatgtcaaaaaaagaagagaggaggtcaccaagaaacatcagtatgaaattaggctggggatgttcaaaagaagtctggctaaacatgttaaaaaaggagagcagatatgttcatgacaaacattttgaagttctgcattctgacttggaaccacagatgaggtccatacttctagactggcttttagaggtatgtgaagtatacacacttcatagggaaacattttatcttgcacaagacttttttgatagatttatgttgacacaaaaggatataaataaaaatatgcttcaactcattggaattacctcattattcattgcttccaaacttgaggaaatctatgctcctaaactccaagagtttgcttacgtcactgatggtgcttgcagtgaagaggatatcttaaggatggaactcattatattaaaggctttaaaatgggaactttgtcctgtaacaatcatctcctggctaaatctctttctccaagttgatgctcttaaagatgctcctaaagttcttctacctcagtattctcaggaaacattcattcaaatagctcagcttttagatctgtgtattctagccattgattcattagagttccagtacagaatactgactgctgctgccttgtgccattttacctccattgaagtggttaagaaagcctcaggtttggagtgggacagtatttcagaatgtgtagattggatggtaccttttgtcaatgtagtaaaaagtactagtccagtgaagctgaagacttttaagaagattcctatggaagacagacataatatccagacacatacaaactatttggctatgctggaggaagtaaattacataaacaccttcagaaaagggggacagttgtcaccagtgtgcaatggaggcattatgacaccaccgaagagcactgaaaaaccaccaggaaaacactaaagaagataactaagcaaacaagttggaattcaccaagattgggtagaactggtatcactgaactactaaagttttacagaaagtagtgctgtgattgattgccctagccaattcacaagttacactgccattctgattttaaaacttacaattggcactaaagaatacatttaattatttcctatgttagctgttaaagaaacagcaggacttgtttacaaagatgtcttcattcccaaggttactggatagaagccaaccacagtctataccatagcaatgtttttcctttaatccagtgttactgtgtttatcttgataaactaggaattttgtcactggagttttggactggataagtgctaccttaaagggtatactaagtgatacagtactttgaatctagttgttagattctcaaaattcctacactcttgactagtgcaatttggttcttgaaaattaaatttaaacttgtttacaaaggtttagttttgtaataaggtgactaatttatctatagctgctatagcaagctattataaaacttgaatttctacaaatggtgaaatttaatgttttttaaactagtttatttgccttgccataacacattttttaactaataaggcttagatgaacatggtgttcaacctgtgctctaaacagtgggagtaccaaagaaattataaacaagataaatgctgtggctccttcctaactggggctttcttgacatgtaggttgcttggtaataacctttttgtatatcacaatttgggtgaaaaacttaagtaccctttcaaactatttatatgaggaagtcactttactactctaagatatccctaaggaatttttttttttaatttagtgtgactaaggctttatttatgtttgtgaaactgttaaggtcctttctaaattcctccattgtgagataaggacagtgtcaaagtgataaagcttaacacttgacctaaacttctattttcttaaggaagaagagtattaaatatatactgactcctagaaatctatttattaaaaaaagacatgaaaacttgctgtacataggctagctatttctaaatattttaaattagcttttctaaaaaaaaaatccagcctcataaagtagattagaaaactagattgctagtttattttgttatcagatatgtgaatctcttctccctttgaagaaactatacatttattgttacggtatgaagtcttctgtatagtttgtttttaaactaatatttgtttcagtattttgtctgaaaagaaaacaccactaattgtgtacatatgtattatataaacttaaccttttaatactgtttatttttagcccattgtttaaaaaataaaagttaaaaaaatttaactgcttaaaagta

SEQ ID NO: 375649 - DNA, 241 bp, Homo sapiens
cccgctttaaccagtgcaacacgacacgcggcaacgaggtcatctccgtgatgaatcgggccaagaaagcaggtgagctggggcccgctgtggggtcagggccaggtgacagacctctatcgcatatcctgacctctatcaccctcaggaaagtcagtgggagtggtaaccaccacacgggtgcagcatgcctcgccagccggcgcctacgcccacacggtgaaccgcaactggtactcgg

SEQ ID NO: 375650 - DNA, 2500 bp, Homo sapiens
catactccatacctgggatttccgcctcgccgctctccgactgcttccagacatgcaggggccctgggtgctgctcctgctgggcctgaggctacagctctccctgggcatcatcccagttgaggaggagaacccggacttctggaaccgccaggcagccgaggccctgggtgccgccaagaagctgcagcctgcacagacagccgccaagaacctcatcatcttcctgggtgacgggatgggggtgtctacggtgacagctgccaggatcctaaaagggcagaagaaggacaaactggggcctgagaccttcctggccatggaccgcttcccgtacgtggctctgtccaagacatacagtgtagacaagcatgtgccagacagtggagccacagccacggcctacctgtgcggggtcaagggcaacttccagaccattggcttgagtgcagccgcccgctttaaccagtgcaacacgacacgcggcaacgaggtcatctccgtgatgaatcgggccaagaaagcaggaaagtcagtgggagtggtaaccaccacacgggtgcagcatgcctcgccagccggcgcctacgcccacacggtgaaccgcaactggtactcggatgccgacgtgcctgcctcggcccgccaggaggggtgccaggacatcgccacgcagctcatctccaacatggacattgatgtgatcctaggtggaggccgaaagtacatgtttcccatggggaccccagaccctgagtacccagatgactacagccaaggtgggaccaggctggacgggaagaatctggtgcaggaatggctggcgaagcaccagggtgcccggtacgtgtggaaccgcactgagctcctgcaggcttccctggacccgtctgtgacccatctcatgggtctctttgagcctggagacatgaaatacgagatccaccgagactccacactggacccctccctgatggagatgacagaggctgccctgcgcctgctgagcaggaacccccgcggcttcttcctcttcgtggagggtggtcgcatcgaccatggtcatcatgaaagcagggcttaccgggcactgactgagacgatcatgttcgacgacgccattgagagggcgggccagctcaccagcgaggaggacacgctgagcctcgtcactgccgaccactcccacgtcttctccttcggaggctaccccctgcgagggagctccatcttcgggctggcccctggcaaggcccgggacaggaaggcctacacggtcctcctatacggaaacggtccaggctatgtgctcaaggacggcgcccggccggatgttaccgagagcgagagcgggagccccgagtatcggcagcagtcagcagtgcccctggacggagagacccacgcaggcgaggacgtggcggtgttcgcgcgcggcccgcaggcgcacctggttcacggcgtgcaggagcagaccttcatagcgcacgtcatggccttcgccgcctgcctggagccctacaccgcctgcgacctggcgccccgcgccggcaccaccgacgccgcgcacccggggccgtccgtggtccccgcgttgcttcctctgctggcagggaccttgctgctgctggggacggccactgctccctgagtgtcccgtccctggggctcctgcttccccatcccggagttcccctgctccccacctccagtcgtcctgccggacctccacctggagctgtcacccccggagtcgccacacagacgtcctgccatggaaccttcccctcccggtgcaccctggggaccgagcccttgacaccacgccctttgctttatcttgctcttgaaattttggccccaactccagggactggggatttgtgcctggcagctgcctgcatttcaggaaaagaggaggctcagaccatccagcccccgcccatatcctgaggtggatcaggcaggctctctccccggggacatgaggcacccatacctaggaccccctgcgccttttttagcttcagtcatggcagcacctgagggacacaaggacttgggtgcatcaggacgccttggagaagcgtggcttcctgccaccctgcaacccaccctcccagccaaggaggctgctgtggtggggatccccaggggggctttgacacagtcctctgctgtccctccactgggctaattctacacccctgtgcccctcctaggggcccatgagtcagagaggcttgccccaagtcacagccactcagatgttcgacgccccctaaggtccattccagcacccacctgagttccgaggagcacctgggaagctctgggtgcaggatagcagtccagagtccatggccccgcctaggccatctgggtgctgggcatggatttctcagcaaggaagactcattaccttccctccctgggcctccattcttctgggaaacacaaagcaataataaaaggaagtgttagacaatgtaaaaaacag

SEQ ID NO: 375651 - DNA, 2673 bp, Homo sapiens
gtgcccaccgaccggcctcgagcgccccggcgggaggtttttctatatgagtggagaagacagctgttaccagggaggtcatacaacatttttttaggatgtctgaagatgaagaaaaagtgaaattacgccgtcttgaaccagctatccagaaattcattaagatagtaatcccaacagacctggaaaggttaagaaagcaccagataaatattgagaagtatcaaaggtgcagaatctgggacaagttgcatgaagagcatatcaatgcaggacgtacagttcagcaactccgatccaatatccgagaaattgagaaactttgtttgaaagtccgaaaggatgacctagtacttctgaagagaatgatagatcctgttaaagaagaagcatcagcagcaacagcagaatttctccaactccatttggaatctgtagaagaacttaagaagcaatttaatgatgaagaaactttgctacagcctcctttgaccagatccatgactgttggtggagcatttcatactactgaagctgaagctagttctcagagtttgactcagatatatgccttacctgaaattcctcaagatcaaaatgctgcagaatcgtgggaaaccttagaagcggacttaattgaacttagccaactggtcactgacttctctctcctagtgaattctcagcaggagaagattgacagcattgcagaccatgtcaacagtgctgctgtgaatgttgaagagggaaccaaaaacttagggaaggctgcaaaatacaagctggcagctctgcctgtggcaggtgcactcatcgggggaatggtagggggtcctattggcctccttgcaggcttcaaagtggcaggaattgcagctgcacttggtggtggggtgttgggcttcacaggtggaaaattgatacaaagaaagaaacagaaaatgatggagaagctcacttccagctgtccagatcttcccagccaaactgacaagaaatgcagttaaaaaccaaatttcagtattattggtgccaacatgtctatcctgaggacctttgctgctgttggacactccgtcaccttttggaacacaagtatatcaagatagtggctactgatgttcaagtgggattgaagtgtgataaatggatatattttgttgtttgctggggtgttcatggagatgttaagagattgaggccctgggctgagggtatataatgtatgtcaggtaaagtttgaagactgccaaggagcagattttctccctggaaatgtgaaaactgaacctataactctgataaggacttgagatgtgtagaaacgttgggttatggaagactagtttcttccataaccctgaattggagaccttaatgctaagtgtagattattgaggtttgttagtgaggaaaagaataagagttcagaagcctttgttatcagatagcgaaatcagggcctagtgaggagcacaggtcgactacataatggagtccattggcgaaccctattgcaatttggtccaactatatcttctggtgaaggaaattaatgatgtaagaaaatgcaagaggctcaacttctcttccaaaaatcttctggcttctgaactcttcctctgcctctctttaaataaataacacagaatttcaagtggtaggagacttattaagccagtcaccaagcttggtctgtcagcctgtcttctaacacctcaaagatcttgtgccctgtgctgtccctcccttgtaattatgaaaagttctttggtttctggggtgaattctacccatgtataatgaggaattctctcataaccttttttgtcttgtctgtcatctctgttcatcccttcctataacctctaggtaaaaagaaaagaaaaaaagaaatttcgagatattttcaacattgttagagtttgggctaaaatgagcaaggagaaaaaaaccaccaagaacatttcctggggcatgttccagttttgaggggtgatatatctgccagatagggggtatctgacccagtcttcttttcagctggtctctggggggagctgagaactcgcttgctacctcacatccttttccccagactttttatctcctatgcatccctttgctttctatagctggtgtttcttccccaaaatggcgttcccatgcttacctttctcacattctagacaatgatggacaaagacgcatgcaagactcagacccggggaatggtgtggtgctaatctcaacacctgacattcacagcaagcatggcccagcccaaccgcatgtctatctcaaaccgcagaaaggctttaatactggaaaaaaagaattcaagactacaggcagctcccctctgtaccccaactcatttaaaataggaggaatcactttttgccttacttaacgcttttttctgagcacagggatgggcacctgcaccccagaaggtgtgagctgtctctctgccaggagctaaggttcattaggggattggatggtttatcacttctttctttctgagtttacttttagtaacttttattgatggctacctttcatgtccctgtctaaagagactttctctttcatacgtcttaaatctcatcaatgaaatccagtgaaacagcaccatttcttagtatcattaaataactagaaagtatc

SEQ ID NO: 375652 - DNA, 6864 bp, Homo sapiens
gtgcccaccgaccggcctcgagcgccccggcgggaggtttttctatatgagtggagaagacagctgttaccagggaggtcatacaacatttttttaggatgtctgaagatgaagaaaaagtgaaattacgccgtcttgaaccagctatccagaaattcattaagatagtaatcccaacagacctggaaaggttaagaaagcaccagataaatattgagaagtatcaaaggtgcagaatctgggacaagttgcatgaagagcatatcaatgcaggacgtacagttcagcaactccgatccaatatccgagaaattgagaaactttgtttgaaagtccgaaaggatgacctagtacttctgaagagaatgatagatcctgttaaagaagaagcatcagcagcaacagcagaatttctccaactccatttggaatctgtagaagaacttaagaagcaatttaatgatgaagaaactttgctacagcctcctttgaccagatccatgactgttggtggagcatttcatactactgaagctgaagctagttctcagagtttgactcagatatatgccttacctgaaattcctcaagatcaaaatgctgcagaatcgtgggaaaccttagaagcggacttaattgaacttagccaactggtcactgacttctctctcctagtgaattctcagcaggagaagattgacagcattgcagaccatgtcaacagtgctgctgtgaatgttgaagagggaaccaaaaacttagggaaggctgcaaaatacaagctggcagctctgcctgtggcaggtgcactcatcgggggaatggtagggggtcctattggcctccttgcaggcttcaaagtggcaggaattgcagctgcacttggtggtggggtgttgggcttcacaggtggaaaattgatacaaagaaagaaacagaaaatgatggagaagctcacttccagctgtccagatcttcccagccaaactgacaagaaatgcagttaaaaaccaaatttcagtattattggtgccaacatgtctatcctgaggacctttgctgctgttggacactccgtcaccttttggaacacaagtatatcaagatagtggctactgatgttcaagtgggattgaagtgtgataaatggatatattttgttgtttgctggggtgttcatggagatgttaagagattgaggccctgggctgagggtatataatgtatgtcaggtaaagtttgaagactgccaaggagcagattttctccctggaaatgtgaaaactgaacctataactctgataaggacttgagatgtgtagaaacgttgggttatggaagactagtttcttccataaccctgaattggagaccttaatgctaagtgtagattattgaggtttgttagtgaggaaaagaataagagttcagaagcctttgttatcagatagcgaaatcagggcctagtgaggagcacaggtcgactacataatggagtccattggcgaaccctattgcaatttggtccaactatatcttctggtgaaggaaattaatgatgtaagaaaatgcaagaggctcaacttctcttccaaaaatcttctggcttctgaactcttcctctgcctctctttaaataaataacacagaatttcaagtggtaggagacttattaagccagtcaccaagcttggtctgtcagcctgtcttctaacacctcaaagatcttgtgccctgtgctgtccctcccttgtaattatgaaaagttctttggtttctggggtgaattctacccatgtataatgaggaattctctcataaccttttttgtcttgtctgtcatctctgttcatcccttcctataacctctaggtaaaaagaaaagaaaaaaagaaatttcgagatattttcaacattgttagagtttgggctaaaatgagcaaggagaaaaaaaccaccaagaacatttcctggggcatgttccagttttgaggggtgatatatctgccagatagggggtatctgacccagtcttcttttcagctggtctctggggggagctgagaactcgcttgctacctcacatccttttccccagactttttatctcctatgcatccctttgctttctatagctggtgtttcttccccaaaatggcgttcccatgcttacctttctcacattctagacaatgatggacaaagacgcatgcaagactcagacccggggaatggtgtggtgctaatctcaacacctgacattcacagcaagcatggcccagcccaaccgcatgtctatctcaaaccgcagaaaggctttaatactggaaaaaaagaattcaagactacaggcagctcccctctgtaccccaactcatttaaaataggaggaatcactttttgccttacttaacgcttttttctgagcacagggatgggcacctgcaccccagaaggtgtgagctgtctctctgccaggagctaaggttcattaggggattggatggtttatcacttctttctttctgagtttacttttagtaacttttattgatggctacctttcatgtccctgtctaaagagactttctctttcatacgtcttaaatctcatcaatgaaatccagtgaaacagcaccatttcttagtatcattaaataactagaaagtatcaagtattgctctctgctgctttatatcattaacatattaataataccaagaaggaaatactttgaataagtgtcagattctgatccagtattggacacctgtgatattggacacctgtgaggctgggataattacttttgaattacacctcttctctagtttctggaccttgctctgtcactttaacacagggtgatcaaacctgaatgaggatcagaactcacccaggcacatactaaagcaagattcctaaacctcagttccaggggtaattctgacatcacccgtccagcatagtcagctgaaattataaatctaagaaacagttacatcaagattctgctgtgtcatttaattctgaaactcccagtattctacccttcttcatcactgcatattaccccactcttccatcccaaattggctatcctttcagcccaccaacttagcggcagcactagggattcattataaggtaaatctggtttacataaagacctgaaggaggcctgtatttgaagctcacacttggtattggtatctctcatttttactgagccagtgtggaataccactgtatgtactcatataagcccttgacttttactgctcatcaggattggaatattactctagcagtcttcacacataggcaagttacagtccttttaaaaagtatctcatttccctataatggaacctaatagccaactttttcatagaaattgctagaagagtttgatcaactataaatgataaagtgtttataagcatagtcagtgtgacacagaaaccaatcttaaaattgaatttaatgttttatcatatcagattaaatattttctccatgtcttatttttactgcaacaagttagaaagtgggaacactttgattaatgtcttaaaatttgtgggccctcatttggataaaggcagcaatcctaaggactttttttttttttaacataatctgagaatttctctgtagagcagagactttcaaaccttttggctgtaacccacagtaaaaaacgcatttatatcaaaccttagaatatgtttaatgaacaatacttaccattctgatgctttttattgtttcagtttttaaaatatgccagttgcaacccactaaattgatatctaccaatgggttgcaacccttagcttgaaaaaaacaccctcacagaggaactggtatttcttgaataccttctgtttgccaggcacttcaccaggcattttacaagtaaggaaactgggcttcagagaaaataatttgcagaggtttactcaactacaaaggggtgaagccaggaatgttaactaggtctgttgagctacaaaaacttttatgtctctcagactatacagcctctatacaaaattgagatgggggttgggggcaggggctcatgcctgcaatcccagcacttagggaggcagaggccagaggatcacttgagcccaggagtttgagaccagcctgggcaacatagtgagactctgtctgtatgaaaaaaattaagaattagctgggtgtggcatagcacacacctgtggtcccagctacatgggaagctgaagtgggaggatcacttgaactcaggagcagccttggtgacagaacaagaccctctctcaaaaaaatatttaaaaaaaggtgggtcatccattctcctttaccaaacaggctttgaaatgacacattccattcatttgcatctttttaaaaaacttctgattccttactgagtgtccagcagcctcaaagtttttaatggtagctgatgcagacataaacagtgctcaatttggcccttaaactataaaatcaagaaagagtatttcaatcccatccacctgcctgcaagatttcttaatgttcactagttataaccattgtttaaacagtgctttttgtgtaatttaaaaataaactttaatgctttttaaaacaaatttatcataattcatagatcaaatgattatcctttaaaatgatacccttgggaaatcatgtacttactgtagtgatgctagtattaatattacttagaccaattttgaaactgttctttcagaattgcctccaaagacattttgcagatcatcccagaaaagggggtatgatggtgctgtgtagaactgaccagagttcctggaggattttgaggttatactgaaactgagtgctgtacagggagaattgcatgagtccagaaacttccttctgtgggctgcctgccttcctgccctcccttaagtgctctaagatttttgtacaggagtaagaatcaaatactggtaacatcaatcacaagaagttgaggaaacctgtaatatagctagataatatacaacgtttgtcttccatcagagtgcagaaaccaaaccatgctttgtgttaaccttaaatatgaaaggtgtttctcagggtcccctttgtccttcgttgctgccatatgaaatcttacaaggaaggatgaggaaaagcctggggggaggttctcctcggaaatgaggtggttttttttgttattaagtagaacgtggctgtggttcacaggtacttaacgaatgttagatgatgttcttaagtaatcagaggcctaataaaaggcaggggagtttctcttctagcctaaattaatattaaaagttcaggggtattttttgtttttaaattaatactttattgtttttaacaggtggttctcataatttacattcattaatttgatgcccttttacaaagaaacttcttaggtattataaaccatcaatgtaaaggatccacatggtatgtatccacattgctactctcaaatagaaatgggagataagaaatatatctgtgcaatattaaattgaaaaaaaaaacccataaaaagtgtcaaaggcaaataatttgctctagatcacaaaactagttagcacaaggctaggattataaccagggtctaggaaaaaatcctgaaggtgatttaactgagtgttaggccctgtcaagccacctgctaaggctcatggtctttcagactagcttcaacattccaaatcaggcaatagctacaacggaaagataattggacggggaatcctgagatcagagtcctagtttggctttgtctcttgtagcaggattttttaaatcaggggcagctctcttctcccatcccagccatgaatctttcaaccttagtggtcaccaacttgactccattccttatatcaagccttgtcctgtcaattctcccttaaatgttagttgcatccatttctaaatatatccatggccatcaccctagtaaaaagactattacctcacaccccgcacttgatcttcccccaactttaagtgactcagttccttatatcactgccacaagaattaacaaccatgtccatctttcatttttctgctgaaagattttcagtggttcccactgaataccaaataaagttcgaatcccttagattggcattcacagccttctacgttctggccccagctttatctcttgaaactcactactcaccatctgacaatgccactaaaaatccacaagagtgattttaaggtttttctatggtgaaggttcaaactggtaataaaccatgtttacatttttctggtctaaaataatttctatattactttataatagtcagctgggggttatttaagctcttggacgagcctaaaacttgtatcctgaagaaaatatttttttccaccagaagaaattgctttcaatttcttaaccttcaaaacaatgtcagtgttgtcacctgtgcatttgatagccacagcacaagtattcttcaggagcataaatcctccagccttgaatggaccattgtccagctcctgtgaaaaacttaatatttgagaaagacattcaatggtacatgttttctgtacacttcatgagtagttgagattttcttgtattaaggttaatcactaaaaaggtgtttacttgggtttcgttaactaaaccccctaaagatgttttccattttattgttaaacacttggtgttagcaagggtcagcacgagaaaaggcccaatggcaagaatttctgcaaactctgtaaagcttactgaattcatttgtcatttattacattgctgagtggtgcttgaataaggaaacatgcaataaatttacttatttaaccaa

SEQ ID NO: 375653 - DNA, 6936 bp, Homo sapiens
gtgcccaccgaccggcctcgagcgccccggcgggaggtttttctatatgagtggagaagacagctgttaccagggaggtcatacaacatttttttaggatgtctgaagatgaagaaaaagtgaaattacgccgtcttgaaccagctatccagaaattcattaagatagtaatcccaacagacctggaaaggttaagaaagcaccagataaatattgagaagtatcaaaggtgcagaatctgggacaagttgcatgaagagcatatcaatgcaggacgtacagttcagcaactccgatccaatatccgagaaattgagaaactttgtttgaaagtccgaaaggatgacctagtacttctgaagagaatgatagatcctgttaaagaagaagcatcagcagcaacagcagaatttctccaactccatttggaatctgtagaagaacttaagaagcaatttaatgatgaagaaactttgctacagcctcctttgaccagatccatgactgttggtggagcatttcatactactgaagctgaagctagttctcagagtttgactcagatatatgccttacctgaaattcctcaagatcaaaatgctgcagaatcgtgggaaaccttagaagcggtatgttaaaaaatgttttctttttggtagttgtgaggcataaaagtaacttcctctccctttcttttaaaggacttaattgaacttagccaactggtcactgacttctctctcctagtgaattctcagcaggagaagattgacagcattgcagaccatgtcaacagtgctgctgtgaatgttgaagagggaaccaaaaacttagggaaggctgcaaaatacaagctggcagctctgcctgtggcaggtgcactcatcgggggaatggtagggggtcctattggcctccttgcaggcttcaaagtggcaggaattgcagctgcacttggtggtggggtgttgggcttcacaggtggaaaattgatacaaagaaagaaacagaaaatgatggagaagctcacttccagctgtccagatcttcccagccaaactgacaagaaatgcagttaaaaaccaaatttcagtattattggtgccaacatgtctatcctgaggacctttgctgctgttggacactccgtcaccttttggaacacaagtatatcaagatagtggctactgatgttcaagtgggattgaagtgtgataaatggatatattttgttgtttgctggggtgttcatggagatgttaagagattgaggccctgggctgagggtatataatgtatgtcaggtaaagtttgaagactgccaaggagcagattttctccctggaaatgtgaaaactgaacctataactctgataaggacttgagatgtgtagaaacgttgggttatggaagactagtttcttccataaccctgaattggagaccttaatgctaagtgtagattattgaggtttgttagtgaggaaaagaataagagttcagaagcctttgttatcagatagcgaaatcagggcctagtgaggagcacaggtcgactacataatggagtccattggcgaaccctattgcaatttggtccaactatatcttctggtgaaggaaattaatgatgtaagaaaatgcaagaggctcaacttctcttccaaaaatcttctggcttctgaactcttcctctgcctctctttaaataaataacacagaatttcaagtggtaggagacttattaagccagtcaccaagcttggtctgtcagcctgtcttctaacacctcaaagatcttgtgccctgtgctgtccctcccttgtaattatgaaaagttctttggtttctggggtgaattctacccatgtataatgaggaattctctcataaccttttttgtcttgtctgtcatctctgttcatcccttcctataacctctaggtaaaaagaaaagaaaaaaagaaatttcgagatattttcaacattgttagagtttgggctaaaatgagcaaggagaaaaaaaccaccaagaacatttcctggggcatgttccagttttgaggggtgatatatctgccagatagggggtatctgacccagtcttcttttcagctggtctctggggggagctgagaactcgcttgctacctcacatccttttccccagactttttatctcctatgcatccctttgctttctatagctggtgtttcttccccaaaatggcgttcccatgcttacctttctcacattctagacaatgatggacaaagacgcatgcaagactcagacccggggaatggtgtggtgctaatctcaacacctgacattcacagcaagcatggcccagcccaaccgcatgtctatctcaaaccgcagaaaggctttaatactggaaaaaaagaattcaagactacaggcagctcccctctgtaccccaactcatttaaaataggaggaatcactttttgccttacttaacgcttttttctgagcacagggatgggcacctgcaccccagaaggtgtgagctgtctctctgccaggagctaaggttcattaggggattggatggtttatcacttctttctttctgagtttacttttagtaacttttattgatggctacctttcatgtccctgtctaaagagactttctctttcatacgtcttaaatctcatcaatgaaatccagtgaaacagcaccatttcttagtatcattaaataactagaaagtatcaagtattgctctctgctgctttatatcattaacatattaataataccaagaaggaaatactttgaataagtgtcagattctgatccagtattggacacctgtgatattggacacctgtgaggctgggataattacttttgaattacacctcttctctagtttctggaccttgctctgtcactttaacacagggtgatcaaacctgaatgaggatcagaactcacccaggcacatactaaagcaagattcctaaacctcagttccaggggtaattctgacatcacccgtccagcatagtcagctgaaattataaatctaagaaacagttacatcaagattctgctgtgtcatttaattctgaaactcccagtattctacccttcttcatcactgcatattaccccactcttccatcccaaattggctatcctttcagcccaccaacttagcggcagcactagggattcattataaggtaaatctggtttacataaagacctgaaggaggcctgtatttgaagctcacacttggtattggtatctctcatttttactgagccagtgtggaataccactgtatgtactcatataagcccttgacttttactgctcatcaggattggaatattactctagcagtcttcacacataggcaagttacagtccttttaaaaagtatctcatttccctataatggaacctaatagccaactttttcatagaaattgctagaagagtttgatcaactataaatgataaagtgtttataagcatagtcagtgtgacacagaaaccaatcttaaaattgaatttaatgttttatcatatcagattaaatattttctccatgtcttatttttactgcaacaagttagaaagtgggaacactttgattaatgtcttaaaatttgtgggccctcatttggataaaggcagcaatcctaaggactttttttttttttaacataatctgagaatttctctgtagagcagagactttcaaaccttttggctgtaacccacagtaaaaaacgcatttatatcaaaccttagaatatgtttaatgaacaatacttaccattctgatgctttttattgtttcagtttttaaaatatgccagttgcaacccactaaattgatatctaccaatgggttgcaacccttagcttgaaaaaaacaccctcacagaggaactggtatttcttgaataccttctgtttgccaggcacttcaccaggcattttacaagtaaggaaactgggcttcagagaaaataatttgcagaggtttactcaactacaaaggggtgaagccaggaatgttaactaggtctgttgagctacaaaaacttttatgtctctcagactatacagcctctatacaaaattgagatgggggttgggggcaggggctcatgcctgcaatcccagcacttagggaggcagaggccagaggatcacttgagcccaggagtttgagaccagcctgggcaacatagtgagactctgtctgtatgaaaaaaattaagaattagctgggtgtggcatagcacacacctgtggtcccagctacatgggaagctgaagtgggaggatcacttgaactcaggagcagccttggtgacagaacaagaccctctctcaaaaaaatatttaaaaaaaggtgggtcatccattctcctttaccaaacaggctttgaaatgacacattccattcatttgcatctttttaaaaaacttctgattccttactgagtgtccagcagcctcaaagtttttaatggtagctgatgcagacataaacagtgctcaatttggcccttaaactataaaatcaagaaagagtatttcaatcccatccacctgcctgcaagatttcttaatgttcactagttataaccattgtttaaacagtgctttttgtgtaatttaaaaataaactttaatgctttttaaaacaaatttatcataattcatagatcaaatgattatcctttaaaatgatacccttgggaaatcatgtacttactgtagtgatgctagtattaatattacttagaccaattttgaaactgttctttcagaattgcctccaaagacattttgcagatcatcccagaaaagggggtatgatggtgctgtgtagaactgaccagagttcctggaggattttgaggttatactgaaactgagtgctgtacagggagaattgcatgagtccagaaacttccttctgtgggctgcctgccttcctgccctcccttaagtgctctaagatttttgtacaggagtaagaatcaaatactggtaacatcaatcacaagaagttgaggaaacctgtaatatagctagataatatacaacgtttgtcttccatcagagtgcagaaaccaaaccatgctttgtgttaaccttaaatatgaaaggtgtttctcagggtcccctttgtccttcgttgctgccatatgaaatcttacaaggaaggatgaggaaaagcctggggggaggttctcctcggaaatgaggtggttttttttgttattaagtagaacgtggctgtggttcacaggtacttaacgaatgttagatgatgttcttaagtaatcagaggcctaataaaaggcaggggagtttctcttctagcctaaattaatattaaaagttcaggggtattttttgtttttaaattaatactttattgtttttaacaggtggttctcataatttacattcattaatttgatgcccttttacaaagaaacttcttaggtattataaaccatcaatgtaaaggatccacatggtatgtatccacattgctactctcaaatagaaatgggagataagaaatatatctgtgcaatattaaattgaaaaaaaaaacccataaaaagtgtcaaaggcaaataatttgctctagatcacaaaactagttagcacaaggctaggattataaccagggtctaggaaaaaatcctgaaggtgatttaactgagtgttaggccctgtcaagccacctgctaaggctcatggtctttcagactagcttcaacattccaaatcaggcaatagctacaacggaaagataattggacggggaatcctgagatcagagtcctagtttggctttgtctcttgtagcaggattttttaaatcaggggcagctctcttctcccatcccagccatgaatctttcaaccttagtggtcaccaacttgactccattccttatatcaagccttgtcctgtcaattctcccttaaatgttagttgcatccatttctaaatatatccatggccatcaccctagtaaaaagactattacctcacaccccgcacttgatcttcccccaactttaagtgactcagttccttatatcactgccacaagaattaacaaccatgtccatctttcatttttctgctgaaagattttcagtggttcccactgaataccaaataaagttcgaatcccttagattggcattcacagccttctacgttctggccccagctttatctcttgaaactcactactcaccatctgacaatgccactaaaaatccacaagagtgattttaaggtttttctatggtgaaggttcaaactggtaataaaccatgtttacatttttctggtctaaaataatttctatattactttataatagtcagctgggggttatttaagctcttggacgagcctaaaacttgtatcctgaagaaaatatttttttccaccagaagaaattgctttcaatttcttaaccttcaaaacaatgtcagtgttgtcacctgtgcatttgatagccacagcacaagtattcttcaggagcataaatcctccagccttgaatggaccattgtccagctcctgtgaaaaacttaatatttgagaaagacattcaatggtacatgttttctgtacacttcatgagtagttgagattttcttgtattaaggttaatcactaaaaaggtgtttacttgggtttcgttaactaaaccccctaaagatgttttccattttattgttaaacacttggtgttagcaagggtcagcacgagaaaaggcccaatggcaagaatttctgcaaactctgtaaagcttactgaattcatttgtcatttattacattgctgagtggtgcttgaataaggaaacatgcaataaatttacttatttaaccaa

SEQ ID NO: 375654 - DNA, 6753 bp, Homo sapiens
atcctttagggtcttactcttatgattcattaggcttaactatagcgctgctcagtctgtggctaattatttctcatcatgggggcaaaacctttttgagtgcactactcaatgccctgtgaattaagagttttcccattttggctggtggcaacaggcagtgtctccagtgttgacaactccgatccaatatccgagaaattgagaaactttgtttgaaagtccgaaaggatgacctagtacttctgaagagaatgatagatcctgttaaagaagaagcatcagcagcaacagcagaatttctccaactccatttggaatctgtagaagaacttaagaagcaatttaatgatgaagaaactttgctacagcctcctttgaccagatccatgactgttggtggagcatttcatactactgaagctgaagctagttctcagagtttgactcagatatatgccttacctgaaattcctcaagatcaaaatgctgcagaatcgtgggaaaccttagaagcggacttaattgaacttagccaactggtcactgacttctctctcctagtgaattctcagcaggagaagattgacagcattgcagaccatgtcaacagtgctgctgtgaatgttgaagagggaaccaaaaacttagggaaggctgcaaaatacaagctggcagctctgcctgtggcaggtgcactcatcgggggaatggtagggggtcctattggcctccttgcaggcttcaaagtggcaggaattgcagctgcacttggtggtggggtgttgggcttcacaggtggaaaattgatacaaagaaagaaacagaaaatgatggagaagctcacttccagctgtccagatcttcccagccaaactgacaagaaatgcagttaaaaaccaaatttcagtattattggtgccaacatgtctatcctgaggacctttgctgctgttggacactccgtcaccttttggaacacaagtatatcaagatagtggctactgatgttcaagtgggattgaagtgtgataaatggatatattttgttgtttgctggggtgttcatggagatgttaagagattgaggccctgggctgagggtatataatgtatgtcaggtaaagtttgaagactgccaaggagcagattttctccctggaaatgtgaaaactgaacctataactctgataaggacttgagatgtgtagaaacgttgggttatggaagactagtttcttccataaccctgaattggagaccttaatgctaagtgtagattattgaggtttgttagtgaggaaaagaataagagttcagaagcctttgttatcagatagcgaaatcagggcctagtgaggagcacaggtcgactacataatggagtccattggcgaaccctattgcaatttggtccaactatatcttctggtgaaggaaattaatgatgtaagaaaatgcaagaggctcaacttctcttccaaaaatcttctggcttctgaactcttcctctgcctctctttaaataaataacacagaatttcaagtggtaggagacttattaagccagtcaccaagcttggtctgtcagcctgtcttctaacacctcaaagatcttgtgccctgtgctgtccctcccttgtaattatgaaaagttctttggtttctggggtgaattctacccatgtataatgaggaattctctcataaccttttttgtcttgtctgtcatctctgttcatcccttcctataacctctaggtaaaaagaaaagaaaaaaagaaatttcgagatattttcaacattgttagagtttgggctaaaatgagcaaggagaaaaaaaccaccaagaacatttcctggggcatgttccagttttgaggggtgatatatctgccagatagggggtatctgacccagtcttcttttcagctggtctctggggggagctgagaactcgcttgctacctcacatccttttccccagactttttatctcctatgcatccctttgctttctatagctggtgtttcttccccaaaatggcgttcccatgcttacctttctcacattctagacaatgatggacaaagacgcatgcaagactcagacccggggaatggtgtggtgctaatctcaacacctgacattcacagcaagcatggcccagcccaaccgcatgtctatctcaaaccgcagaaaggctttaatactggaaaaaaagaattcaagactacaggcagctcccctctgtaccccaactcatttaaaataggaggaatcactttttgccttacttaacgcttttttctgagcacagggatgggcacctgcaccccagaaggtgtgagctgtctctctgccaggagctaaggttcattaggggattggatggtttatcacttctttctttctgagtttacttttagtaacttttattgatggctacctttcatgtccctgtctaaagagactttctctttcatacgtcttaaatctcatcaatgaaatccagtgaaacagcaccatttcttagtatcattaaataactagaaagtatcaagtattgctctctgctgctttatatcattaacatattaataataccaagaaggaaatactttgaataagtgtcagattctgatccagtattggacacctgtgatattggacacctgtgaggctgggataattacttttgaattacacctcttctctagtttctggaccttgctctgtcactttaacacagggtgatcaaacctgaatgaggatcagaactcacccaggcacatactaaagcaagattcctaaacctcagttccaggggtaattctgacatcacccgtccagcatagtcagctgaaattataaatctaagaaacagttacatcaagattctgctgtgtcatttaattctgaaactcccagtattctacccttcttcatcactgcatattaccccactcttccatcccaaattggctatcctttcagcccaccaacttagcggcagcactagggattcattataaggtaaatctggtttacataaagacctgaaggaggcctgtatttgaagctcacacttggtattggtatctctcatttttactgagccagtgtggaataccactgtatgtactcatataagcccttgacttttactgctcatcaggattggaatattactctagcagtcttcacacataggcaagttacagtccttttaaaaagtatctcatttccctataatggaacctaatagccaactttttcatagaaattgctagaagagtttgatcaactataaatgataaagtgtttataagcatagtcagtgtgacacagaaaccaatcttaaaattgaatttaatgttttatcatatcagattaaatattttctccatgtcttatttttactgcaacaagttagaaagtgggaacactttgattaatgtcttaaaatttgtgggccctcatttggataaaggcagcaatcctaaggactttttttttttttaacataatctgagaatttctctgtagagcagagactttcaaaccttttggctgtaacccacagtaaaaaacgcatttatatcaaaccttagaatatgtttaatgaacaatacttaccattctgatgctttttattgtttcagtttttaaaatatgccagttgcaacccactaaattgatatctaccaatgggttgcaacccttagcttgaaaaaaacaccctcacagaggaactggtatttcttgaataccttctgtttgccaggcacttcaccaggcattttacaagtaaggaaactgggcttcagagaaaataatttgcagaggtttactcaactacaaaggggtgaagccaggaatgttaactaggtctgttgagctacaaaaacttttatgtctctcagactatacagcctctatacaaaattgagatgggggttgggggcaggggctcatgcctgcaatcccagcacttagggaggcagaggccagaggatcacttgagcccaggagtttgagaccagcctgggcaacatagtgagactctgtctgtatgaaaaaaattaagaattagctgggtgtggcatagcacacacctgtggtcccagctacatgggaagctgaagtgggaggatcacttgaactcaggagcagccttggtgacagaacaagaccctctctcaaaaaaatatttaaaaaaaggtgggtcatccattctcctttaccaaacaggctttgaaatgacacattccattcatttgcatctttttaaaaaacttctgattccttactgagtgtccagcagcctcaaagtttttaatggtagctgatgcagacataaacagtgctcaatttggcccttaaactataaaatcaagaaagagtatttcaatcccatccacctgcctgcaagatttcttaatgttcactagttataaccattgtttaaacagtgctttttgtgtaatttaaaaataaactttaatgctttttaaaacaaatttatcataattcatagatcaaatgattatcctttaaaatgatacccttgggaaatcatgtacttactgtagtgatgctagtattaatattacttagaccaattttgaaactgttctttcagaattgcctccaaagacattttgcagatcatcccagaaaagggggtatgatggtgctgtgtagaactgaccagagttcctggaggattttgaggttatactgaaactgagtgctgtacagggagaattgcatgagtccagaaacttccttctgtgggctgcctgccttcctgccctcccttaagtgctctaagatttttgtacaggagtaagaatcaaatactggtaacatcaatcacaagaagttgaggaaacctgtaatatagctagataatatacaacgtttgtcttccatcagagtgcagaaaccaaaccatgctttgtgttaaccttaaatatgaaaggtgtttctcagggtcccctttgtccttcgttgctgccatatgaaatcttacaaggaaggatgaggaaaagcctggggggaggttctcctcggaaatgaggtggttttttttgttattaagtagaacgtggctgtggttcacaggtacttaacgaatgttagatgatgttcttaagtaatcagaggcctaataaaaggcaggggagtttctcttctagcctaaattaatattaaaagttcaggggtattttttgtttttaaattaatactttattgtttttaacaggtggttctcataatttacattcattaatttgatgcccttttacaaagaaacttcttaggtattataaaccatcaatgtaaaggatccacatggtatgtatccacattgctactctcaaatagaaatgggagataagaaatatatctgtgcaatattaaattgaaaaaaaaaacccataaaaagtgtcaaaggcaaataatttgctctagatcacaaaactagttagcacaaggctaggattataaccagggtctaggaaaaaatcctgaaggtgatttaactgagtgttaggccctgtcaagccacctgctaaggctcatggtctttcagactagcttcaacattccaaatcaggcaatagctacaacggaaagataattggacggggaatcctgagatcagagtcctagtttggctttgtctcttgtagcaggattttttaaatcaggggcagctctcttctcccatcccagccatgaatctttcaaccttagtggtcaccaacttgactccattccttatatcaagccttgtcctgtcaattctcccttaaatgttagttgcatccatttctaaatatatccatggccatcaccctagtaaaaagactattacctcacaccccgcacttgatcttcccccaactttaagtgactcagttccttatatcactgccacaagaattaacaaccatgtccatctttcatttttctgctgaaagattttcagtggttcccactgaataccaaataaagttcgaatcccttagattggcattcacagccttctacgttctggccccagctttatctcttgaaactcactactcaccatctgacaatgccactaaaaatccacaagagtgattttaaggtttttctatggtgaaggttcaaactggtaataaaccatgtttacatttttctggtctaaaataatttctatattactttataatagtcagctgggggttatttaagctcttggacgagcctaaaacttgtatcctgaagaaaatatttttttccaccagaagaaattgctttcaatttcttaaccttcaaaacaatgtcagtgttgtcacctgtgcatttgatagccacagcacaagtattcttcaggagcataaatcctccagccttgaatggaccattgtccagctcctgtgaaaaacttaatatttgagaaagacattcaatggtacatgttttctgtacacttcatgagtagttgagattttcttgtattaaggttaatcactaaaaaggtgtttacttgggtttcgttaactaaaccccctaaagatgttttccattttattgttaaacacttggtgttagcaagggtcagcacgagaaaaggcccaatggcaagaatttctgcaaactctgtaaagcttactgaattcatttgtcatttattacattgctgagtggtgcttgaataaggaaacatgcaataaatttacttatttaaccaa

SEQ ID NO: 375655 - DNA, 6932 bp, Homo sapiens
gattgacctgatgacctcaacattccttctacccagagattccatgagtcacagttgctgttgtgccagcacaggtgttgccattttatgtagaatgctttattaatatatttgatctgaaacattttaaactgtcatgattttaaaatgtattaagatacacaggtgtaaagcacagaacagtgatttcattcactgttccctactgcatattacaaatggaaagatctcataatagatcaaaccgtattgtagtcttgttcctgaaacataacaatttgtatttattggaccaagggcattttactcctaaggtaaatgtgcctgatttaaactgaatcctcaaagaaggtaagttagggaggtattttggggtttgattttgttgggttttttttttccatcaaacccaacatgacatgtaaatgcttatttggattttttttttctggaaagtagattcatttggagaataatatgtttgtatgtttgagtgaattttagcgtgagatgctttttgctgtaaagttgccacccttttattacctaataattaagacccccccccttttttttatgaaagttaatttgtcctttcgacatggcttatcagatgctattaatgaaccactattaagatggcaaggctgcagtacccagggccctgattacaggaattaaaatagtgtgtgttggctccctgctgctccccagcaggaccgctcactcataattcctttgcatctagtctcagcaggagaagattgacagcattgcagaccatgtcaacagtgctgctgtgaatgttgaagagggaaccaaaaacttagggaaggctgcaaaatacaagctggcagctctgcctgtggcaggtgcactcatcgggggaatggtagggggtcctattggcctccttgcaggcttcaaagtggcaggaattgcagctgcacttggtggtggggtgttgggcttcacaggtggaaaattgatacaaagaaagaaacagaaaatgatggagaagctcacttccagctgtccagatcttcccagccaaactgacaagaaatgcagttaaaaaccaaatttcagtattattggtgccaacatgtctatcctgaggacctttgctgctgttggacactccgtcaccttttggaacacaagtatatcaagatagtggctactgatgttcaagtgggattgaagtgtgataaatggatatattttgttgtttgctggggtgttcatggagatgttaagagattgaggccctgggctgagggtatataatgtatgtcaggtaaagtttgaagactgccaaggagcagattttctccctggaaatgtgaaaactgaacctataactctgataaggacttgagatgtgtagaaacgttgggttatggaagactagtttcttccataaccctgaattggagaccttaatgctaagtgtagattattgaggtttgttagtgaggaaaagaataagagttcagaagcctttgttatcagatagcgaaatcagggcctagtgaggagcacaggtcgactacataatggagtccattggcgaaccctattgcaatttggtccaactatatcttctggtgaaggaaattaatgatgtaagaaaatgcaagaggctcaacttctcttccaaaaatcttctggcttctgaactcttcctctgcctctctttaaataaataacacagaatttcaagtggtaggagacttattaagccagtcaccaagcttggtctgtcagcctgtcttctaacacctcaaagatcttgtgccctgtgctgtccctcccttgtaattatgaaaagttctttggtttctggggtgaattctacccatgtataatgaggaattctctcataaccttttttgtcttgtctgtcatctctgttcatcccttcctataacctctaggtaaaaagaaaagaaaaaaagaaatttcgagatattttcaacattgttagagtttgggctaaaatgagcaaggagaaaaaaaccaccaagaacatttcctggggcatgttccagttttgaggggtgatatatctgccagatagggggtatctgacccagtcttcttttcagctggtctctggggggagctgagaactcgcttgctacctcacatccttttccccagactttttatctcctatgcatccctttgctttctatagctggtgtttcttccccaaaatggcgttcccatgcttacctttctcacattctagacaatgatggacaaagacgcatgcaagactcagacccggggaatggtgtggtgctaatctcaacacctgacattcacagcaagcatggcccagcccaaccgcatgtctatctcaaaccgcagaaaggctttaatactggaaaaaaagaattcaagactacaggcagctcccctctgtaccccaactcatttaaaataggaggaatcactttttgccttacttaacgcttttttctgagcacagggatgggcacctgcaccccagaaggtgtgagctgtctctctgccaggagctaaggttcattaggggattggatggtttatcacttctttctttctgagtttacttttagtaacttttattgatggctacctttcatgtccctgtctaaagagactttctctttcatacgtcttaaatctcatcaatgaaatccagtgaaacagcaccatttcttagtatcattaaataactagaaagtatcaagtattgctctctgctgctttatatcattaacatattaataataccaagaaggaaatactttgaataagtgtcagattctgatccagtattggacacctgtgatattggacacctgtgaggctgggataattacttttgaattacacctcttctctagtttctggaccttgctctgtcactttaacacagggtgatcaaacctgaatgaggatcagaactcacccaggcacatactaaagcaagattcctaaacctcagttccaggggtaattctgacatcacccgtccagcatagtcagctgaaattataaatctaagaaacagttacatcaagattctgctgtgtcatttaattctgaaactcccagtattctacccttcttcatcactgcatattaccccactcttccatcccaaattggctatcctttcagcccaccaacttagcggcagcactagggattcattataaggtaaatctggtttacataaagacctgaaggaggcctgtatttgaagctcacacttggtattggtatctctcatttttactgagccagtgtggaataccactgtatgtactcatataagcccttgacttttactgctcatcaggattggaatattactctagcagtcttcacacataggcaagttacagtccttttaaaaagtatctcatttccctataatggaacctaatagccaactttttcatagaaattgctagaagagtttgatcaactataaatgataaagtgtttataagcatagtcagtgtgacacagaaaccaatcttaaaattgaatttaatgttttatcatatcagattaaatattttctccatgtcttatttttactgcaacaagttagaaagtgggaacactttgattaatgtcttaaaatttgtgggccctcatttggataaaggcagcaatcctaaggactttttttttttttaacataatctgagaatttctctgtagagcagagactttcaaaccttttggctgtaacccacagtaaaaaacgcatttatatcaaaccttagaatatgtttaatgaacaatacttaccattctgatgctttttattgtttcagtttttaaaatatgccagttgcaacccactaaattgatatctaccaatgggttgcaacccttagcttgaaaaaaacaccctcacagaggaactggtatttcttgaataccttctgtttgccaggcacttcaccaggcattttacaagtaaggaaactgggcttcagagaaaataatttgcagaggtttactcaactacaaaggggtgaagccaggaatgttaactaggtctgttgagctacaaaaacttttatgtctctcagactatacagcctctatacaaaattgagatgggggttgggggcaggggctcatgcctgcaatcccagcacttagggaggcagaggccagaggatcacttgagcccaggagtttgagaccagcctgggcaacatagtgagactctgtctgtatgaaaaaaattaagaattagctgggtgtggcatagcacacacctgtggtcccagctacatgggaagctgaagtgggaggatcacttgaactcaggagcagccttggtgacagaacaagaccctctctcaaaaaaatatttaaaaaaaggtgggtcatccattctcctttaccaaacaggctttgaaatgacacattccattcatttgcatctttttaaaaaacttctgattccttactgagtgtccagcagcctcaaagtttttaatggtagctgatgcagacataaacagtgctcaatttggcccttaaactataaaatcaagaaagagtatttcaatcccatccacctgcctgcaagatttcttaatgttcactagttataaccattgtttaaacagtgctttttgtgtaatttaaaaataaactttaatgctttttaaaacaaatttatcataattcatagatcaaatgattatcctttaaaatgatacccttgggaaatcatgtacttactgtagtgatgctagtattaatattacttagaccaattttgaaactgttctttcagaattgcctccaaagacattttgcagatcatcccagaaaagggggtatgatggtgctgtgtagaactgaccagagttcctggaggattttgaggttatactgaaactgagtgctgtacagggagaattgcatgagtccagaaacttccttctgtgggctgcctgccttcctgccctcccttaagtgctctaagatttttgtacaggagtaagaatcaaatactggtaacatcaatcacaagaagttgaggaaacctgtaatatagctagataatatacaacgtttgtcttccatcagagtgcagaaaccaaaccatgctttgtgttaaccttaaatatgaaaggtgtttctcagggtcccctttgtccttcgttgctgccatatgaaatcttacaaggaaggatgaggaaaagcctggggggaggttctcctcggaaatgaggtggttttttttgttattaagtagaacgtggctgtggttcacaggtacttaacgaatgttagatgatgttcttaagtaatcagaggcctaataaaaggcaggggagtttctcttctagcctaaattaatattaaaagttcaggggtattttttgtttttaaattaatactttattgtttttaacaggtggttctcataatttacattcattaatttgatgcccttttacaaagaaacttcttaggtattataaaccatcaatgtaaaggatccacatggtatgtatccacattgctactctcaaatagaaatgggagataagaaatatatctgtgcaatattaaattgaaaaaaaaaacccataaaaagtgtcaaaggcaaataatttgctctagatcacaaaactagttagcacaaggctaggattataaccagggtctaggaaaaaatcctgaaggtgatttaactgagtgttaggccctgtcaagccacctgctaaggctcatggtctttcagactagcttcaacattccaaatcaggcaatagctacaacggaaagataattggacggggaatcctgagatcagagtcctagtttggctttgtctcttgtagcaggattttttaaatcaggggcagctctcttctcccatcccagccatgaatctttcaaccttagtggtcaccaacttgactccattccttatatcaagccttgtcctgtcaattctcccttaaatgttagttgcatccatttctaaatatatccatggccatcaccctagtaaaaagactattacctcacaccccgcacttgatcttcccccaactttaagtgactcagttccttatatcactgccacaagaattaacaaccatgtccatctttcatttttctgctgaaagattttcagtggttcccactgaataccaaataaagttcgaatcccttagattggcattcacagccttctacgttctggccccagctttatctcttgaaactcactactcaccatctgacaatgccactaaaaatccacaagagtgattttaaggtttttctatggtgaaggttcaaactggtaataaaccatgtttacatttttctggtctaaaataatttctatattactttataatagtcagctgggggttatttaagctcttggacgagcctaaaacttgtatcctgaagaaaatatttttttccaccagaagaaattgctttcaatttcttaaccttcaaaacaatgtcagtgttgtcacctgtgcatttgatagccacagcacaagtattcttcaggagcataaatcctccagccttgaatggaccattgtccagctcctgtgaaaaacttaatatttgagaaagacattcaatggtacatgttttctgtacacttcatgagtagttgagattttcttgtattaaggttaatcactaaaaaggtgtttacttgggtttcgttaactaaaccccctaaagatgttttccattttattgttaaacacttggtgttagcaagggtcagcacgagaaaaggcccaatggcaagaatttctgcaaactctgtaaagcttactgaattcatttgtcatttattacattgctgagtggtgcttgaataaggaaacatgcaataaatttacttatttaaccaa

SEQ ID NO: 375656 - DNA, 5372 bp, Homo sapiens
ttttacaagtaaggaaactgggcttcagagaaaataatttgcagaggtttactcaactacaaaggggtgaagccaggaatgttaactaggtctgttgagctacaaaaacttttatgtctctcagactatacagcctctctttaaataaataacacagaatttcaagtggtaggagacttattaagccagtcaccaagcttggtctgtcagcctgtcttctaacacctcaaagatcttgtgccctgtgctgtccctcccttgtaattatgaaaagttctttggtttctggggtgaattctacccatgtataatgaggaattctctcataaccttttttgtcttgtctgtcatctctgttcatcccttcctataacctctaggtaaaaagaaaagaaaaaaagaaatttcgagatattttcaacattgttagagtttgggctaaaatgagcaaggagaaaaaaaccaccaagaacatttcctggggcatgttccagttttgaggggtgatatatctgccagatagggggtatctgacccagtcttcttttcagctggtctctggggggagctgagaactcgcttgctacctcacatccttttccccagactttttatctcctatgcatccctttgctttctatagctggtgtttcttccccaaaatggcgttcccatgcttacctttctcacattctagacaatgatggacaaagacgcatgcaagactcagacccggggaatggtgtggtgctaatctcaacacctgacattcacagcaagcatggcccagcccaaccgcatgtctatctcaaaccgcagaaaggctttaatactggaaaaaaagaattcaagactacaggcagctcccctctgtaccccaactcatttaaaataggaggaatcactttttgccttacttaacgcttttttctgagcacagggatgggcacctgcaccccagaaggtgtgagctgtctctctgccaggagctaaggttcattaggggattggatggtttatcacttctttctttctgagtttacttttagtaacttttattgatggctacctttcatgtccctgtctaaagagactttctctttcatacgtcttaaatctcatcaatgaaatccagtgaaacagcaccatttcttagtatcattaaataactagaaagtatcaagtattgctctctgctgctttatatcattaacatattaataataccaagaaggaaatactttgaataagtgtcagattctgatccagtattggacacctgtgatattggacacctgtgaggctgggataattacttttgaattacacctcttctctagtttctggaccttgctctgtcactttaacacagggtgatcaaacctgaatgaggatcagaactcacccaggcacatactaaagcaagattcctaaacctcagttccaggggtaattctgacatcacccgtccagcatagtcagctgaaattataaatctaagaaacagttacatcaagattctgctgtgtcatttaattctgaaactcccagtattctacccttcttcatcactgcatattaccccactcttccatcccaaattggctatcctttcagcccaccaacttagcggcagcactagggattcattataaggtaaatctggtttacataaagacctgaaggaggcctgtatttgaagctcacacttggtattggtatctctcatttttactgagccagtgtggaataccactgtatgtactcatataagcccttgacttttactgctcatcaggattggaatattactctagcagtcttcacacataggcaagttacagtccttttaaaaagtatctcatttccctataatggaacctaatagccaactttttcatagaaattgctagaagagtttgatcaactataaatgataaagtgtttataagcatagtcagtgtgacacagaaaccaatcttaaaattgaatttaatgttttatcatatcagattaaatattttctccatgtcttatttttactgcaacaagttagaaagtgggaacactttgattaatgtcttaaaatttgtgggccctcatttggataaaggcagcaatcctaaggactttttttttttttaacataatctgagaatttctctgtagagcagagactttcaaaccttttggctgtaacccacagtaaaaaacgcatttatatcaaaccttagaatatgtttaatgaacaatacttaccattctgatgctttttattgtttcagtttttaaaatatgccagttgcaacccactaaattgatatctaccaatgggttgcaacccttagcttgaaaaaaacaccctcacagaggaactggtatttcttgaataccttctgtttgccaggcacttcaccaggcattttacaagtaaggaaactgggcttcagagaaaataatttgcagaggtttactcaactacaaaggggtgaagccaggaatgttaactaggtctgttgagctacaaaaacttttatgtctctcagactatacagcctctatacaaaattgagatgggggttgggggcaggggctcatgcctgcaatcccagcacttagggaggcagaggccagaggatcacttgagcccaggagtttgagaccagcctgggcaacatagtgagactctgtctgtatgaaaaaaattaagaattagctgggtgtggcatagcacacacctgtggtcccagctacatgggaagctgaagtgggaggatcacttgaactcaggagcagccttggtgacagaacaagaccctctctcaaaaaaatatttaaaaaaaggtgggtcatccattctcctttaccaaacaggctttgaaatgacacattccattcatttgcatctttttaaaaaacttctgattccttactgagtgtccagcagcctcaaagtttttaatggtagctgatgcagacataaacagtgctcaatttggcccttaaactataaaatcaagaaagagtatttcaatcccatccacctgcctgcaagatttcttaatgttcactagttataaccattgtttaaacagtgctttttgtgtaatttaaaaataaactttaatgctttttaaaacaaatttatcataattcatagatcaaatgattatcctttaaaatgatacccttgggaaatcatgtacttactgtagtgatgctagtattaatattacttagaccaattttgaaactgttctttcagaattgcctccaaagacattttgcagatcatcccagaaaagggggtatgatggtgctgtgtagaactgaccagagttcctggaggattttgaggttatactgaaactgagtgctgtacagggagaattgcatgagtccagaaacttccttctgtgggctgcctgccttcctgccctcccttaagtgctctaagatttttgtacaggagtaagaatcaaatactggtaacatcaatcacaagaagttgaggaaacctgtaatatagctagataatatacaacgtttgtcttccatcagagtgcagaaaccaaaccatgctttgtgttaaccttaaatatgaaaggtgtttctcagggtcccctttgtccttcgttgctgccatatgaaatcttacaaggaaggatgaggaaaagcctggggggaggttctcctcggaaatgaggtggttttttttgttattaagtagaacgtggctgtggttcacaggtacttaacgaatgttagatgatgttcttaagtaatcagaggcctaataaaaggcaggggagtttctcttctagcctaaattaatattaaaagttcaggggtattttttgtttttaaattaatactttattgtttttaacaggtggttctcataatttacattcattaatttgatgcccttttacaaagaaacttcttaggtattataaaccatcaatgtaaaggatccacatggtatgtatccacattgctactctcaaatagaaatgggagataagaaatatatctgtgcaatattaaattgaaaaaaaaaacccataaaaagtgtcaaaggcaaataatttgctctagatcacaaaactagttagcacaaggctaggattataaccagggtctaggaaaaaatcctgaaggtgatttaactgagtgttaggccctgtcaagccacctgctaaggctcatggtctttcagactagcttcaacattccaaatcaggcaatagctacaacggaaagataattggacggggaatcctgagatcagagtcctagtttggctttgtctcttgtagcaggattttttaaatcaggggcagctctcttctcccatcccagccatgaatctttcaaccttagtggtcaccaacttgactccattccttatatcaagccttgtcctgtcaattctcccttaaatgttagttgcatccatttctaaatatatccatggccatcaccctagtaaaaagactattacctcacaccccgcacttgatcttcccccaactttaagtgactcagttccttatatcactgccacaagaattaacaaccatgtccatctttcatttttctgctgaaagattttcagtggttcccactgaataccaaataaagttcgaatcccttagattggcattcacagccttctacgttctggccccagctttatctcttgaaactcactactcaccatctgacaatgccactaaaaatccacaagagtgattttaaggtttttctatggtgaaggttcaaactggtaataaaccatgtttacatttttctggtctaaaataatttctatattactttataatagtcagctgggggttatttaagctcttggacgagcctaaaacttgtatcctgaagaaaatatttttttccaccagaagaaattgctttcaatttcttaaccttcaaaacaatgtcagtgttgtcacctgtgcatttgatagccacagcacaagtattcttcaggagcataaatcctccagccttgaatggaccattgtccagctcctgtgaaaaacttaatatttgagaaagacattcaatggtacatgttttctgtacacttcatgagtagttgagattttcttgtattaaggttaatcactaaaaaggtgtttacttgggtttcgttaactaaaccccctaaagatgttttccattttattgttaaacacttggtgttagcaagggtcagcacgagaaaaggcccaatggcaagaatttctgcaaactctgtaaagcttactgaattcatttgtcatttattacattgctgagtggtgcttgaataaggaaacatgcaataaatttacttatttaaccaa

SEQ ID NO: 375657 - DNA, 545 bp, Homo sapiens
gtgcccaccgaccggcctcgagcgccccggcgggaggtttttctatatgagtggagaagacagctgttaccagggaggtcatacaacatttttttaggatgtctgaagatgaagaaaaagtgaaattacgccgtcttgaaccagctatccagaaattcattaagatagtaatcccaacagacctggaaaggttaagaaagcaccagataaatattgagaagtatcaaaggtgcagaatctgggacaagttgcatgaagagcatatcaatgcaggacgtacagttcaggccagaatgcctaattggcagagacacacttagcagctggcagaacccccacattggctccctgactggtagggtgagggcgatgatggtgggaaaagccaaatggaagccattagagctgcctctacctagaaaaatggtaagtcaaaaacaatatcgcatccttggagggactgcagagattagtgtcaccatcaaggacttgaaagacgcaagggtggtgattcccagcacatccccattctactctcctatctg

SEQ ID NO: 375658 - DNA, 840 bp, Homo sapiens
gtggtgcttgaataaggaaacatgcaataaatttacttatttaaccaacatttaactgaaggcctgtggtgtgttaagtgctggggccatacatagaaaaatactagacctatagaatctacccctgtaaaccattcaggctaatgaattcagatacctaaagcaagtaaatcacagtaaaacctggtaactgccctaagagaggaatgaacaaagtaatacgagggcacacagagtggagggaccaaattctgcttggaaaagaaggggcaggctttgtggaacatgtggtgtttgagccgtacctaaagaagaatatgcctgattgaagatggagttatggacaaagggctcaaaacacaacatggtgggctcacagaaaactaagaaacaaaacgcacctgagtgatgaagatggttggatggaaatacagactaggatgtgatctatttaaaatttaatacttctttgtttataggaattgatgtattgctttgtgtcagataagactattactcctctgagttcctcattttgccttcttgccagggaagttagtattaaacctcacatttggtggagttcttggtatatttggcatatttgccttcctttcccacaggttgtgctttcttccctctctgcttaagagatcatctgcttaacactgaatgccctctttgttcctgttctaatagtcattccatatttattgaaaacccactgagaaaacagtcatgaaatttacttattagtgtccaagtgcttcacaatcgttttccatctctacatgaacatttcttaaccactgcaattcatggctccagttttcacttatg

SEQ ID NO: 375659 - DNA, 337 bp, Homo sapiens
atcctgttaaagaagaagcatcagcagcaacagcagaatttctccaactccatttggaatctgtagaagaacttaagaagcaatttaatgatgaagaaactttgctacagcctcctttgaccagatccatgactgttggtggtaatgtattgtgctaagtcttattctcagtcacagtagtgcagttaattaaagatcacctccttgagtagatactgaattatctataggtcttcagagaccattcactatcccaatatgctgaatccttggaccctgatcagtgttcctggaaatgtgtaccctggatattttgcagaataaaaaatttaaggct

SEQ ID NO: 375660 - DNA, 5230 bp, Homo sapiens
  misc_feature (8)..(8): n is a, c, g, or t
  misc_feature (13)..(13): n is a, c, g, or t
actgctcnggtgntctcctccaagtggtaggagacttattaagccagtcaccaagcttggtctgtcagcctgtcttctaacacctcaaagatcttgtgccctgtgctgtccctcccttgtaattatgaaaagttctttggtttctggggtgaattctacccatgtataatgaggaattctctcataaccttttttgtcttgtctgtcatctctgttcatcccttcctataacctctaggtaaaaagaaaagaaaaaaagaaatttcgagatattttcaacattgttagagtttgggctaaaatgagcaaggagaaaaaaaccaccaagaacatttcctggggcatgttccagttttgaggggtgatatatctgccagatagggggtatctgacccagtcttcttttcagctggtctctggggggagctgagaactcgcttgctacctcacatccttttccccagactttttatctcctatgcatccctttgctttctatagctggtgtttcttccccaaaatggcgttcccatgcttacctttctcacattctagacaatgatggacaaagacgcatgcaagactcagacccggggaatggtgtggtgctaatctcaacacctgacattcacagcaagcatggcccagcccaaccgcatgtctatctcaaaccgcagaaaggctttaatactggaaaaaaagaattcaagactacaggcagctcccctctgtaccccaactcatttaaaataggaggaatcactttttgccttacttaacgcttttttctgagcacagggatgggcacctgcaccccagaaggtgtgagctgtctctctgccaggagctaaggttcattaggggattggatggtttatcacttctttctttctgagtttacttttagtaacttttattgatggctacctttcatgtccctgtctaaagagactttctctttcatacgtcttaaatctcatcaatgaaatccagtgaaacagcaccatttcttagtatcattaaataactagaaagtatcaagtattgctctctgctgctttatatcattaacatattaataataccaagaaggaaatactttgaataagtgtcagattctgatccagtattggacacctgtgatattggacacctgtgaggctgggataattacttttgaattacacctcttctctagtttctggaccttgctctgtcactttaacacagggtgatcaaacctgaatgaggatcagaactcacccaggcacatactaaagcaagattcctaaacctcagttccaggggtaattctgacatcacccgtccagcatagtcagctgaaattataaatctaagaaacagttacatcaagattctgctgtgtcatttaattctgaaactcccagtattctacccttcttcatcactgcatattaccccactcttccatcccaaattggctatcctttcagcccaccaacttagcggcagcactagggattcattataaggtaaatctggtttacataaagacctgaaggaggcctgtatttgaagctcacacttggtattggtatctctcatttttactgagccagtgtggaataccactgtatgtactcatataagcccttgacttttactgctcatcaggattggaatattactctagcagtcttcacacataggcaagttacagtccttttaaaaagtatctcatttccctataatggaacctaatagccaactttttcatagaaattgctagaagagtttgatcaactataaatgataaagtgtttataagcatagtcagtgtgacacagaaaccaatcttaaaattgaatttaatgttttatcatatcagattaaatattttctccatgtcttatttttactgcaacaagttagaaagtgggaacactttgattaatgtcttaaaatttgtgggccctcatttggataaaggcagcaatcctaaggactttttttttttttaacataatctgagaatttctctgtagagcagagactttcaaaccttttggctgtaacccacagtaaaaaacgcatttatatcaaaccttagaatatgtttaatgaacaatacttaccattctgatgctttttattgtttcagtttttaaaatatgccagttgcaacccactaaattgatatctaccaatgggttgcaacccttagcttgaaaaaaacaccctcacagaggaactggtatttcttgaataccttctgtttgccaggcacttcaccaggcattttacaagtaaggaaactgggcttcagagaaaataatttgcagaggtttactcaactacaaaggggtgaagccaggaatgttaactaggtctgttgagctacaaaaacttttatgtctctcagactatacagcctctatacaaaattgagatgggggttgggggcaggggctcatgcctgcaatcccagcacttagggaggcagaggccagaggatcacttgagcccaggagtttgagaccagcctgggcaacatagtgagactctgtctgtatgaaaaaaattaagaattagctgggtgtggcatagcacacacctgtggtcccagctacatgggaagctgaagtgggaggatcacttgaactcaggagcagccttggtgacagaacaagaccctctctcaaaaaaatatttaaaaaaaggtgggtcatccattctcctttaccaaacaggctttgaaatgacacattccattcatttgcatctttttaaaaaacttctgattccttactgagtgtccagcagcctcaaagtttttaatggtagctgatgcagacataaacagtgctcaatttggcccttaaactataaaatcaagaaagagtatttcaatcccatccacctgcctgcaagatttcttaatgttcactagttataaccattgtttaaacagtgctttttgtgtaatttaaaaataaactttaatgctttttaaaacaaatttatcataattcatagatcaaatgattatcctttaaaatgatacccttgggaaatcatgtacttactgtagtgatgctagtattaatattacttagaccaattttgaaactgttctttcagaattgcctccaaagacattttgcagatcatcccagaaaagggggtatgatggtgctgtgtagaactgaccagagttcctggaggattttgaggttatactgaaactgagtgctgtacagggagaattgcatgagtccagaaacttccttctgtgggctgcctgccttcctgccctcccttaagtgctctaagatttttgtacaggagtaagaatcaaatactggtaacatcaatcacaagaagttgaggaaacctgtaatatagctagataatatacaacgtttgtcttccatcagagtgcagaaaccaaaccatgctttgtgttaaccttaaatatgaaaggtgtttctcagggtcccctttgtccttcgttgctgccatatgaaatcttacaaggaaggatgaggaaaagcctggggggaggttctcctcggaaatgaggtggttttttttgttattaagtagaacgtggctgtggttcacaggtacttaacgaatgttagatgatgttcttaagtaatcagaggcctaataaaaggcaggggagtttctcttctagcctaaattaatattaaaagttcaggggtattttttgtttttaaattaatactttattgtttttaacaggtggttctcataatttacattcattaatttgatgcccttttacaaagaaacttcttaggtattataaaccatcaatgtaaaggatccacatggtatgtatccacattgctactctcaaatagaaatgggagataagaaatatatctgtgcaatattaaattgaaaaaaaaaacccataaaaagtgtcaaaggcaaataatttgctctagatcacaaaactagttagcacaaggctaggattataaccagggtctaggaaaaaatcctgaaggtgatttaactgagtgttaggccctgtcaagccacctgctaaggctcatggtctttcagactagcttcaacattccaaatcaggcaatagctacaacggaaagataattggacggggaatcctgagatcagagtcctagtttggctttgtctcttgtagcaggattttttaaatcaggggcagctctcttctcccatcccagccatgaatctttcaaccttagtggtcaccaacttgactccattccttatatcaagccttgtcctgtcaattctcccttaaatgttagttgcatccatttctaaatatatccatggccatcaccctagtaaaaagactattacctcacaccccgcacttgatcttcccccaactttaagtgactcagttccttatatcactgccacaagaattaacaaccatgtccatctttcatttttctgctgaaagattttcagtggttcccactgaataccaaataaagttcgaatcccttagattggcattcacagccttctacgttctggccccagctttatctcttgaaactcactactcaccatctgacaatgccactaaaaatccacaagagtgattttaaggtttttctatggtgaaggttcaaactggtaataaaccatgtttacatttttctggtctaaaataatttctatattactttataatagtcagctgggggttatttaagctcttggacgagcctaaaacttgtatcctgaagaaaatatttttttccaccagaagaaattgctttcaatttcttaaccttcaaaacaatgtcagtgttgtcacctgtgcatttgatagccacagcacaagtattcttcaggagcataaatcctccagccttgaatggaccattgtccagctcctgtgaaaaacttaatatttgagaaagacattcaatggtacatgttttctgtacacttcatgagtagttgagattttcttgtattaaggttaatcactaaaaaggtgtttacttgggtttcgttaactaaaccccctaaagatgttttccattttattgttaaacacttggtgttagcaagggtcagcacgagaaaaggcccaatggcaagaatttctgcaaactctgtaaagcttactgaattcatttgtcatttattacattgctgagtggtgcttgaataaggaaacatgcaataaatttacttatttaaccaa

SEQ ID NO: 375661 - DNA, 4628 bp, Homo sapiens
gtgcccaccgaccggcctcgagcgccccggcgggaggtttttctatatgagtggagaagacagctgttaccagggaggtcatacaacatttttttaggatgtctgaagatgaagaaaaagtgaaattacgccgtcttgaaccagctatccagaaattcattaagatagtaatcccaacagacctggaaaggttaagaaagcaccagataaatattgagaagtatcaaaggtgcagaatctgggacaagttgcatgaagagcatatcaatgcaggacgtacagttcagcaactccgatccaatatccgagaaattgagaaactttgtttgaaagtccgaaaggatgacctagtacttctgaagagaatgatagatcctgttaaagaagaagcatcagcagcaacagcagaatttctccaactccatttggaatctgtagaagaacttaagaagcaatttaatgatgaagaaactttgctacagcctcctttgaccagatccatgactgttggtggagcatttcatactactgaagctgaagctagttctcagagtttgactcagatatatgccttacctgaaattcctcaagatcaaaatgctgcagaatcgtgggaaaccttagaagcggacttaattgaacttagccaactggtcactgacttctctctcctagtgaattctcagcaggagaagattgacagcattgcagaccatgtcaacagtgctgctgtgaatgttgaagagggaaccaaaaacttagggaaggctgcaaaatacaagctggcagctctgcctgtggcaggtgcactcatcgggggaatggtagggggtcctattggcctccttgcaggcttcaaagtggcaggaattgcagctgcacttggtggtggggtgttgggcttcacaggtggaaaattgatacaaagaaagaaacagaaaatgatggagaagctcacttccagctgtccagatcttcccagccaaactgacaagaaatgcagttaaaaaccaaatttcagtattattggtgccaacatgtctatcctgaggacctttgctgctgttggacactccgtcaccttttggaacacaagtatatcaagatagtggctactgatgttcaagtgggattgaagtgtgataaatggatatattttgttgtttgctggggtgttcatggagatgttaagagattgaggccctgggctgagggtatataatgtatgtcaggtaaagtttgaagactgccaaggagcagattttctccctggaaatgtgaaaactgaacctataactctgataaggacttgagatgtgtagaaacgttgggttatggaagactagtttcttccataaccctgaattggagaccttaatgctaagtgtagattattgaggtttgttagtgaggaaaagaataagagttcagaagcctttgttatcagatagcgaaatcagggcctagtgaggagcacaggtcgactacataatggagtccattggcgaaccctattgcaatttggtccaactatatcttctggtgaaggaaattaatgatgtaagaaaatgcaagaggctcaacttctcttccaaaaatcttctggcttctgaactcttcctctgcctctctttaaataaataacacagaatttcaagtggtaggagacttattaagccagtcaccaagcttggtctgtcagcctgtcttctaacacctcaaagatcttgtgccctgtgctgtccctcccttgtaattatgaaaagttctttggtttctggggtgaattctacccatgtataatgaggaattctctcataaccttttttgtcttgtctgtcatctctgttcatcccttcctataacctctaggtaaaaagaaaagaaaaaaagaaatttcgagatattttcaacattgttagagtttgggctaaaatgagcaaggagaaaaaaaccaccaagaacatttcctggggcatgttccagttttgaggggtgatatatctgccagatagggggtatctgacccagtcttcttttcagctggtctctggggggagctgagaactcgcttgctacctcacatccttttccccagactttttatctcctatgcatccctttgctttctatagctggtgtttcttccccaaaatggcgttcccatgcttacctttctcacattctagacaatgatggacaaagacgcatgcaagactcagacccggggaatggtgtggtgctaatctcaacacctgacattcacagcaagcatggcccagcccaaccgcatgtctatctcaaaccgcagaaaggctttaatactggaaaaaaagaattcaagactacaggcagctcccctctgtaccccaactcatttaaaataggaggaatcactttttgccttacttaacgcttttttctgagcacagggatgggcacctgcaccccagaaggtgtgagctgtctctctgccaggagctaaggttcattaggggattggatggtttatcacttctttctttctgagtttacttttagtaacttttattgatggctacctttcatgtccctgtctaaagagactttctctttcatacgtcttaaatctcatcaatgaaatccagtgaaacagcaccatttcttagtatcattaaataactagaaagtatcaagtattgctctctgctgctttatatcattaacatattaataataccaagaaggaaatactttgaataagtgtcagattctgatccagtattggacacctgtgatattggacacctgtgaggctgggataattacttttgaattacacctcttctctagtttctggaccttgctctgtcactttaacacagggtgatcaaacctgaatgaggatcagaactcacccaggcacatactaaagcaagattcctaaacctcagttccaggggtaattctgacatcacccgtccagcatagtcagctgaaattataaatctaagaaacagttacatcaagattctgctgtgtcatttaattctgaaactcccagtattctacccttcttcatcactgcatattaccccactcttccatcccaaattggctatcctttcagcccaccaacttagcggcagcactagggattcattataaggtaaatctggtttacataaagacctgaaggaggcctgtatttgaagctcacacttggtattggtatctctcatttttactgagccagtgtggaataccactgtatgtactcatataagcccttgacttttactgctcatcaggattggaatattactctagcagtcttcacacataggcaagttacagtccttttaaaaagtatctcatttccctataatggaacctaatagccaactttttcatagaaattgctagaagagtttgatcaactataaatgataaagtgtttataagcatagtcagtgtgacacagaaaccaatcttaaaattgaatttaatgttttatcatatcagattaaatattttctccatgtcttatttttactgcaacaagttagaaagtgggaacactttgattaatgtcttaaaatttgtgggccctcatttggataaaggcagcaatcctaaggactttttttttttttaacataatctgagaatttctctgtagagcagagactttcaaaccttttggctgtaacccacagtaaaaaacgcatttatatcaaaccttagaatatgtttaatgaacaatacttaccattctgatgctttttattgtttcagtttttaaaatatgccagttgcaacccactaaattgatatctaccaatgggttgcaacccttagcttgaaaaaaacaccctcacagaggaactggtatttcttgaataccttctgtttgccaggcacttcaccaggcattttacaagtaaggaaactgggcttcagagaaaataatttgcagaggtttactcaactacaaaggggtgaagccaggaatgttaactaggtctgttgagctacaaaaacttttatgtctctcagactatacagcctctatacaaaattgagatgggggttgggggcaggggctcatgcctgcaatcccagcacttagggaggcagaggccagaggatcacttgagcccaggagtttgagaccagcctgggcaacatagtgagactctgtctgtatgaaaaaaattaagaattagctgggtgtggcatagcacacacctgtggtcccagctacatgggaagctgaagtgggaggatcacttgaactcaggagcagccttggtgacagaacaagaccctctctcaaaaaaatatttaaaaaaaggtgggtcatccattctcctttaccaaacaggctttgaaatgacacattccattcatttgcatctttttaaaaaacttctgattccttactgagtgtccagcagcctcaaagtttttaatggtagctgatgcagacataaacagtgctcaatttggcccttaaactataaaatcaagaaagagtatttcaatcccatccacctgcctgcaagatttcttaatgttcactagttataaccattgtttaaacagtgctttttgtgtaatttaaaaataaactttaatgcttttta

SEQ ID NO: 375662 - DNA, 3289 bp, Homo sapiens
gtgcccaccgaccggcctcgagcgccccggcgggaggtttttctatatgagtggagaagacagctgttaccagggaggtcatacaacatttttttaggatgtctgaagatgaagaaaaagtgaaattacgccgtcttgaaccagctatccagaaattcattaagatagtaatcccaacagacctggaaaggttaagaaagcaccagataaatattgagaagtatcaaaggtgcagaatctgggacaagttgcatgaagagcatatcaatgcaggacgtacagttcagcaactccgatccaatatccgagaaattgagaaactttgtttgaaagtccgaaaggatgacctagtacttctgaagagaatgatagatcctgttaaagaagaagcatcagcagcaacagcagaatttctccaactccatttggaatctgtagaagaacttaagaagcaatttaatgatgaagaaactttgctacagcctcctttgaccagatccatgactgttggtggagcatttcatactactgaagctgaagctagttctcagagtttgactcagatatatgccttacctgaaattcctcaagatcaaaatgctgcagaatcgtgggaaaccttagaagcggacttaattgaacttagccaactggtcactgacttctctctcctagtgaattctcagcaggagaagattgacagcattgcagaccatgtcaacagtgctgctgtgaatgttgaagagggaaccaaaaacttagggaaggctgcaaaatacaagctggcagctctgcctgtggcaggtgcactcatcgggggaatggtagggggtcctattggcctccttgcaggcttcaaagtggcaggaattgcagctgcacttggtggtggggtgttgggcttcacaggtggaaaattgatacaaagaaagaaacagaaaatgatggagaagctcacttccagctgtccagatcttcccagccaaactgacaagaaatgcagttaaaaaccaaatttcagtattattggtgccaacatgtctatcctgaggacctttgctgctgttggacactccgtcaccttttggaacacaagtatatcaagatagtggctactgatgttcaagtgggattgaagtgtgataaatggatatattttgttgtttgctggggtgttcatggagatgttaagagattgaggccctgggctgagggtatataatgtatgtcaggtaaagtttgaagactgccaaggagcagattttctccctggaaatgtgaaaactgaacctataactctgataaggacttgagatgtgtagaaacgttgggttatggaagactagtttcttccataaccctgaattggagaccttaatgctaagtgtagattattgaggtttgttagtgaggaaaagaataagagttcagaagcctttgttatcagatagcgaaatcagggcctagtgaggagcacaggtcgactacataatggagtccattggcgaaccctattgcaatttggtccaactatatcttctggtgaaggaaattaatgatgtaagaaaatgcaagaggctcaacttctcttccaaaaatcttctggcttctgaactcttcctctgcctctctttaaataaataacacagaatttcaagtggtaggagacttattaagccagtcaccaagcttggtctgtcagcctgtcttctaacacctcaaagatcttgtgccctgtgctgtccctcccttgtaattatgaaaagttctttggtttctggggtgaattctacccatgtataatgaggaattctctcataaccttttttgtcttgtctgtcatctctgttcatcccttcctataacctctaggtaaaaagaaaagaaaaaaagaaatttcgagatattttcaacattgttagagtttgggctaaaatgagcaaggagaaaaaaaccaccaagaacatttcctggggcatgttccagttttgaggggtgatatatctgccagatagggggtatctgacccagtcttcttttcagctggtctctggggggagctgagaactcgcttgctacctcacatccttttccccagactttttatctcctatgcatccctttgctttctatagctggtgtttcttccccaaaatggcgttcccatgcttacctttctcacattctagacaatgatggacaaagacgcatgcaagactcagacccggggaatggtgtggtgctaatctcaacacctgacattcacagcaagcatggcccagcccaaccgcatgtctatctcaaaccgcagaaaggctttaatactggaaaaaaagaattcaagactacaggcagctcccctctgtaccccaactcatttaaaataggaggaatcactttttgccttacttaacgcttttttctgagcacagggatgggcacctgcaccccagaaggtgtgagctgtctctctgccaggagctaaggttcattaggggattggatggtttatcacttctttctttctgagtttacttttagtaacttttattgatggctacctttcatgtccctgtctaaagagactttctctttcatacgtcttaaatctcatcaatgaaatccagtgaaacagcaccatttcttagtatcattaaataactagaaagtatcaagtattgctctctgctgctttatatcattaacatattaataataccaagaaggaaatactttgaataagtgtcagattctgatccagtattggacacctgtgatattggacacctgtgaggctgggataattacttttgaattacacctcttctctagtttctggaccttgctctgtcactttaacacagggtgatcaaacctgaatgaggatcagaactcacccaggcacatactaaagcaagattcctaaacctcagttccaggggtaattctgacatcacccgtccagcatagtcagctgaaattataaatctaagaaacaaatcaataggccgggcgcagtggctcatgcctgtaatcccagcactttgggaggccgaagcgggcgaatcatgaggtcaggaaatcgagaccatcctggctaacatggtgaaacccagtctctactaaaaatacaaaaaattagccaggcatggtggcgggcacctgtagtcccagctactcaggaggctgaggcaggagaatggcctgaacctaggaggtggagcttgcagtgagccgagatagcgccactgcactccagcctgggcaacagagcgagactctgtctcaa

SEQ ID NO: 375663 - DNA, 363 bp, Homo sapiens
ggcacgagccaaactcctacaggatgggcctcctccaggcctaggccgagtgattggtgagctgggagaggacgggtggataagagtccagtgggacacaggcagcaccaactcctacaggatggggaaagaaggaaaatacgacctcaagctggcagagctgccagcccctgcacagccctcagcagaggattcggacacagaggacgactctggtgggtgactcaggaaggtgtttagtccaaggcagcctacaaactgtccagttgctgggtgctgccactgccatctgggccttagaatgggatgtcaggacacacctgcagctggcgctctgtcctcggaacctgtaatttaaataag

SEQ ID NO: 375664 - DNA, 811 bp, Homo sapiens
  misc_feature (20)..(20): n is a, c, g, or t
cgggcgcaaatacagtacancgtttgtgggcacgagcatttaaaaattctctgctggtgagcatttcggcacgatgtgaagagcgggtcaggaagatgagcacagcactgctactcctgtgggcacagggacagcatgtctccagccaccgcaaagttttaaagctttcatccacagtcaggaattaaacttataccaatgagagcctcacacattcaaggatgtactaagcactacaggcctcacagaaacagagatcccatcttggagttttcagtaccacatgggagataaagggttttgaacatgaaatgacaaaaacaacagcaagaagaaaattcttgtcctttttcattactatcagactcaaataaatgtcttggctcttacattacattcattcttcaaccattgtggtctggcttccacttccttcacttcaccaacatggctctgccaaaggaagcccgtgatctctaggccatcactttaattgatctttctacaacatttatcctggttgttaagccctccttacaacattcttctctctttgtttttatagctccatctctcctgcttctttaacttgataatgcatacttgatttttctatttgttatttcataaaccaattaatacacagataaaatgactgtatatcaaaccatgtttgtatagaaaaaatggattttggatgcctctcatatgtaattagttctattaaacatattaattgtattgtttaatttgtcaggtttttgacagaattttgtttacaagtaataaaaattttatctccaattttcaa

SEQ ID NO: 375665 - DNA, 6323 bp, Homo sapiens
  misc_feature (2)..(3): n is a, c, g, or t
  misc_feature (9)..(9): n is a, c, g, or t
  misc_feature (12)..(13): n is a, c, g, or t
gnntcggcncgnncctcgggccgcgagaggcgccgggatcgcgggcgccggctgagccagcggctcttgggaggctgcgtccgcgcgccggcggggcggggcggccgggccctgcgcgtcaggcctgagacctgggaggaagctggagaaaagatgccctctgaatctttgtgtttggctgcccaggctcgcctcgactccaaatggttgaaaacagatatacagagtcattttttacaggtcagaactgtagaaataatgagaaagtgacacttgtacgcatagctgatttggagaaccataataacgatggaggcttctggactgtgattgacgggaaagtgtatgatataaaggacttccagacacagtcgttaacagaaaatagtattcttgctcagtttgcaggggaagacccagtggtagctttggaagctgctttgcagtttgaagacacccgggaatccatgcacgcattttgtgttggccagtatttggagcctgaccaagaaggcgtcaccataccagatctggggagtctctcctcacctctgatagacacagagaggaatctgggcctgcttctcggattacacgcttcctatttagcaatgagcacaccgctgtctcctgtcgagattgaatgtgccaaatggcttcagtcatccatcttctctggaggcctgcagaccagccagatccactacagctacaacgaggagaaagacgaggaccactgcagctccccagggggcacacctgccagcaaatctcgactctgctcccacagacgggccctgggggaccattcccaggcatttctgcaagccattgcagacaacaacattcaggatcacaacgtgaaggactttttgtgtcaaatagaaaggtactgtaggcagtgccatttgaccacaccgatcatgtttccccccgagcatcccgtggaagaggtcggtcgcttgctgttatgttgcctcttaaaacatgaagatttaggtcatgtggcattatctttagttcatgcaggtgcacttgatattgagcaagtaaagcacagaacgttgcctaagtcagtggtggatgtttgtagagttgtctaccaagcaaaatgttcgctcattaagactcatcaagaacagggccgttcttacaaggaggtctgcgctcctgtcatcaaacgtttgagattcctctttaatgaattgagacctgctgtttgtaatgacctctctataatgtctaagtttaaattgttaagttctttgccccattggaggaggatagctcagaagataattcgagaaccaaggaaaaagagagttcctaagaagccagaatctacggatgatgaagaaaaaattggaaacgaagagagtgatttagaagaagcttgcattttgcctcatagtccaataaatgtggacaagagacccattgcaattaaatcacccaaggacaaatggcagccgctgttgagtactgttacagatgttcacaaatacaagtggttgaagcagaatgtgcagggtctttatccgcagtctccactcctcagtacaattgctgaatttgcccttaaagaagagccagtggatgtggaaaagagaaagtgcctactaaaacagttggagagagcagaggttcgcctggaagggatagatacaattttaaaattgtatctggtgagcaagaatttcttacttccatctgtgccgtatgcgatgttttgtggatggcaaagacttattcctgagggaatcgatataggggaacctcttactgattgtttaaaggatgttgatttgatcccgccttttaatcggatgctgctggaagtcacctttggcaagctgtacgcttgggctgttcagaacattcgaaatgttttggtggatgccagtgccaaatttaaagagcttggtatccagccggttcccctgcaaaccatcaccaatgagaacccatcgggaccgagcctggggaccatcccgcaagcccacttcctcctggtgatgctcagcatgctcaccctgcagcacagcgcaaacaaccttgacctcctgctcaattccggcacgctggccctcgctcagacggcactgcgcctgattggccccagttgtgacagcgttgaggaagatatgaatgcttctgctcaaggtgcttctgccacagttttggaagaaacaaggaaggaaacggctcctgtgcagctccctgtttcagggccagaactggctgccatgatgaagattggaacaagggtcatgagaggtgtggactggaaatggggcgatcaggatgggcctcctccaggcctaggccgagtgattggtgagctgggagaggacgggtggataagagtccagtgggacacaggcagcaccaactcctacaggatggggaaagaaggaaaatacgacctcaagctggcagagctgccagcccctgcacagccctcagcagaggattcggacacagaggacgactctgaagccgaacaaactgaaaggaacattcaccccactgcaatgatgtttaccagcactattaacttactgcagactctttgtctgtctgctggagttcatgctgagatcatgcagagtgaagccaccaagactttatgcggactgctgcaacaaacaggctggtgtacagggagcaacaccggagctggtgcacgctggggtttgtgcagagcatcgctctcacgctgcaggtgtgcggcgccctcagctccccgcagtggatcacgctgctcatgaaggttgtggaagggcacgcacccttcactgccacctcgctgcagaggcagatcttagctgtgcatttgttgcaagcagtccttccgtcatgggacaagaccgaaagggtgagggacatgaaatgcctcatggagaagctgtttgacttcttggggagcttgctcactatgtgctcctctgacgtgccgttactcagaggtgggtggccgtctcccttccctgtaccctggtgaagagcggtgcagtgccgtcactcagaggtgggtggccgtctcccttccctgtgtcctggtgaagagcggtgcagtgccgtcactcagaggtgggtggccgtctcccttccctgtaccctggtgaagagcggtgcagtgccgtcactcagaggtgggtggccgtctcccttccctgtgtcctggtgaagagccgtgtagtgccgtcactcagaggtgagtggccgtctcccttccctgtgtcctggtgaagagcggcgcagtgtcgtcactcagagatgagtgaccatctcccttccctgtgaccctggtgaagagtggtgcagcagcttctcccctggtttcctcctcagagtccacgctgaggcggcgcagggtgtgcccgcaggcctcgctgactgccacccacagcagcacactggcggaggaggtggtggcactgctgcacacgctgcactccctgactcggtggaatgggctcatcaacaagtacatcaactcccagctccgctccatcacccacagctttgcgggaaggccttccaaaggggcccagttagatgactacttccctgattccgagaaccctgaagtggggggcctcatggcggtcctggctgtggttggaggcatcgatggtcgcctgtgcctgggcggccaagttgtgcacgatgactttggagaagtcaccatgactcgcatcaccctgaagggcaaaatcaccgtgcagttctctgacatgcggacgtgtcgcgtttgcccattgaatcagctgaaaccactccctgccgtggcctttaatgtgaacaacctgcccttcacagagcccatgctgtctgtctgggctcagttggtgaacctcgctggaagcaagttagaaaagcacaaaataaagaaatcgactaaacaggcctttgcaggacaagtggacctggacctgctgcggcgccagcagttgaagctatacatcctgaaagcaggtcgggcgctgttctcccaccaggataaactgcggcagatcctgtctcagccagctgttcaggagactggaactgttcacacagatgatggagcagtggtatcacctgaccttggggacatgtctcctgaagggccgcagccccccatgatcctcttgcagcagctgctggcctcggccacccagccgtctcctgtgaaggccatatttgataaacaggaacttgagactgctgcactggccgttgtggagtccactcacccttcgagcccaggatttgaagactgcagctccagtgaggccaccacgcctgtcaacgtgcagcacatccgccctgccagagtgaagaggcgcaagcagtcacccgttcccgctctgccgatcgtggtgcagctcatggagatgggatttcccagaaggaacatcgagtttgccctgaagtctctcactggtgcttccgggaatgcgtccggcttgcctggtgtggaagccttggtcgggtggctgctggaccactccgacatacaggtcacggagctctcagatgcagacacggtgtccgacgagtattctgacgaggaggtggtggaggacatggatgatgccgcctactccatgtctactggtgctgttgtgacggagagccagacgtacaaaaaccgagctggtttcttgggtaatgatgattatgctgtatatgtgagagagaatattcaggtgggaatgatggttagatgctgccgaacatacgaagaagtgtgcgaaggtgatgtgatgttggcaaagtcatcaagctggacagagatggattgcatgatctcaatgtgcagtgtgactggcagcagaaagggggcatctactggtttaggtacattcatgtggaacttataggctatcctccaccaagaagttcttctcacatcaagattggtgataaagtgcgggtcaaagcctctgtcaccacaccaaaatacaaatggggatctgtgactcatcagagtgtgggggttgtgaaaggtgtgatggatgtcagatgtttcctatcaatggatccagattcaaatgcagaaactgtgatgactttgatttttgtgaaacgtgtttcaagaccaaaaaacacaataccaggcatacatttggcagaataaatgaaccaggcttcagcagaagaaacacttcctataaatctcgcccaaacaggaaagcaaacctgaaaatacactatcctccagctatcagaattatattgagatctactcacatttatgatgatgttcagagattctcattgggaaggaaaaggcacacgctgcggcggtcttgcatgactctgttgttgtggaaattcaatttgttcattgtgttttgggctctctgggtggtcagggctgggctctgggtccttggcaattcctcaggttcccagcactccaaagccaagctcacctcctcatcacacaccctacaggagaagcattagggtgtccgactacgtgggtttcatagctgtggaaaagccaaaggggagactcctgaagaaaggcggtgaagactgtgaagagcgggtcaggaagatgagcacagcactgctactcctgtgggcacagggacagcatgtctccagccagcgccaccttgtttaatacatgggaactcactgaaattcattctgtattttgcccgcaaagttttaaagctttcatccacagtcaggaattaaacttataccaatgagagcctcacacattcaaggatgtactaagcactacaggcctcacagaaacagagatcccatcttggagttttcagtaccacatgggagataaagggttttgaacatgaaatgacaaaaacaacagcaagaagaaaattcttgtcctttttcattactatcagactcaaataaatgtcttggctcttacattacattcattcttcaaccattgtggtctggcttccacttccttcacttcaccaacatggctctgccaaaggaagcccgtgatctctaggccatcactttaattgatctttctacaacatttatcctggttgttaagccctccttacaacattcttctctctttgtttttatagctccatctctcctgcttctttaacttgataatgcatacttgatttttctatttgttatttcataaaccaattaatacacagataaaatgactgtatatcaaaccatgtttgtatagaaaaaatggattttggatgcctctcatatgtaattagttctattaaacatattaattgtattgtttaatttgtcaggtttttgacagaattttgtttacaagtaataaaaattttatctccaattttcaa

SEQ ID NO: 375666 - DNA, 750 bp, Homo sapiens
ctttcttaactcagttgctattttacaaataggtgtgatggatgtcagatgtttcctatcaatggatccagattcaaatgcagaaactgtgatgactttgatttttgtgaaacgtgtttcaagaccaaaaaacacaataccaggcatacatttggcagaataaatgaaccaggtatggcagaatgtttatattctctcttccaccaaatattaatgaaatacttattgtggaccacagtgtactggaatttgttattttaaggttcctttgcatatggtaattctgtagagtgagtacagtgagacggaagtgacggtcctacccgctgatgactggctggctttttaaaaaaatcaggatggggtatcggggaagaattagaataactaggcttgtttgcttgtttttccataaagaaacattaaaagaatctcaagaaactagtaagtgtttagttgcgtggcatgtggaattggttagatggagagtgagtgttttaatttgtataccttttattatatttttcattgtggcaaaatatatttaacttaaaattagccacttagtcattttctaagtttataattcagggtattaagtaccttaagtacagtgttgcacaaccatcacaactttctcttaccaaaacttttcaccactccgatcagaaactctgtacccattaagcaatttaactgccctacttccccttaccccaaccctggtaaccttgaatctaactttggtct

SEQ ID NO: 375667 - DNA, 572 bp, Homo sapiens
cgatccctgtaacaccgcaactccaccaaatattaatgaaatacttattgtggaccacagtgtactggaatttgttattttaaggttcctttgcatatggtaattctgtagagtgagtacagtgagacggaagtgacggtcctacccgctgatgactggctggctttttaaaaaaatcaggatggggtatcggggaagaattagaataactaggcttgtttgcttgtttttccataaagaaacattaaaagaatctcaagaaactagtaagtgtttagttgcgtggcatgtggaattggttagatggagagtgagtgttttaatttgtataccttttattatatttttcattgtggcaaaatatatttaacttaaaattagccacttagtcattttctaagtttataattcagggtattaagtaccttaagtacagtgttgcacaaccatcacaactttctcttaccaaaacttttcaccactccgatcagaaactctgtacccattaagcaatttaactgccctacttccccttaccccaaccctggtaaccttgaatctaactttggtct

SEQ ID NO: 375668 - DNA, 540 bp, Homo sapiens
agactcggctgagttcatcaacagctgtgatttcaacaggacgagggccatgtcgtgacccccacgtcccccaagtcaggatggcacgccacccccaggccacctgcagccttacctgccccgagtccgtgaccgccaggcagtgcagggccccgacagccacatgcacgatcttcttccctctcagcccttccaccacctacagtttccacacgtgcacgtcagagccctggcgcaacctgaagtaatccccctttcccctgagaaggaggcccgtggtggagtgttacaatatagttgtggtctgacaatgctatacaagaagacactcattgtctcacatctttcacagccagctcaatgacatcacacacagcacccaaggtcttcgaacttgtattcaaaatcatacaccattaattcaaattaacttattaagtcagctgggaaaaaccttaataccttaatacatgttctacaatatttaagttactgttgtaggttttcatatagactgaaaataagacacattactgcaaa

SEQ ID NO: 375669 - DNA, 537 bp, Homo sapiens
acggtatgacattctgaaaagcggtgacagattaaaaaatttttaattctgcagatgatagtgtcgaaccaagtgggacaaagaaagatctgaatgacaaagagaaaaaagatgaagaagaaactcctgcacctatatatagggccaagtcaattctggacagctgggtatggggcaagcaaccaggtgatcttgcgaattttggcactttggaaaggttgatctgacactccctttctaaataacttgaatggattcttagtatttttttggtaacaattttttaaaaactaattaaaaaatttaaatattgtggtaaaatatacataccatgtaacttaccgttttaaccagttttatgtgtacagttcattggcattaaatatattgacattgttgcccagccatcacgcttgactaattagagacagaatctcactgtgttgcccaggccggtcttatactcctggcttcacgggatcttcctgcctcagactcctgagttgctgagatttcagatgtgagccatcgcacctg

SEQ ID NO: 375670 - DNA, 744 bp, Homo sapiens
aaaacttgaagtatatagaaaatatctgagaagatagtaaccaccacactgatgtaattattgttgacaggtttgtaaagaaaaattaatatagattatacttattatatgtgtaaatctctatcctgcctttaatgtcattttaaaaaatgattattctcagctataaaaaggcttacgggtatgtgtggcatttcaggattaagcccatggttttgatgactttcagaacgtttcatttgttagtcatattggccacactctgacagcttctgtgtcctctccagctccctgccgtggcctttaatgtgaacaacctgcccttcacagagcccatgctgtctgtctgggctcagttggtgaacctcgctggaagcaagttagaaaagcacaaaataaagaaatcgactaaacaggcctttgcaggacaagtggacctggacctgctgcggcgccagcagttgaagctatacatcctgaaagcaggtcgggcgctgttctcccaccaggataaactgcggcagatcctgtctcagccagctgttcaggagactggaactgttcacacaggtgtctttttaaaaagttcttaaatctttataagaagggcagtagaaagtagacaaaggaagtgaataatcagttcataaaaatggacataggtggcttataaatgtacaaaacagacacgtggcctgcccagcaaccaccaactgtgaataaaattgtcatcgtcatcttata

SEQ ID NO: 375671 - DNA, 6306 bp, Homo sapiens
ggcacgagccaaactcctacaggatgggcctcctccaggcctaggccgagtgattggtgagctgggagaggacgggtggataagagtccagtgggacacaggcagcaccaactcctacaggatggggaaagaaggaaaatacgacctcaagctggcagagctgccagcccctgcacagccctcagcagaggattcggacacagaggacgactctgaagccgaacaaactgaaaggaacattcaccccactgcaatgatgtttaccagcactattaacttactgcagactctttgtctgtctgctggagttcatgctgagatcatgcagagtgaagccaccaagactttatgcggactgctgcaaatgttagtggaaagcggaacgacggacaagacatcaaacaggctggtgtacagggagcaacaccggagctggtgcacgctggggtttgtgcagagcatcgctctcacgctgcaggtgtgcggcgccctcagctccccgcagtggatcacgctgctcatgaaggttgtggaagggcacgcacccttcactgccacctcgctgcagaggcagatcttagctgtgcatttgttgcaagcagtccttccgtcatgggacaagaccgaaagggtgagggacatgaaatgcctcatggagaagctgtttgacttcttggggagcttgctcactatgtgctcctctgacgtgccgttactcagaggtgggtggccgtctcccttccctgtaccctggtgaagagcggtgcagtgccgtcactcagaggtgggtggccgtctcccttccctgtgtcctggtgaagagcggtgcagtgccgtcactcagaggtgggtggccgtctcccttccctgtaccctggtgaagagcggtgcagtgccgtcactcagaggtgggtggccgtctcccttccctgtgtcctggtgaagagccgtgtagtgccgtcactcagaggtgagtggccgtctcccttccctgtgccctggtgaagagtggtgcagcagcttctcccctggtttcctcctcagagtccacgctgaggcggcgcagggtgtgcccgcaggcctcgctgactgccacccacagcagcacactggcggaggaggtggtggcactgctgcacacgctgcactccctgactcggtggaatgggctcatcaacaagtacatcaactcccagctccgctccatcacccacagctttgcgggaaggccttccaaaggggcccagttagatgactacttccctgattccgagaaccctgaagtggggggcctcatggcggtcctggctgtggttggaggcatcgatggtcgcctgtgcctgggcggccaagttgtgcacgatgactttggagaagtcaccatgactcgcatcaccctgaagggcaaaatcaccgtgcagttctctgacatgcggacgtgtcgcgtttgcccattgaatcagctgaaaccactccctgccgtggcctttaatgtgaacaacctgcccttcacagagcccatgctgtctgtctgggctcagttggtgaacctcgctggaagcaagttagaaaagcacaaaataaagaaatcgactaaacaggcctttgcaggacaagtggacctggacctgctgcggcgccagcagttgaagctatacatcctgaaagcaggtcgggcgctgttctcccaccaggataaactgcggcagatcctgtctcagccagctgttcaggagactggaactgttcacacagaacccatggatacggagggctagctgtatatgtttattgctgtggaaacatgaaaacaatgatggagcagtggtatcacctgaccttggggacatgtctcctgaagggccgcagccccccatgatcctcttgcagcagctgctggcctcggccacccagccgtctcctgtgaaggccatatttgataaacaggaacttgagactgctgcactggccgttgtggagtccactcacccttcgagcccaggatttgaagactgcagctccagtgaggccaccacgcctgtcaacgtgcagcacatccgccctgccagagtgaagaggcgcaagcagtcacccgttcccgctctgccgatcgtggtgcagctcatggagatgggatttcccagaaggaacatcgagtttgccctgaagtctctcactggtgcttccgggaatgcgtccggcttgcctggtgtggaagccttggtcgggtggctgctggaccactccgacatacaggtcacggagctctcagatgcagacacggtgtccgacgagtattctgacgaggaggtggtggaggacatggatgatgccgcctactccatgtctactggtgctgttgtgacggagagccagacgtacaaaaaccgagctggtttcttgggtaatgatgattatgctgtatatgtgagagagaatattcaggtgggaatgatggttagatgctgccgaacatacgaagaagtgtgcgaaggtgatgtgatgttggcaaagtcatcaagctggacagagatggattgcatgatctcaatgtgcagtgtgactggcagcagaaagggggcatctactggtttaggtacattcatgtggaacttataggctatcctccaccaagaagttcttctcacatcaagattggtgataaagtgcgggtcaaagcctctgtcaccacaccaaaatacaaatggggatctgtgactcatcagagtgtgggggttgtgaaaggtgtgatggatgtcagatgtttcctatcaatggatccagattcaaatgcagaaactgtgatgactttgatttttgtgaaacgtgtttcaagaccaaaaaacacaataccaggcatacatttggcagaataaatgaaccaggcttcagcagaagaaacacttcctataaatctcgcccaaacaggaaagggtaagtggcctaaaatttttctagtattttcaaaatgacccagttacaataggaaatttcttcttgtactattgtcactaatcccgactcaatatcctttaaaggacaaagatgcatgcataagtaaaaatatgacaggtcacaatcacgccggggtggtcctggggcgaggcccaagttccctgcacgcgtcggcacaagcacgcacactgtgacggggaggacgtttacgtaccatgtccacaccactccagacttggtgagcgccagtaggaactgagctccacactcaatctggcacaccccctgtccatttagtctctcaatgttctggggaatgttgcagccttcacttccgccccggcccaattttccaaagtcaccatcaccccaggaaaataccaaacctaggtttaaaaatagggaagggaagggaagggaagggaagggagagaagaaaggaaagataaagaaagcccaacctccttccaaaatgtcatgagaatcttgagcacatatggtccttggcatgaccacatgacctgcagagcccctgttatagaactcatttttatattttccttagtataacagttaatataatatgtcatttttgttaatagtgtctttttgtcattttactttttaaaagattttattgaaatatacatacaggaaagtgcatctatcataagtgtgcaaattgatgaattctaaaatctttattgtacctgtttagcacctagattgacactgaacataactaacaaccagaaatctccgtgtactcccttcctgtaactacccctgcgcccgaccaaatcactctcttctaacagcataactttgtgtgactagcttttttaatgtcattatatttgtgggattcgtttgtacagttgcatattagtttgcagatccctcactctcatttctatatggtattatattgcataaacgtaccacactttatccaactactgttaaatatttgtgcattttctacttgggggtgatttcaaatagtgctgctatgaacattcttgtaaatgtcttttggtgaacatatgcaacacatatatgcgttgttgttggttcccaggaggggcattcctgggtcataaacaatgcgtgtgttcaggtttagtacagtataatgccaaacaggtttccaaagtgtttgtgccactttacatacctgccattattgaaaaagagttctgtttgctccacattgtcaccaatacttgatattttctgttttttttttcttttaaaccgtactagtgggtgtgcagtgatattgcaatgtggttttaatttgcatcttccttgtgacaaccttgattactgtaagccacttggaaatgtgatttaaattcatataaagatatagtagcaaaacgcatactaggttactttcgtatccagaaagtttagatagaatgatttctatgtaagcttttactgtgtagtctgagtccatgaatattgattacaaaaaacacatctgtaggtgagttacaatacctcacttataattccaaattcatgttgtgttagctcaatatttttcaaataatttttgcatgcaattttcaccttctttctgagtagtttcaggtattttgtatggttccagcagtcagttaggttgccattgtttggaagcacacatccacgtatctgcaccatgatgatatgacacgcccataccccccatttcacattttgtcagaagtgcatagttatcactaactttgccagtagaaatgtactcccaatttcccacggacttatcttgaataatctctccactgaagcataacaggttttgaattctgttagaatagttgtttttactatcttttaattttatacaaatttcaaagttacgtaatacttttatttaaaaagtgaaacaaagcttttcctctcccttacccacatgttagtccagcagagggggaaagcattggccccaggccaaaatcataaacgctttcaattaactaataataattgctggcatgttgccattaaatattcttgtctcattatctctggttgctttatcaaacccataggtcactgaagcccacttttgagacaaagactatttctcccccaaaagtcaagggaaatataaaaaatgaaattagtgattaagaatagaagtcaattaatacaatcattttgtcttaattatttaaagtccagttttttccctccagcaaacctgaaaatacactatcctccagctatcagaattatattgagatctactcacatttatgatgatgttcagagattctcattgggaaggaaaaggcacacgctgcggcggtcttgcatgactctgttgttgtggaaattcaatttgttcattgtgttttgggctctctgggtggtcagggctgggctctgggtccttggcaattcctcaggttcccagcactccaaagccaagctcacctcctcatcacacaccctacaggagaagcattagggtgtccgactacgtgggtttcatagctgtggaaaagccaaaggggagactcctgaagaaaggcggtgaagactgtgaagagcgggtcaggaagatgagcacagcactgctactcctgtgggcacagggacagcatgtctccagccagcgccaccttgtttaatacatgggaactcactgaaattcattctgtattttgcccgcaaagttttaaagctttcatccacagtcaggaattaaacttataccaatgagagcctcacacattcaaggatgtactaagcactacaggcctcacagaaacagagatcccatcttggagttttcagtaccacatgggagataaagggttttgaacatgaaatgacaaaaacaacagcaagaagaaaattcttgtcctttttcattactatcagactcaaataaatgtcttggctcttacattacattcattcttcaaccattgtggtctggcttccacttccttcacttcaccaacatggctctgccaaaggaagcccgtgatctctaggccatcactttaattgatctttctacaacatttatcctggttgttaagccctccttacaacattcttctctctttgtttttatagctccatctctcctgcttctttaacttgataatgcatacttgatttttctatttgttatttcataaaccaattaatacacagataaaatgactgtatatcaaaccatgtttgtatagaaaaaatggattttggatgcctctcatatgtaattagttctattaaacatattaattgtattgtttaatttgtcaggtttttgacagaattttgtttacaagtaataaaaattttatctccaattttcaa

SEQ ID NO: 375672 - DNA, 5968 bp, Homo sapiens
ggcacgagccaaactcctacaggatgggcctcctccaggcctaggccgagtgattggtgagctgggagaggacgggtggataagagtccagtgggacacaggcagcaccaactcctacaggatggggaaagaaggaaaatacgacctcaagctggcagagctgccagcccctgcacagccctcagcagaggattcggacacagaggacgactctgaagccgaacaaactgaaaggaacattcaccccactgcaatgatgtttaccagcactattaacttactgcagactctttgtctgtctgctggagttcatgctgagatcatgcagagtgaagccaccaagactttatgcggactgctgcaaatgttagtggaaagcggaacgacggacaagacatcaaacaggctggtgtacagggagcaacaccggagctggtgcacgctggggtttgtgcagagcatcgctctcacgctgcaggtgtgcggcgccctcagctccccgcagtggatcacgctgctcatgaaggttgtggaagggcacgcacccttcactgccacctcgctgcagaggcagatcttagctgtgcatttgttgcaagcagtccttccgtcatgggacaagaccgaaagggtgagggacatgaaatgcctcatggagaagctgtttgacttcttggggagcttgctcactatgtgctcctctgacgtgccgttactcagaggtgggtggccgtctcccttccctgtaccctggtgaagagcggtgcagtgccgtcactcagaggtgggtggccgtctcccttccctgtgtcctggtgaagagcggtgcagtgccgtcactcagaggtgggtggccgtctcccttccctgtaccctggtgaagagcggtgcagtgccgtcactcagaggtgggtggccgtctcccttccctgtgtcctggtgaagagccgtgtagtgccgtcactcagaggtgagtggccgtctcccttccctgtgccctggtgaagagtggtgcagcagcttctcccctggtttcctcctcagagtccacgctgaggcggcgcagggtgtgcccgcaggcctcgctgactgccacccacagcagcacactggcggaggaggtggtggcactgctgcacacgctgcactccctgactcggtggaatgggctcatcaacaagtacatcaactcccagctccgctccatcacccacagctttgcgggaaggccttccaaaggggcccagttagatgactacttccctgattccgagaaccctgaagtggggggcctcatggcggtcctggctgtggttggaggcatcgatggtcgcctgtgcctgggcggccaagttgtgcacgatgactttggagaagtcaccatgactcgcatcaccctgaagggcaaaatcaccgtgcagttctctgacatgcggacgtgtcgcgtttgcccattgaatcagctgaaaccactccctgccgtggcctttaatgtgaacaacctgcccttcacagagcccatgctgtctgtctgggctcagttggtgaacctcgctggaagcaagttagaaaagcacaaaataaagaaatcgactaaacaggcctttgcaggacaagtggacctggacctgctgcggcgccagcagttgaagctatacatcctgaaagcaggtcgggcgctgttctcccaccaggataaactgcggcagatcctgtctcagccagctgttcaggagactggaactgttcacacagaacccatggatacggagggctagctgtatatgtttattgctgtggaaacatgaaaacaatgatggagcagtggtatcacctgaccttggggacatgtctcctgaagggccgcagccccccatgatcctcttgcagcagctgctggcctcggccacccagccgtctcctgtgaaggccatatttgataaacaggaacttgagactgctgcactggccgttgtggagtccactcacccttcgagcccaggatttgaagactgcagctccagtgaggccaccacgcctgtcaacgtgcagcacatccgccctgccagagtgaagaggcgcaagcagtcacccgttcccgctctgccgatcgtggtgcagctcatggagatgggatttcccagaaggaacatcgagtttgccctgaagtctctcactggtgcttccgggaatgcgtccggcttgcctggtgtggaagccttggtcgggtggctgctggaccactccgacatacaggtcacggagctctcagatgcagacacggtgtccgacgagtattctgacgaggaggtggtggaggacatggatgatgccgcctactccatgtctactggtgctgttgtgacggagagccagacgtacaaaaaccgagctggtttcttgggtaatgatgattatgctgtatatgtgagagagaatattcaggtgggaatgatggttagatgctgccgaacatacgaagaagtgtgcgaaggtgatgtgatgttggcaaagtcatcaagctggacagagatggattgcatgatctcaatgtgcagtgtgactggcagcagaaagggggcatctactggtttaggtacattcatgtggaacttataggctatcctccaccaagaagttcttctcacatcaagattggtgataaagtgcgggtcaaagcctctgtcaccacaccaaaatacaaatggggatctgtgactcatcagagtgtgggggttgtgaaaggtgtgatggatgtcagatgtttcctatcaatggatccagattcaaatgcagaaactgtgatgactttgatttttgtgaaacgtgtttcaagaccaaaaaacacaataccaggcatacatttggcagaataaatgaaccaggcttcagcagaagaaacacttcctataaatctcgcccaaacaggaaagcaggaaaataccaaacctaggtttaaaaatagggaagggaagggaagggaagggaagggagagaagaaaggaaagataaagaaagcccaacctccttccaaaatgtcatgagaatcttgagcacatatggtccttggcatgaccacatgacctgcagagcccctgttatagaactcatttttatattttccttagtataacagttaatataatatgtcatttttgttaatagtgtctttttgtcattttactttttaaaagattttattgaaatatacatacaggaaagtgcatctatcataagtgtgcaaattgatgaattctaaaatctttattgtacctgtttagcacctagattgacactgaacataactaacaaccagaaatctccgtgtactcccttcctgtaactacccctgcgcccgaccaaatcactctcttctaacagcataactttgtgtgactagcttttttaatgtcaaagaatgaaatctacagcatgtattcatttgcatctggcttctgccacccaacattatatttgtgggattcgtttgtacagttgcatattagtttgcagatccctcactctcatttctatatggtattatattgcataaacgtaccacactttatccaactactgttaaatatttgtgcattttctacttgggggtgatttcaaatagtgctgctatgaacattcttgtaaatgtcttttggtgaacatatgcaacacatatatgcgttgttgttggttcccaggaggggcattcctgggtcataaacaatgcgtgtgttcaggtttagtacagtataatgccaaacaggtttccaaagtgtttgtgccactttacatacctgccattattgaaaaagagttctgtttgctccacattgtcaccaatacttgatattttctgttttttttttcttttaaaccgtactagtgggtgtgcagtgatattgcaatgtggttttaatttgcatcttccttgtgacaaccttgattactgtaagccacttggaaatgtgatttaaattcatataaagatatagtagcaaaacgcatactaggttactttcgtatccagaaagtttagatagaatgatttctatgtaagcttttactgtgtagtctgagtccatgaatattgattacaaaaaacacatctgtaggtgagttacaatacctcacttataattccaaattcatgttgtgttagctcaatatttttcaaataatttttgcatgcaattttcaccttctttctgagtagtttcaggtattttgtatggttccagcagtcagttaggttgccattgtttggaagcacacatccacgtatctgcaccatgatgatatgacacgcccataccccccatttcacattttgtcagaagtgcatagttatcactaactttgccagtagaaatgtactcccaatttcccacggacttatcttgaataatctctccactgaagcataacaggttttgaattctgttagaatagttgtttttactatcttttaattttatacaaatttcaaagttacgtaatacttttatttaaaaagtgaaacaaagcttttcctctcccttacccacatgttagtccagcagagggggaaagcattggccccaggccaaaatcataaacgctttcaattaactaataataattgctggcatgttgccattaaatattcttgtctcattatctctggttgctttatcaaacccataggtcactgaagcccacttttgagacaaagactatttctcccccaaaagtcaagggaaatataaaaaatgaaattagtgattaagaatagaagtcaattaatacaatcattttgtcttaattatttaaagtccagttttttccctccagcaaacctgaaaatacactatcctccagctatcagaattatattgagatctactcacatttatgatgatgttcagagattctcattgggaaggaaaaggcacacgctgcggcggtcttgcatgactctgttgttgtggaaattcaatttgttcattgtgttttgggctctctgggtggtcagggctgggctctgggtccttggcaattcctcaggttcccagcactccaaagccaagctcacctcctcatcacacaccctacaggagaagcattagggtgtccgactacgtgggtttcatagctgtggaaaagccaaaggggagactcctgaagaaaggcggtgaagactgtgaagagcgggtcaggaagatgagcacagcactgctactcctgtgggcacagggacagcatgtctccagccagcgccaccttgtttaatacatgggaactcactgaaattcattctgtattttgcccgcaaagttttaaagctttcatccacagtcaggaattaaacttataccaatgagagcctcacacattcaaggatgtactaagcactacaggcctcacagaaacagagatcccatcttggagttttcagtaccacatgggagataaagggttttgaacatgaaatgacaaaaacaacagcaagaagaaaattcttgtcctttttcattactatcagactcaaataaatgtcttggctcttacattacattcattcttcaaccattgtggtctggcttccacttccttcacttcaccaacatggctctgccaaaggaagcccgtgatctctaggccatcactttaattgatctttctacaacatttatcctggttgttaagccctccttacaacattcttctctctttgtttttatagctccatctctcctgcttctttaacttgataatgcatacttgatttttctatttgttatttcataaaccaattaatacacagataaaatgactgtatatcaaaccatgtttgtatagaaaaaatggattttggatgcctctcatatgtaattagttctattaaacatattaattgtattgtttaatttgtcaggtttttgacagaattttgtttacaagtaataaaaattttatctccaattttcaa

SEQ ID NO: 375673 - DNA, 4975 bp, Homo sapiens
ctacaagcacatccgatggcccgcggccagtacggatgtggttggaggcatcgatggtcgcctgtgcctgggcggccaagttgtgcacgatgactttggagaagtcaccatgactcgcatcaccctgaagggcaaaatcaccgtgcagttctctgacatgcggacgtgtcgcgtttgcccattgaatcagctgaaaccactccctgccgtggcctttaatgtgaacaacctgcccttcacagagcccatgctgtctgtctgggctcagttggtgaacctcgctggaagcaagttagaaaagcacaaaataaagaaatcgactaaacaggcctttgcaggacaagtggacctggacctgctgcggcgccagcagttgaagctatacatcctgaaagcaggtcgggcgctgttctcccaccaggataaactgcggcagatcctgtctcagccagctgttcaggagactggaactgttcacacagatgatggagcagtggtatcacctgaccttggggacatgtctcctgaagggccgcagccccccatgatcctcttgcagcagctgctggcctcggccacccagccgtctcctgtgaaggccatatttgataaacaggaacttgagactgctgcactggccgttgtggagtccactcacccttcgagcccaggatttgaagactgcagctccagtgaggccaccacgcctgtcaacgtgcagcacatccgccctgccagagtgaagaggcgcaagcagtcacccgttcccgctctgccgatcgtggtgcagctcatggagatgggatttcccagaaggaacatcgagtttgccctgaagtctctcactggtgcttccgggaatgcgtccggcttgcctggtgtggaagccttggtcgggtggctgctggaccactccgacatacaggtcacggagctctcagatgcagacacggtgtccgacgagtattctgacgaggaggtggtggaggacatggatgatgccgcctactccatgtctactggtgctgttgtgacggagagccagacgtacaaaaaccgagctggtttcttgggtaatgatgattatgctgtatatgtgagagagaatattcaggtgggaatgatggttagatgctgccgaacatacgaagaagtgtgcgaaggtgatgtgatgttggcaaagtcatcaagctggacagagatggattgcatgatctcaatgtgcagtgtgactggcagcagaaagggggcatctactggtttaggtacattcatgtggaacttataggctatcctccaccaagaagttcttctcacatcaagattggtgataaagtgcgggtcaaagcctctgtcaccacaccaaaatacaaatggggatctgtgactcatcagagtgtgggggttgtgaaaggtgtgatggatgtcagatgtttcctatcaatggatccagattcaaatgcagaaactgtgatgactttgatttttgtgaaacgtgtttcaagaccaaaaaacacaataccaggcatacatttggcagaataaatgaaccaggcttcagcagaagaaacacttcctataaatctcgcccaaacaggaaagggtaagtggcctaaaatttttctagtattttcaaaatgacccagttacaataggaaatttcttcttgtactattgtcactaatcccgactcaatatcctttaaaggacaaagatgcatgcataagtaaaaatatgacaggtcacaatcacgccggggtggtcctggggcgaggcccaagttccctgcacgcgtcggcacaagcacgcacactgtgacggggaggacgtttacgtaccatgtccacaccactccagacttggtgagcgccagtaggaactgagctccacactcaatctggcacaccccctgtccatttagtctctcaatgttctggggaatgttgcagccttcacttccgccccggcccaattttccaaagtcaccatcaccccaggaaaataccaaacctaggtttaaaaatagggaagggaagggaagggaagggaagggagagaagaaaggaaagataaagaaagcccaacctccttccaaaatgtcatgagaatcttgagcacatatggtccttggcatgaccacatgacctgcagagcccctgttatagaactcatttttatattttccttagtataacagttaatataatatgtcatttttgttaatagtgtctttttgtcattttactttttaaaagattttattgaaatatacatacaggaaagtgcatctatcataagtgtgcaaattgatgaattctaaaatctttattgtacctgtttagcacctagattgacactgaacataactaacaaccagaaatctccgtgtactcccttcctgtaactacccctgcgcccgaccaaatcactctcttctaacagcataactttgtgtgactagcttttttaatgtcattatatttgtgggattcgtttgtacagttgcatattagtttgcagatccctcactctcatttctatatggtattatattgcataaacgtaccacactttatccaactactgttaaatatttgtgcattttctacttgggggtgatttcaaatagtgctgctatgaacattcttgtaaatgtcttttggtgaacatatgcaacacatatatgcgttgttgttggttcccaggaggggcattcctgggtcataaacaatgcgtgtgttcaggtttagtacagtataatgccaaacaggtttccaaagtgtttgtgccactttacatacctgccattattgaaaaagagttctgtttgctccacattgtcaccaatacttgatattttctgttttttttttcttttaaaccgtactagtgggtgtgcagtgatattgcaatgtggttttaatttgcatcttccttgtgacaaccttgattactgtaagccacttggaaatgtgatttaaattcatataaagatatagtagcaaaacgcatactaggttactttcgtatccagaaagtttagatagaatgatttctatgtaagcttttactgtgtagtctgagtccatgaatattgattacaaaaaacacatctgtaggtgagttacaatacctcacttataattccaaattcatgttgtgttagctcaatatttttcaaataatttttgcatgcaattttcaccttctttctgagtagtttcaggtattttgtatggttccagcagtcagttaggttgccattgtttggaagcacacatccacgtatctgcaccatgatgatatgacacgcccataccccccatttcacattttgtcagaagtgcatagttatcactaactttgccagtagaaatgtactcccaatttcccacggacttatcttgaataatctctccactgaagcataacaggttttgaattctgttagaatagttgtttttactatcttttaattttatacaaatttcaaagttacgtaatacttttatttaaaaagtgaaacaaagcttttcctctcccttacccacatgttagtccagcagagggggaaagcattggccccaggccaaaatcataaacgctttcaattaactaataataattgctggcatgttgccattaaatattcttgtctcattatctctggttgctttatcaaacccataggtcactgaagcccacttttgagacaaagactatttctcccccaaaagtcaagggaaatataaaaaatgaaattagtgattaagaatagaagtcaattaatacaatcattttgtcttaattatttaaagtccagttttttccctccagcaaacctgaaaatacactatcctccagctatcagaattatattgagatctactcacatttatgatgatgttcagagattctcattgggaaggaaaaggcacacgctgcggcggtcttgcatgactctgttgttgtggaaattcaatttgttcattgtgttttgggctctctgggtggtcagggctgggctctgggtccttggcaattcctcaggttcccagcactccaaagccaagctcacctcctcatcacacaccctacaggagaagcattagggtgtccgactacgtgggtttcatagctgtggaaaagccaaaggggagactcctgaagaaaggcggtgaagactgtgaagagcgggtcaggaagatgagcacagcactgctactcctgtgggcacagggacagcatgtctccagccagcgccaccttgtttaatacatgggaactcactgaaattcattctgtattttgcccgcaaagttttaaagctttcatccacagtcaggaattaaacttataccaatgagagcctcacacattcaaggatgtactaagcactacaggcctcacagaaacagagatcccatcttggagttttcagtaccacatgggagataaagggttttgaacatgaaatgacaaaaacaacagcaagaagaaaattcttgtcctttttcattactatcagactcaaataaatgtcttggctcttacattacattcattcttcaaccattgtggtctggcttccacttccttcacttcaccaacatggctctgccaaaggaagcccgtgatctctaggccatcactttaattgatctttctacaacatttatcctggttgttaagccctccttacaacattcttctctctttgtttttatagctccatctctcctgcttctttaacttgataatgcatacttgatttttctatttgttatttcataaaccaattaatacacagataaaatgactgtatatcaaaccatgtttgtatagaaaaaatggattttggatgcctctcatatgtaattagttctattaaacatattaattgtattgtttaatttgtcaggtttttgacagaattttgtttacaagtaataaaaattttatctccaattttcaa

SEQ ID NO: 375674 - DNA, 3212 bp, Homo sapiens
tagacacacgagcatatttcaccttcgctaccataatcatcgctatccctactgtaaatatatggtgtgacgtaccatgtccacaccactccagacttggtgagcgccagtaggaactgagctccacactcaatctggcacaccccctgtccatttagtctctcaatgttctggggaatgttgcagccttcacttccgccccggcccaattttccaaagtcaccatcaccccaggaaaataccaaacctaggtttaaaaatagggaagggaagggaagggaagggaagggagagaagaaaggaaagataaagaaagcccaacctccttccaaaatgtcatgagaatcttgagcacatatggtccttggcatgaccacatgacctgcagagcccctgttatagaactcatttttatattttccttagtataacagttaatataatatgtcatttttgttaatagtgtctttttgtcattttactttttaaaagattttattgaaatatacatacaggaaagtgcatctatcataagtgtgcaaattgatgaattctaaaatctttattgtacctgtttagcacctagattgacactgaacataactaacaaccagaaatctccgtgtactcccttcctgtaactacccctgcgcccgaccaaatcactctcttctaacagcataactttgtgtgactagcttttttaatgtcattatatttgtgggattcgtttgtacagttgcatattagtttgcagatccctcactctcatttctatatggtattatattgcataaacgtaccacactttatccaactactgttaaatatttgtgcattttctacttgggggtgatttcaaatagtgctgctatgaacattcttgtaaatgtcttttggtgaacatatgcaacacatatatgcgttgttgttggttcccaggaggggcattcctgggtcataaacaatgcgtgtgttcaggtttagtacagtataatgccaaacaggtttccaaagtgtttgtgccactttacatacctgccattattgaaaaagagttctgtttgctccacattgtcaccaatacttgatattttctgttttttttttcttttaaaccgtactagtgggtgtgcagtgatattgcaatgtggttttaatttgcatcttccttgtgacaaccttgattactgtaagccacttggaaatgtgatttaaattcatataaagatatagtagcaaaacgcatactaggttactttcgtatccagaaagtttagatagaatgatttctatgtaagcttttactgtgtagtctgagtccatgaatattgattacaaaaaacacatctgtaggtgagttacaatacctcacttataattccaaattcatgttgtgttagctcaatatttttcaaataatttttgcatgcaattttcaccttctttctgagtagtttcaggtattttgtatggttccagcagtcagttaggttgccattgtttggaagcacacatccacgtatctgcaccatgatgatatgacacgcccataccccccatttcacattttgtcagaagtgcatagttatcactaactttgccagtagaaatgtactcccaatttcccacggacttatcttgaataatctctccactgaagcataacaggttttgaattctgttagaatagttgtttttactatcttttaattttatacaaatttcaaagttacgtaatacttttatttaaaaagtgaaacaaagcttttcctctcccttacccacatgttagtccagcagagggggaaagcattggccccaggccaaaatcataaacgctttcaattaactaataataattgctggcatgttgccattaaatattcttgtctcattatctctggttgctttatcaaacccataggtcactgaagcccacttttgagacaaagactatttctcccccaaaagtcaagggaaatataaaaaatgaaattagtgattaagaatagaagtcaattaatacaatcattttgtcttaattatttaaagtccagttttttccctccagcaaacctgaaaatacactatcctccagctatcagaattatattgagatctactcacatttatgatgatgttcagagattctcattgggaaggaaaaggcacacgctgcggcggtcttgcatgactctgttgttgtggaaattcaatttgttcattgtgttttgggctctctgggtggtcagggctgggctctgggtccttggcaattcctcaggttcccagcactccaaagccaagctcacctcctcatcacacaccctacaggagaagcattagggtgtccgactacgtgggtttcatagctgtggaaaagccaaaggggagactcctgaagaaaggcggtgaagactgtgaagagcgggtcaggaagatgagcacagcactgctactcctgtgggcacagggacagcatgtctccagccagcgccaccttgtttaatacatgggaactcactgaaattcattctgtattttgcccgcaaagttttaaagctttcatccacagtcaggaattaaacttataccaatgagagcctcacacattcaaggatgtactaagcactacaggcctcacagaaacagagatcccatcttggagttttcagtaccacatgggagataaagggttttgaacatgaaatgacaaaaacaacagcaagaagaaaattcttgtcctttttcattactatcagactcaaataaatgtcttggctcttacattacattcattcttcaaccattgtggtctggcttccacttccttcacttcaccaacatggctctgccaaaggaagcccgtgatctctaggccatcactttaattgatctttctacaacatttatcctggttgttaagccctccttacaacattcttctctctttgtttttatagctccatctctcctgcttctttaacttgataatgcatacttgatttttctatttgttatttcataaaccaattaatacacagataaaatgactgtatatcaaaccatgtttgtatagaaaaaatggattttggatgcctctcatatgtaattagttctattaaacatattaattgtattgtttaatttgtcaggtttttgacagaattttgtttacaagtaataaaaattttatctccaattttcaa

SEQ ID NO: 375675 - DNA, 4071 bp, Homo sapiens
ggcacgagccaaactcctacaggatgggcctcctccaggcctaggccgagtgattggtgagctgggagaggacgggtggataagagtccagtgggacacaggcagcaccaactcctacaggatggggaaagaaggaaaatacgacctcaagctggcagagctgccagcccctgcacagccctcagcagaggattcggacacagaggacgactctgaagccgaacaaactgaaaggaacattcaccccactgcaatgatgtttaccagcactattaacttactgcagactctttgtctgtctgctggagttcatgctgagatcatgcagagtgaagccaccaagactttatgcggactgctgcaaatgttagtggaaagcggaacgacggacaagacatcaaacaggctggtgtacagggagcaacaccggagctggtgcacgctggggtttgtgcagagcatcgctctcacgctgcaggtgtgcggcgccctcagctccccgcagtggatcacgctgctcatgaaggttgtggaagggcacgcacccttcactgccacctcgctgcagaggcagatcttagctgtgcatttgttgcaagcagtccttccgtcatgggacaagaccgaaagggtgagggacatgaaatgcctcatggagaagctgtttgacttcttggggagcttgctcactatgtgctcctctgacgtgccgttactcagaggtgggtggccgtctcccttccctgtaccctggtgaagagcggtgcagtgccgtcactcagaggtgggtggccgtctcccttccctgtgtcctggtgaagagcggtgcagtgccgtcactcagaggtgggtggccgtctcccttccctgtaccctggtgaagagcggtgcagtgccgtcactcagaggtgggtggccgtctcccttccctgtgtcctggtgaagagccgtgtagtgccgtcactcagaggtgagtggccgtctcccttccctgtgccctggtgaagagtggtgcagcagcttctcccctggtttcctcctcagagtccacgctgaggcggcgcagggtgtgcccgcaggcctcgctgactgccacccacagcagcacactggcggaggaggtggtggcactgctgcacacgctgcactccctgactcggtggaatgggctcatcaacaagtacatcaactcccagctccgctccatcacccacagctttgcgggaaggccttccaaaggggcccagttagatgactacttccctgattccgagaaccctgaagtggggggcctcatggcggtcctggctgtggttggaggcatcgatggtcgcctgtgcctgggcggccaagttgtgcacgatgactttggagaagtcaccatgactcgcatcaccctgaagggcaaaatcaccgtgcagttctctgacatgcggacgtgtcgcgtttgcccattgaatcagctgaaaccactccctgccgtggcctttaatgtgaacaacctgcccttcacagagcccatgctgtctgtctgggctcagttggtgaacctcgctggaagcaagttagaaaagcacaaaataaagaaatcgactaaacaggcctttgcaggacaagtggacctggacctgctgcggcgccagcagttgaagctatacatcctgaaagcaggtcgggcgctgttctcccaccaggataaactgcggcagatcctgtctcagccagctgttcaggagactggaactgttcacacagaacccatggatacggagggctagctgtatatgtttattgctgtggaaacatgaaaacaatgatggagcagtggtatcacctgaccttggggacatgtctcctgaagggccgcagccccccatgatcctcttgcagcagctgctggcctcggccacccagccgtctcctgtgaaggccatatttgataaacaggaacttgagactgctgcactggccgttgtggagtccactcacccttcgagcccaggatttgaagactgcagctccagtgaggccaccacgcctgtcaacgtgcagcacatccgccctgccagagtgaagaggcgcaagcagtcacccgttcccgctctgccgatcgtggtgcagctcatggagatgggatttcccagaaggaacatcgagtttgccctgaagtctctcactggtgcttccgggaatgcgtccggcttgcctggtgtggaagccttggtcgggtggctgctggaccactccgacatacaggtcacggagctctcagatgcagacacggtgtccgacgagtattctgacgaggaggtggtggaggacatggatgatgccgcctactccatgtctactggtgctgttgtgacggagagccagacgtacaaaaaccgagctggtttcttgggtaatgatgattatgctgtatatgtgagagagaatattcaggtgggaatgatggttagatgctgccgaacatacgaagaagtgtgcgaaggtgatgtgatgttggcaaagtcatcaagctggacagagatggattgcatgatctcaatgtgcagtgtgactggcagcagaaagggggcatctactggtttaggtacattcatgtggaacttataggctatcctccaccaagaagttcttctcacatcaagattggtgataaagtgcgggtcaaagcctctgtcaccacaccaaaatacaaatggggatctgtgactcatcagagtgtgggggttgtgaaaggtgtgatggatgtcagatgtttcctatcaatggatccagattcaaatgcagaaactgtgatgactttgatttttgtgaaacgtgtttcaagaccaaaaaacacaataccaggcatacatttggcagaataaatgaaccaggcttcagcagaagaaacacttcctataaatctcgcccaaacaggaaagcaaacctgaaaatacactatcctccagctatcagaattatattgagatctactcacatttatgatgatgttcagagattctcattgggaaggaaaaggcacacgctgcggcggtcttgcatgactctgttgttgtggaaattcaatttgttcattgtgttttgggctctctgggtggtcagggctgggctctgggtccttggcaattcctcaggttcccagcactccaaagccaagctcacctcctcatcacacaccctacaggagaagcattagggtgtccgactacgtgggtttcatagctgtggaaaagccaaaggggagactcctgaagaaaggcggtgaagactgtgaagagcgggtcaggaagatgagcacagcactgctactcctgtgggcacagggacagcatgtctccagccagcgccaccttgtttaatacatgggaactcactgaaattcattctgtattttgcccgcaaagttttaaagctttcatccacagtcaggaattaaacttataccaatgagagcctcacacattcaaggatgtactaagcactacaggcctcacagaaacagagatcccatcttggagttttcagtaccacatgggagataaagggttttgaacatgaaatgacaaaaacaacagcaagaagaaaattcttgtcctttttcattactatcagactcaaataaatgtcttggctcttacattacattcattcttcaaccattgtggtctggcttccacttccttcacttcaccaacatggctctgccaaaggaagcccgtgatctctaggccatcactttaattgatctttctacaacatttatcctggttgttaagccctccttacaacattcttctctctttgtttttatagctccatctctcctgcttctttaacttgataatgcatacttgatttttctatttgttatttcataaaccaattaatacacagataaaatgactgtatatcaaaccatgtttgtatagaaaaaatggattttggatgcctctcatatgtaattagttctattaaacatattaattgtattgtttaatttgtcaggtttttgacagaattttgtttacaagtaataaaaattttatctccaattttcaa

SEQ ID NO: 375676 - DNA, 4331 bp, Homo sapiens
ggcacgagccaaactcctacaggatgggcctcctccaggcctaggccgagtgattggtgagctgggagaggacgggtggataagagtccagtgggacacaggcagcaccaactcctacaggatggggaaagaaggaaaatacgacctcaagctggcagagctgccagcccctgcacagccctcagcagaggattcggacacagaggacgactctgaagccgaacaaactgaaaggaacattcaccccactgcaatgatgtttaccagcactattaacttactgcagactctttgtctgtctgctggagttcatgctgagatcatgcagagtgaagccaccaagactttatgcggactgctgcaaatgttagtggaaagcggaacgacggacaagacatcaaacaggctggtgtacagggagcaacaccggagctggtgcacgctggggtttgtgcagagcatcgctctcacgctgcaggtgtgcggcgccctcagctccccgcagtggatcacgctgctcatgaaggttgtggaagggcacgcacccttcactgccacctcgctgcagaggcagatcttagctgtgcatttgttgcaagcagtccttccgtcatgggacaagaccgaaagggtgagggacatgaaatgcctcatggagaagctgtttgacttcttggggagcttgctcactatgtgctcctctgacgtgccgttactcagaggtgggtggccgtctcccttccctgtaccctggtgaagagcggtgcagtgccgtcactcagaggtgggtggccgtctcccttccctgtgtcctggtgaagagcggtgcagtgccgtcactcagaggtgggtggccgtctcccttccctgtaccctggtgaagagcggtgcagtgccgtcactcagaggtgggtggccgtctcccttccctgtgtcctggtgaagagccgtgtagtgccgtcactcagaggtgagtggccgtctcccttccctgtgccctggtgaagagtggtgcagcagcttctcccctggtttcctcctcagagtccacgctgaggcggcgcagggtgtgcccgcaggcctcgctgactgccacccacagcagcacactggcggaggaggtggtggcactgctgcacacgctgcactccctgactcggtggaatgggctcatcaacaagtacatcaactcccagctccgctccatcacccacagctttgcgggaaggccttccaaaggggcccagttagatgactacttccctgattccgagaaccctgaagtggggggcctcatggcggtcctggctgtggttggaggcatcgatggtcgcctgtgcctgggcggccaagttgtgcacgatgactttggagaagtcaccatgactcgcatcaccctgaagggcaaaatcaccgtgcagttctctgacatgcggacgtgtcgcgtttgcccattgaatcagctgaaaccactccctgccgtggcctttaatgtgaacaacctgcccttcacagagcccatgctgtctgtctgggctcagttggtgaacctcgctggaagcaagttagaaaagcacaaaataaagaaatcgactaaacaggcctttgcaggacaagtggacctggacctgctgcggcgccagcagttgaagctatacatcctgaaagcaggtcgggcgctgttctcccaccaggataaactgcggcagatcctgtctcagccagctgttcaggagactggaactgttcacacagaacccatggatacggagggctagctgtatatgtttattgctgtggaaacatgaaaacaatgatggagcagtggtatcacctgaccttggggacatgtctcctgaagggccgcagccccccatgatcctcttgcagcagctgctggcctcggccacccagccgtctcctgtgaaggccatatttgataaacaggaacttgagactgctgcactggccgttgtggagtccactcacccttcgagcccaggatttgaagactgcagctccagtgaggccaccacgcctgtcaacgtgcagcacatccgccctgccagagtgaagaggcgcaagcagtcacccgttcccgctctgccgatcgtggtgcagctcatggagatgggatttcccagaaggaacatcgagtttgccctgaagtctctcactggtgcttccgggaatgcgtccggcttgcctggtgtggaagccttggtcgggtggctgctggaccactccgacatacaggtcacggagctctcagatgcagacacggtgtccgacgagtattctgacgaggaggtggtggaggacatggatgatgccgcctactccatgtctactggtgctgttgtgacggagagccagacgtacaaaaaccgagctggtttcttgggtaatgatgattatgctgtatatgtgagagagaatattcaggtgggaatgatggttagatgctgccgaacatacgaagaagtgtgcgaaggtgatgtgatgttggcaaagtcatcaagctggacagagatggattgcatgatctcaatgtgcagtgtgactggcagcagaaagggggcatctactggtttaggtacattcatgtggaacttataggctatcctccaccaagaagttcttctcacatcaagattggtgataaagtgcgggtcaaagcctctgtcaccacaccaaaatacaaatggggatctgtgactcatcagagtgtgggggttgtgaaaggtgtgatggatgtcagatgtttcctatcaatggatccagattcaaatgcagaaactgtgatgactttgatttttgtgaaacgtgtttcaagaccaaaaaacacaataccaggcatacatttggcagaataaatgaaccaggcttcagcagaagaaacacttcctataaatctcgcccaaacaggaaagggtaagtggcctaaaatttttctagtattttcaaaatgacccagttacaataggaaatttcttcttgtactattgtcactaatcccgactcaatatcctttaaaggacaaagatgcatgcataagtaaaaatatgacaggtcacaatcacgccggggtggtcctggggcgaggcccaagttccctgcacgcgtcggcacaagcacgcacactgtgacggggaggacgtttacgtaccatgtccacaccactccagacttgcaaacctgaaaatacactatcctccagctatcagaattatattgagatctactcacatttatgatgatgttcagagattctcattgggaaggaaaaggcacacgctgcggcggtcttgcatgactctgttgttgtggaaattcaatttgttcattgtgttttgggctctctgggtggtcagggctgggctctgggtccttggcaattcctcaggttcccagcactccaaagccaagctcacctcctcatcacacaccctacaggagaagcattagggtgtccgactacgtgggtttcatagctgtggaaaagccaaaggggagactcctgaagaaaggcggtgaagactgtgaagagcgggtcaggaagatgagcacagcactgctactcctgtgggcacagggacagcatgtctccagccagcgccaccttgtttaatacatgggaactcactgaaattcattctgtattttgcccgcaaagttttaaagctttcatccacagtcaggaattaaacttataccaatgagagcctcacacattcaaggatgtactaagcactacaggcctcacagaaacagagatcccatcttggagttttcagtaccacatgggagataaagggttttgaacatgaaatgacaaaaacaacagcaagaagaaaattcttgtcctttttcattactatcagactcaaataaatgtcttggctcttacattacattcattcttcaaccattgtggtctggcttccacttccttcacttcaccaacatggctctgccaaaggaagcccgtgatctctaggccatcactttaattgatctttctacaacatttatcctggttgttaagccctccttacaacattcttctctctttgtttttatagctccatctctcctgcttctttaacttgataatgcatacttgatttttctatttgttatttcataaaccaattaatacacagataaaatgactgtatatcaaaccatgtttgtatagaaaaaatggattttggatgcctctcatatgtaattagttctattaaacatattaattgtattgtttaatttgtcaggtttttgacagaattttgtttacaagtaataaaaattttatctccaattttcaa

SEQ ID NO: 375677 - DNA, 3753 bp, Homo sapiens
ggcacgagccaaactcctacaggatgggcctcctccaggcctaggccgagtgattggtgagctgggagaggacgggtggataagagtccagtgggacacaggcagcaccaactcctacaggatggggaaagaaggaaaatacgacctcaagctggcagagctgccagcccctgcacagccctcagcagaggattcggacacagaggacgactctgaagccgaacaaactgaaaggaacattcaccccactgcaatgatgtttaccagcactattaacttactgcagactctttgtctgtctgctggagttcatgctgagatcatgcagagtgaagccaccaagactttatgcggactgctgcaaatgttagtggaaagcggaacgacggacaagacatcaaacaggctggtgtacagggagcaacaccggagctggtgcacgctggggtttgtgcagagcatcgctctcacgctgcaggtgtgcggcgccctcagctccccgcagtggatcacgctgctcatgaaggttgtggaagggcacgcacccttcactgccacctcgctgcagaggcagatcttagctgtgcatttgttgcaagcagtccttccgtcatgggacaagaccgaaagggtgagggacatgaaatgcctcatggagaagctgtttgacttcttggggagcttgctcactatgtgctcctctgacgtgccgttactcagaggtgggtggccgtctcccttccctgtaccctggtgaagagcggtgcagtgccgtcactcagaggtgggtggccgtctcccttccctgtgtcctggtgaagagcggtgcagtgccgtcactcagaggtgggtggccgtctcccttccctgtaccctggtgaagagcggtgcagtgccgtcactcagaggtgggtggccgtctcccttccctgtgtcctggtgaagagccgtgtagtgccgtcactcagaggtgagtggccgtctcccttccctgtgccctggtgaagagtggtgcagcagcttctcccctggtttcctcctcagagtccacgctgaggcggcgcagggtgtgcccgcaggcctcgctgactgccacccacagcagcacactggcggaggaggtggtggcactgctgcacacgctgcactccctgactcggtggaatgggctcatcaacaagtacatcaactcccagctccgctccatcacccacagctttgcgggaaggccttccaaaggggcccagttagatgactacttccctgattccgagaaccctgaagtggggggcctcatggcggtcctggctgtggttggaggcatcgatggtcgcctgtgcctgggcggccaagttgtgcacgatgactttggagaagtcaccatgactcgcatcaccctgaagggcaaaatcaccgtgcagttctctgacatgcggacgtgtcgcgtttgcccattgaatcagctgaaaccactccctgccgtggcctttaatgtgaacaacctgcccttcacagagcccatgctgtctgtctgggctcagttggtgaacctcgctggaagcaagttagaaaagcacaaaataaagaaatcgactaaacaggcctttgcaggacaagtggacctggacctgctgcggcgccagcagttgaagctatacatcctgaaagcaggtcgggcgctgttctcccaccaggataaactgcggcagatcctgtctcagccagctgttcaggagactggaactgttcacacagaacccatggatacggagggctagctgtatatgtttattgctgtggaaacatgaaaacaatgatggagcagtggtatcacctgaccttggggacatgtctcctgaagggccgcagccccccatgatcctcttgcagcagctgctggcctcggccacccagccgtctcctgtgaaggccatatttgataaacaggaacttgagactgctgcactggccgttgtggagtccactcacccttcgagcccaggatttgaagactgcagctccagtgaggccaccacgcctgtcaacgtgcagcacatccgccctgccagagtgaagaggcgcaagcagtcacccgttcccgctctgccgatcgtggtgcagctcatggagatgggatttcccagaaggaacatcgagtttgccctgaagtctctcactggtgcttccgggaatgcgtccggcttgcctggtgtggaagccttggtcgggtggctgctggaccactccgacatacaggtcacggagctctcagatgcagacacggtgtccgacgagtattctgacgaggaggtggtggaggacatggatgatgccgcctactccatgtctactggtgctgttgtgacggagagccagacgtacaaaaaccgagctggtttcttgggtaatgatgattatgctgtatatgtgagagagaatattcaggtgggaatgatggttagatgctgccgaacatacgaagaagtgtgcgaaggtgatgtgatgttggcaaagtcatcaagctggacagagatggattgcatgatctcaatgtgcagtgtgactggcagcagaaagggggcatctactggtttaggtacattcatgtggaacttataggctatcctccaccaagaagttcttctcacatcaagattggtgataaagtgcgggtcaaagcctctgtcaccacaccaaaatacaaatggggatctgtgactcatcagagtgtgggggttgtgaaaggtgtgatggatgtcagatgtttcctatcaatggatccagattcaaatgcagaaactgtgatgactttgatttttgtgaaacgtgtttcaagaccaaaaaacacaataccaggcatacatttggcagaataaatgaaccaggcttcagcagaagaaacacttcctataaatctcgcccaaacaggaaaggagaagcattagggtgtccgactacgtgggtttcatagccgggtcaggaagatgagcacagcactgctactcctgtgggcacagggacagcatgtctccagccagcgccaccttgtttaatacatgggaactcactgaaattcattctgtattttgcccgcaaagttttaaagctttcatccacagtcaggaattaaacttataccaatgagagcctcacacattcaaggatgtactaagcactacaggcctcacagaaacagagatcccatcttggagttttcagtaccacatgggagataaagggttttgaacatgaaatgacaaaaacaacagcaagaagaaaattcttgtcctttttcattactatcagactcaaataaatgtcttggctcttacattacattcattcttcaaccattgtggtctggcttccacttccttcacttcaccaacatggctctgccaaaggaagcccgtgatctctaggccatcactttaattgatctttctacaacatttatcctggttgttaagccctccttacaacattcttctctctttgtttttatagctccatctctcctgcttctttaacttgataatgcatacttgatttttctatttgttatttcataaaccaattaatacacagataaaatgactgtatatcaaaccatgtttgtatagaaaaaatggattttggatgcctctcatatgtaattagttctattaaacatattaattgtattgtttaatttgtcaggtttttgacagaattttgtttacaagtaataaaaattttatctccaattttcaa

SEQ ID NO: 375678 - DNA, 2571 bp, Homo sapiens
ggcacgagccaaactcctacaggatgggcctcctccaggcctaggccgagtgattggtgagctgggagaggacgggtggataagagtccagtgggacacaggcagcaccaactcctacaggatggggaaagaaggaaaatacgacctcaagctggcagagctgccagcccctgcacagccctcagcagaggattcggacacagaggacgactctgaagccgaacaaactgaaaggaacattcaccccactgcaatgatgtttaccagcactattaacttactgcagactctttgtctgtctgctggagttcatgctgagatcatgcagagtgaagccaccaagactttatgcggactgctgcaaatgttagtggaaagcggaacgacggacaagacatcaaacaggctggtgtacagggagcaacaccggagctggtgcacgctggggtttgtgcagagcatcgctctcacgctgcaggtgtgcggcgccctcagctccccgcagtggatcacgctgctcatgaaggttgtggaagggcacgcacccttcactgccacctcgctgcagaggcagatcttagctgtgcatttgttgcaagcagtccttccgtcatgggacaagaccgaaagggtgagggacatgaaatgcctcatggagaagctgtttgacttcttggggagcttgctcactatgtgctcctctgacgtgccgttactcagaggtgggtggccgtctcccttccctgtaccctggtgaagagcggtgcagtgccgtcactcagaggtgggtggccgtctcccttccctgtgtcctggtgaagagcggtgcagtgccgtcactcagaggtgggtggccgtctcccttccctgtaccctggtgaagagcggtgcagtgccgtcactcagaggtgggtggccgtctcccttccctgtgtcctggtgaagagccgtgtagtgccgtcactcagaggtgagtggccgtctcccttccctgtgccctggtgaagagtggtgcagcagcttctcccctggtttcctcctcagagtccacgctgaggcggcgcagggtgtgcccgcaggcctcgctgactgccacccacagcagcacactggcggaggaggtggtggcactgctgcacacgctgcactccctgactcggtggaatgggctcatcaacaagtacatcaactcccagctccgctccatcacccacagctttgcgggaaggccttccaaaggggcccagttagatgactacttccctgattccgagaaccctgaagtggggggcctcatggcggtcctggctgtggttggaggcatcgatggtcgcctgtgcctgggcggccaagttgtgcacgatgactttggagaagtcaccatgactcgcatcaccctgaagggcaaaatcaccgtgcagttctctgacatgcggacgtgtcgcgtttgcccattgaatcagctgaaaccactccctgccgtggcctttaatgtgaacaacctgccctcgctggaagcaagttagaaaagcacaaaataaagaaatcgactaaacaggcctttgcaggacaagtggacctggacctgctgcggcgccagcagttgaagctatacatcctgaaagcaggtcgggcgctgttctcccaccaggataaactgcggcagatcctgtctcagccagctgttcaggagactggaactgttcacacagaacccatggatacggagggctagtgtggaaaagccaaaggggagactcctgaagaaaggcggtgaagactgtgaagagcgggtcaggaagatgagcacagcactgctactcctgtgggcacagggacagcatgtctccagccagcgccaccttgtttaatacatgggaactcactgaaattcattctgtattttgcccgcaaagttttaaagctttcatccacagtcaggaattaaacttataccaatgagagcctcacacattcaaggatgtactaagcactacaggcctcacagaaacagagatcccatcttggagttttcagtaccacatgggagataaagggttttgaacatgaaatgacaaaaacaacagcaagaagaaaattcttgtcctttttcattactatcagactcaaataaatgtcttggctcttacattacattcattcttcaaccattgtggtctggcttccacttccttcacttcaccaacatggctctgccaaaggaagcccgtgatctctaggccatcactttaattgatctttctacaacatttatcctggttgttaagccctccttacaacattcttctctctttgtttttatagctccatctctcctgcttctttaacttgataatgcatacttgatttttctatttgttatttcataaaccaattaatacacagataaaatgactgtatatcaaaccatgtttgtatagaaaaaatggattttggatgcctctcatatgtaattagttctattaaacatattaattgtattgtttaatttgtcaggtttttgacagaattttgtttacaagtaataaaaattttatctccaattttcaa

SEQ ID NO: 375679 - DNA, 6327 bp, Homo sapiens
ggcacgagccaaactcctacaggatgggcctcctccaggcctaggccgagtgattggtgagctgggagaggacgggtggataagagtccagtgggacacaggcagcaccaactcctacaggatggggaaagaaggaaaatacgacctcaagctggcagagctgccagcccctgcacagccctcagcagaggattcggacacagaggacgactctgaagccgaacaaactgaaaggaacattcaccccactgcaatgatgtttaccagcactattaacttactgcagactctttgtctgtctgctggagttcatgctgagatcatgcagagtgaagccaccaagactttatgcggactgctgcaaatgttagtggaaagcggaacgacggacaagacatcaaacaggctggtgtacagggagcaacaccggagctggtgcacgctggggtttgtgcagagcatcgctctcacgctgcaggtgtgcggcgccctcagctccccgcagtggatcacgctgctcatgaaggttgtggaagggcacgcacccttcactgccacctcgctgcagaggcagatcttagctgtgcatttgttgcaagcagtccttccgtcatgggacaagaccgaaagggtgagggacatgaaatgcctcatggagaagctgtttgacttcttggggagcttgctcactatgtgctcctctgacgtgccgttactcagaggtgggtggccgtctcccttccctgtaccctggtgaagagcggtgcagtgccgtcactcagaggtgggtggccgtctcccttccctgtgtcctggtgaagagcggtgcagtgccgtcactcagaggtgggtggccgtctcccttccctgtaccctggtgaagagcggtgcagtgccgtcactcagaggtgggtggccgtctcccttccctgtgtcctggtgaagagccgtgtagtgccgtcactcagaggtgagtggccgtctcccttccctgtgccctggtgaagagtggtgcagcagcttctcccctggtttcctcctcagagtccacgctgaggcggcgcagggtgtgcccgcaggcctcgctgactgccacccacagcagcacactggcggaggaggtggtggcactgctgcacacgctgcactccctgactcggtggaatgggctcatcaacaagtacatcaactcccagctccgctccatcacccacagctttgcgggaaggccttccaaaggggcccagttagatgactacttccctgattccgagaaccctgaagtggggggcctcatggcggtcctggctgtggttggaggcatcgatggtcgcctgtgcctgggcggccaagttgtgcacgatgactttggagaagtcaccatgactcgcatcaccctgaagggcaaaatcaccgtgcagttctctgacatgcggacgtgtcgcgtttgcccattgaatcagctgaaaccactccctgccgtggcctttaatgtgaacaacctgcccttcacagagcccatgctgtctgtctgggctcagttggtgaacctcgctggaagcaagttagaaaagcacaaaataaagaaatcgactaaacaggcctttgcaggacaagtggacctggacctgctgcggcgccagcagttgaagctatacatcctgaaagcaggtcgggcgctgttctcccaccaggataaactgcggcagatcctgtctcagccagctgttcaggagactggaactgttcacacagaacccatggatacggagggctagctgtatatgtttattgctgtggaaacatgaaaacaatgatggagcagtggtatcacctgaccttggggacatgtctcctgaagggccgcagccccccatgatcctcttgcagcagctgctggcctcggccacccagccgtctcctgtgaaggccatatttgataaacaggaacttgagactgctgcactggccgttgtggagtccactcacccttcgagcccaggatttgaagactgcagctccagtgaggccaccacgcctgtcaacgtgcagcacatccgccctgccagagtgaagaggcgcaagcagtcacccgttcccgctctgccgatcgtggtgcagctcatggagatgggatttcccagaaggaacatcgagtttgccctgaagtctctcactggtgcttccgggaatgcgtccggcttgcctggtgtggaagccttggtcgggtggctgctggaccactccgacatacaggtcacggagctctcagatgcagacacggtgtccgacgagtattctgacgaggaggtggtggaggacatggatgatgccgcctactccatgtctactggtgctgttgtgacggagagccagacgtacaaaaaccgagctggtttcttgggtaatgatgattatgctgtatatgtgagagagaatattcaggtgggaatgatggttagatgctgccgaacatacgaagaagtgtgcgaaggtgatgtgatgttggcaaagtcatcaagctggacagagatggattgcatgatctcaatgtgcagtgtgactggcagcagaaagggggcatctactggtttaggtacattcatgtggaacttataggctatcctccaccaagaagttcttctcacatcaagattggtgataaagtgcgggtcaaagcctctgtcaccacaccaaaatacaaatggggatctgtgactcatcagagtgtgggggttgtgaaaggtgtgatggatgtcagatgtttcctatcaatggatccagattcaaatgcagaaactgtgatgactttgatttttgtgaaacgtgtttcaagaccaaaaaacacaataccaggcatacatttggcagaataaatgaaccaggcttcagcagaagaaacacttcctataaatctcgcccaaacaggaaagggtaagtggcctaaaatttttctagtattttcaaaatgacccagttacaataggaaatttcttcttgtactattgtcactaatcccgactcaatatcctttaaaggacaaagatgcatgcataagtaaaaatatgacaggtcacaatcacgccggggtggtcctggggcgaggcccaagttccctgcacgcgtcggcacaagcacgcacactgtgacggggaggacgtttacgtaccatgtccacaccactccagacttggtgagcgccagtaggaactgagctccacactcaatctggcacaccccctgtccatttagtctctcaatgttctggggaatgttgcagccttcacttccgccccggcccaattttccaaagtcaccatcaccccaggaaaataccaaacctaggtttaaaaatagggaagggaagggaagggaagggaagggagagaagaaaggaaagataaagaaagcccaacctccttccaaaatgtcatgagaatcttgagcacatatggtccttggcatgaccacatgacctgcagagcccctgttatagaactcatttttatattttccttagtataacagttaatataatatgtcatttttgttaatagtgtctttttgtcattttactttttaaaagattttattgaaatatacatacaggaaagtgcatctatcataagtgtgcaaattgatgaattctaaaatctttattgtacctgtttagcacctagattgacactgaacataactaacaaccagaaatctccgtgtactcccttcctgtaactacccctgcgcccgaccaaatcactctcttctaacagcataactttgtgtgactagcttttttaatgtcattatatttgtgggattcgtttgtacagttgcatattagtttgcagatccctcactctcatttctatatggtattatattgcataaacgtaccacactttatccaactactgttaaatatttgtgcattttctacttgggggtgatttcaaatagtgctgctatgaacattcttgtaaatgtcttttggtgaacatatgcaacacatatatgcgttgttgttggttcccaggaggggcattcctgggtcataaacaatgcgtgtgttcaggtttagtacagtataatgccaaacaggtttccaaagtgtttgtgccactttacatacctgccattattgaaaaagagttctgtttgctccacattgtcaccaatacttgatattttctgttttttttttcttttaaaccgtactagtgggtgtgcagtgatattgcaatgtggttttaatttgcatcttccttgtgacaaccttgattactgtaagccacttggaaatgtgatttaaattcatataaagatatagtagcaaaacgcatactaggttactttcgtatccagaaagtttagatagaatgatttctatgtaagcttttactgtgtagtctgagtccatgaatattgattacaaaaaacacatctgtaggtgagttacaatacctcacttataattccaaattcatgttgtgttagctcaatatttttcaaataatttttgcatgcaattttcaccttctttctgagtagtttcaggtattttgtatggttccagcagtcagttaggttgccattgtttggaagcacacatccacgtatctgcaccatgatgatatgacacgcccataccccccatttcacattttgtcagaagtgcatagttatcactaactttgccagtagaaatgtactcccaatttcccacggacttatcttgaataatctctccactgaagcataacaggttttgaattctgttagaatagttgtttttactatcttttaattttatacaaatttcaaagttacgtaatacttttatttaaaaagtgaaacaaagcttttcctctcccttacccacatgttagtccagcagagggggaaagcattggccccaggccaaaatcataaacgctttcaattaactaataataattgctggcatgttgccattaaatattcttgtctcattatctctggttgctttatcaaacccataggtcactgaagcccacttttgagacaaagactatttctcccccaaaagtcaagggaaatataaaaaatgaaattagtgattaagaatagaagtcaattaatacaatcattttgtcttaattatttaaagtccagttttttccctccagcaaacctgaaaatacactatcctccagctatcagaattatattgagatctactcacatttatgatgatgttcagagattctcattgggaaggaaaaggcacacgctgcggcggtcttgcatgactctgttgttgtggaaattcaatttgttcattgtgttttgggctctctgggtggtcagggctgggctctgggtccttggcaattcctcaggttcccagcactccaaagccaagctcacctcctcatcacacaccctacaggagaagcattagggtgtccgactacgtgggtttcatagctgtggaaaagccaaaggggagactcctgaagaaaggcggtgaagactgtgaagagcgggtcaggaagatgagcacagcactgctactcctgtgggcacagggacagcatgtctccagccagcgccaccttgtttaatacatgggaactcactgaaattcattctgtattttgcccgcaaagttttaaagctttcatccacagtcaggaattaaacttataccaatgagagcctcacacattcaaggatgtactaagcactacaggcctcacagaaacagagatcccatcttggagttttcagtaccacatgggagataaagggttttgaacatgaaatgacaaaaacaacagcaagaagaaaattcttgtcctttttcattactatcagactcaaataaatgtcttggctcttacattacattcattcttcaaccattgtggtctggcttccacttccttcacttcaccaacatggctctgccaaaggaagcccgtgatctctaggccatcactttaattgatctttctacaacatttatcctggttgttaagccctccttacaacattcttctctctttgtttttatagctccatctctcctgcttctttaacttgataatgcatacttgatttttctatttgttatttcataaaccaattaatacacagataaaatgactgtatatcaaaccatgtttgtatagaaaaaatggattttggatgcctctcatatgtaattagttctattaaacatattaattgtattgtttaatttgtcaggtttttgacagaattttgtttacaagtaataaaaattttatctccaattttcaaataattacacccattatttct

SEQ ID NO: 375680 - DNA, 6453 bp, Homo sapiens
  misc_feature (6343)..(6343): n is a, c, g, or t
ggcacgagccaaactcctacaggatgggcctcctccaggcctaggccgagtgattggtgagctgggagaggacgggtggataagagtccagtgggacacaggcagcaccaactcctacaggatggggaaagaaggaaaatacgacctcaagctggcagagctgccagcccctgcacagccctcagcagaggattcggacacagaggacgactctgaagccgaacaaactgaaaggaacattcaccccactgcaatgatgtttaccagcactattaacttactgcagactctttgtctgtctgctggagttcatgctgagatcatgcagagtgaagccaccaagactttatgcggactgctgcaaatgttagtggaaagcggaacgacggacaagacatcaaacaggctggtgtacagggagcaacaccggagctggtgcacgctggggtttgtgcagagcatcgctctcacgctgcaggtgtgcggcgccctcagctccccgcagtggatcacgctgctcatgaaggttgtggaagggcacgcacccttcactgccacctcgctgcagaggcagatcttagctgtgcatttgttgcaagcagtccttccgtcatgggacaagaccgaaagggtgagggacatgaaatgcctcatggagaagctgtttgacttcttggggagcttgctcactatgtgctcctctgacgtgccgttactcagaggtgggtggccgtctcccttccctgtaccctggtgaagagcggtgcagtgccgtcactcagaggtgggtggccgtctcccttccctgtgtcctggtgaagagcggtgcagtgccgtcactcagaggtgggtggccgtctcccttccctgtaccctggtgaagagcggtgcagtgccgtcactcagaggtgggtggccgtctcccttccctgtgtcctggtgaagagccgtgtagtgccgtcactcagaggtgagtggccgtctcccttccctgtgccctggtgaagagtggtgcagcagcttctcccctggtttcctcctcagagtccacgctgaggcggcgcagggtgtgcccgcaggcctcgctgactgccacccacagcagcacactggcggaggaggtggtggcactgctgcacacgctgcactccctgactcggtggaatgggctcatcaacaagtacatcaactcccagctccgctccatcacccacagctttgcgggaaggccttccaaaggggcccagttagatgactacttccctgattccgagaaccctgaagtggggggcctcatggcggtcctggctgtggttggaggcatcgatggtcgcctgtgcctgggcggccaagttgtgcacgatgactttggagaagtcaccatgactcgcatcaccctgaagggcaaaatcaccgtgcagttctctgacatgcggacgtgtcgcgtttgcccattgaatcagctgaaaccactccctgccgtggcctttaatgtgaacaacctgcccttcacagagcccatgctgtctgtctgggctcagttggtgaacctcgctggaagcaagttagaaaagcacaaaataaagaaatcgactaaacaggcctttgcaggacaagtggacctggacctgctgcggcgccagcagttgaagctatacatcctgaaagcaggtcgggcgctgttctcccaccaggataaactgcggcagatcctgtctcagccagctgttcaggagactggaactgttcacacagaacccatggatacggagggctagctgtatatgtttattgctgtggaaacatgaaaacaatgatggagcagtggtatcacctgaccttggggacatgtctcctgaagggccgcagccccccatgatcctcttgcagcagctgctggcctcggccacccagccgtctcctgtgaaggccatatttgataaacaggaacttgagactgctgcactggccgttgtggagtccactcacccttcgagcccaggatttgaagactgcagctccagtgaggccaccacgcctgtcaacgtgcagcacatccgccctgccagagtgaagaggcgcaagcagtcacccgttcccgctctgccgatcgtggtgcagctcatggagatgggatttcccagaaggaacatcgagtttgccctgaagtctctcactggtgcttccgggaatgcgtccggcttgcctggtgtggaagccttggtcgggtggctgctggaccactccgacatacaggtcacggagctctcagatgcagacacggtgtccgacgagtattctgacgaggaggtggtggaggacatggatgatgccgcctactccatgtctactggtgctgttgtgacggagagccagacgtacaaaaaccgagctggtttcttgggtaatgatgattatgctgtatatgtgagagagaatattcaggtgggaatgatggttagatgctgccgaacatacgaagaagtgtgcgaaggtgatgtgatgttggcaaagtcatcaagctggacagagatggattgcatgatctcaatgtgcagtgtgactggcagcagaaagggggcatctactggtttaggtacattcatgtggaacttataggctatcctccaccaagaagttcttctcacatcaagattggtgataaagtgcgggtcaaagcctctgtcaccacaccaaaatacaaatggggatctgtgactcatcagagtgtgggggttgtgaaaggtgtgatggatgtcagatgtttcctatcaatggatccagattcaaatgcagaaactgtgatgactttgatttttgtgaaacgtgtttcaagaccaaaaaacacaataccaggcatacatttggcagaataaatgaaccaggcttcagcagaagaaacacttcctataaatctcgcccaaacaggaaagggtaagtggcctaaaatttttctagtattttcaaaatgacccagttacaataggaaatttcttcttgtactattgtcactaatcccgactcaatatcctttaaaggacaaagatgcatgcataagtaaaaatatgacaggtcacaatcacgccggggtggtcctggggcgaggcccaagttccctgcacgcgtcggcacaagcacgcacactgtgacggggaggacgtttacgtaccatgtccacaccactccagacttggtgagcgccagtaggaactgagctccacactcaatctggcacaccccctgtccatttagtctctcaatgttctggggaatgttgcagccttcacttccgccccggcccaattttccaaagtcaccatcaccccaggaaaataccaaacctaggtttaaaaatagggaagggaagggaagggaagggaagggagagaagaaaggaaagataaagaaagcccaacctccttccaaaatgtcatgagaatcttgagcacatatggtccttggcatgaccacatgacctgcagagcccctgttatagaactcatttttatattttccttagtataacagttaatataatatgtcatttttgttaatagtgtctttttgtcattttactttttaaaagattttattgaaatatacatacaggaaagtgcatctatcataagtgtgcaaattgatgaattctaaaatctttattgtacctgtttagcacctagattgacactgaacataactaacaaccagaaatctccgtgtactcccttcctgtaactacccctgcgcccgaccaaatcactctcttctaacagcataactttgtgtgactagcttttttaatgtcattatatttgtgggattcgtttgtacagttgcatattagtttgcagatccctcactctcatttctatatggtattatattgcataaacgtaccacactttatccaactactgttaaatatttgtgcattttctacttgggggtgatttcaaatagtgctgctatgaacattcttgtaaatgtcttttggtgaacatatgcaacacatatatgcgttgttgttggttcccaggaggggcattcctgggtcataaacaatgcgtgtgttcaggtttagtacagtataatgccaaacaggtttccaaagtgtttgtgccactttacatacctgccattattgaaaaagagttctgtttgctccacattgtcaccaatacttgatattttctgttttttttttcttttaaaccgtactagtgggtgtgcagtgatattgcaatgtggttttaatttgcatcttccttgtgacaaccttgattactgtaagccacttggaaatgtgatttaaattcatataaagatatagtagcaaaacgcatactaggttactttcgtatccagaaagtttagatagaatgatttctatgtaagcttttactgtgtagtctgagtccatgaatattgattacaaaaaacacatctgtaggtgagttacaatacctcacttataattccaaattcatgttgtgttagctcaatatttttcaaataatttttgcatgcaattttcaccttctttctgagtagtttcaggtattttgtatggttccagcagtcagttaggttgccattgtttggaagcacacatccacgtatctgcaccatgatgatatgacacgcccataccccccatttcacattttgtcagaagtgcatagttatcactaactttgccagtagaaatgtactcccaatttcccacggacttatcttgaataatctctccactgaagcataacaggttttgaattctgttagaatagttgtttttactatcttttaattttatacaaatttcaaagttacgtaatacttttatttaaaaagtgaaacaaagcttttcctctcccttacccacatgttagtccagcagagggggaaagcattggccccaggccaaaatcataaacgctttcaattaactaataataattgctggcatgttgccattaaatattcttgtctcattatctctggttgctttatcaaacccataggtcactgaagcccacttttgagacaaagactatttctcccccaaaagtcaagggaaatataaaaaatgaaattagtgattaagaatagaagtcaattaatacaatcattttgtcttaattatttaaagtccagttttttccctccagcaaacctgaaaatacactatcctccagctatcagaattatattgagatctactcacatttatgatgatgttcagagattctcattgggaaggaaaaggcacacgctgcggcggtcttgcatgactctgttgttgtggaaattcaatttgttcattgtgttttgggctctctgggtggtcagggctgggctctgggtccttggcaattcctcaggttcccagcactccaaagccaagctcacctcctcatcacacaccctacaggagaagcattagggtgtccgactacgtgggtttcatagctgtggaaaagccaaaggggagactcctgaagaaaggcggtgaagactgtgaagagcgggtcaggaagatgagcacagcactgctactcctgtgggcacagggacagcatgtctccagccagcgccaccttgtttaatacatgggaactcactgaaattcattctgtattttgcccgcaaagttttaaagctttcatccacagtcaggaattaaacttataccaatgagagcctcacacattcaaggatgtactaagcactacaggcctcacagaaacagagatcccatcttggagttttcagtaccacatgggagataaagggttttgaacatgaaatgacaaaaacaacagcaagaagaaaattcttgtcctttttcattactatcagactcaaataaatgtcttggctcttacattacattcattcttcaaccattgtggtctggcttccacttccttcacttcaccaacatggctctgccaaaggaagcccgtgatctctaggccatcactttaattgatctttctacaacatttatcctggttgttaagccctccttacaacattcttctctctttgtttttatagctccatctctcctgcttctttaacttgataatgcatacttgatttttctatttgttatttcataaaccaattaatacacagataaaatgactgtatatcaaaccatgtttgtatagaaaaaatggattttggatgcctctcatatgtaattagttctattaaacatattaattgtattgtttaatttgtcaggtttttgacagaattttgtttacaagtaataaaaattttatctccaattttcaaaaaaaaaaaaaaaaaaaaaaaaactcgagggggggcngcccggtacccacatattccgcccttattagtggagtcggtatttacaaattcaactgggcccgtcgttttttacaaacgttcgtggacttggggaaaaaacctcttggc

SEQ ID NO: 375681 - DNA, 6342 bp, Homo sapiens
ggcacgagccaaactcctacaggatgggcctcctccaggcctaggccgagtgattggtgagctgggagaggacgggtggataagagtccagtgggacacaggcagcaccaactcctacaggatggggaaagaaggaaaatacgacctcaagctggcagagctgccagcccctgcacagccctcagcagaggattcggacacagaggacgactctgaagccgaacaaactgaaaggaacattcaccccactgcaatgatgtttaccagcactattaacttactgcagactctttgtctgtctgctggagttcatgctgagatcatgcagagtgaagccaccaagactttatgcggactgctgcaaatgttagtggaaagcggaacgacggacaagacatcaaacaggctggtgtacagggagcaacaccggagctggtgcacgctggggtttgtgcagagcatcgctctcacgctgcaggtgtgcggcgccctcagctccccgcagtggatcacgctgctcatgaaggttgtggaagggcacgcacccttcactgccacctcgctgcagaggcagatcttagctgtgcatttgttgcaagcagtccttccgtcatgggacaagaccgaaagggtgagggacatgaaatgcctcatggagaagctgtttgacttcttggggagcttgctcactatgtgctcctctgacgtgccgttactcagaggtgggtggccgtctcccttccctgtaccctggtgaagagcggtgcagtgccgtcactcagaggtgggtggccgtctcccttccctgtgtcctggtgaagagcggtgcagtgccgtcactcagaggtgggtggccgtctcccttccctgtaccctggtgaagagcggtgcagtgccgtcactcagaggtgggtggccgtctcccttccctgtgtcctggtgaagagccgtgtagtgccgtcactcagaggtgagtggccgtctcccttccctgtgccctggtgaagagtggtgcagcagcttctcccctggtttcctcctcagagtccacgctgaggcggcgcagggtgtgcccgcaggcctcgctgactgccacccacagcagcacactggcggaggaggtggtggcactgctgcacacgctgcactccctgactcggtggaatgggctcatcaacaagtacatcaactcccagctccgctccatcacccacagctttgcgggaaggccttccaaaggggcccagttagatgactacttccctgattccgagaaccctgaagtggggggcctcatggcggtcctggctgtggttggaggcatcgatggtcgcctgtgcctgggcggccaagttgtgcacgatgactttggagaagtcaccatgactcgcatcaccctgaagggcaaaatcaccgtgcagttctctgacatgcggacgtgtcgcgtttgcccattgaatcagctgaaaccactccctgccgtggcctttaatgtgaacaacctgcccttcacagagcccatgctgtctgtctgggctcagttggtgaacctcgctggaagcaagttagaaaagcacaaaataaagaaatcgactaaacaggcctttgcaggacaagtggacctggacctgctgcggcgccagcagttgaagctatacatcctgaaagcaggtcgggcgctgttctcccaccaggataaactgcggcagatcctgtctcagccagctgttcaggagactggaactgttcacacagaacccatggatacggagggctagctgtatatgtttattgctgtggaaacatgaaaacaatgatggagcagtggtatcacctgaccttggggacatgtctcctgaagggccgcagccccccatgatcctcttgcagcagctgctggcctcggccacccagccgtctcctgtgaaggccatatttgataaacaggaacttgagactgctgcactggccgttgtggagtccactcacccttcgagcccaggatttgaagactgcagctccagtgaggccaccacgcctgtcaacgtgcagcacatccgccctgccagagtgaagaggcgcaagcagtcacccgttcccgctctgccgatcgtggtgcagctcatggagatgggatttcccagaaggaacatcgagtttgccctgaagtctctcactggtgcttccgggaatgcgtccggcttgcctggtgtggaagccttggtcgggtggctgctggaccactccgacatacaggtcacggagctctcagatgcagacacggtgtccgacgagtattctgacgaggaggtggtggaggacatggatgatgccgcctactccatgtctactggtgctgttgtgacggagagccagacgtacaaaaaccgagctggtttcttgggtaatgatgattatgctgtatatgtgagagagaatattcaggtgggaatgatggttagatgctgccgaacatacgaagaagtgtgcgaaggtgatgtgatgttggcaaagtcatcaagctggacagagatggattgcatgatctcaatgtgcagtgtgactggcagcagaaagggggcatctactggtttaggtacattcatgtggaacttataggctatcctccaccaagaagttcttctcacatcaagattggtgataaagtgcgggtcaaagcctctgtcaccacaccaaaatacaaatggggatctgtgactcatcagagtgtgggggttgtgaaaggtgtgatggatgtcagatgtttcctatcaatggatccagattcaaatgcagaaactgtgatgactttgatttttgtgaaacgtgtttcaagaccaaaaaacacaataccaggcatacatttggcagaataaatgaaccaggcttcagcagaagaaacacttcctataaatctcgcccaaacaggaaagggtaagtggcctaaaatttttctagtattttcaaaatgacccagttacaataggaaatttcttcttgtactattgtcactaatcccgactcaatatcctttaaaggacaaagatgcatgcataagtaaaaatatgacaggtcacaatcacgccggggtggtcctggggcgaggcccaagttccctgcacgcgtcggcacaagcacgcacactgtgacggggaggacgtttacgtaccatgtccacaccactccagacttggtgagcgccagtaggaactgagctccacactcaatctggcacaccccctgtccatttagtctctcaatgttctggggaatgttgcagccttcacttccgccccggcccaattttccaaagtcaccatcaccccaggaaaataccaaacctaggtttaaaaatagggaagggaagggaagggaagggaagggagagaagaaaggaaagataaagaaagcccaacctccttccaaaatgtcatgagaatcttgagcacatatggtccttggcatgaccacatgacctgcagagcccctgttatagaactcatttttatattttccttagtataacagttaatataatatgtcatttttgttaatagtgtctttttgtcattttactttttaaaagattttattgaaatatacatacaggaaagtgcatctatcataagtgtgcaaattgatgaattctaaaatctttattgtacctgtttagcacctagattgacactgaacataactaacaaccagaaatctccgtgtactcccttcctgtaactacccctgcgcccgaccaaatcactctcttctaacagcataactttgtgtgactagcttttttaatgtcattatatttgtgggattcgtttgtacagttgcatattagtttgcagatccctcactctcatttctatatggtattatattgcataaacgtaccacactttatccaactactgttaaatatttgtgcattttctacttgggggtgatttcaaatagtgctgctatgaacattcttgtaaatgtcttttggtgaacatatgcaacacatatatgcgttgttgttggttcccaggaggggcattcctgggtcataaacaatgcgtgtgttcaggtttagtacagtataatgccaaacaggtttccaaagtgtttgtgccactttacatacctgccattattgaaaaagagttctgtttgctccacattgtcaccaatacttgatattttctgttttttttttcttttaaaccgtactagtgggtgtgcagtgatattgcaatgtggttttaatttgcatcttccttgtgacaaccttgattactgtaagccacttggaaatgtgatttaaattcatataaagatatagtagcaaaacgcatactaggttactttcgtatccagaaagtttagatagaatgatttctatgtaagcttttactgtgtagtctgagtccatgaatattgattacaaaaaacacatctgtaggtgagttacaatacctcacttataattccaaattcatgttgtgttagctcaatatttttcaaataatttttgcatgcaattttcaccttctttctgagtagtttcaggtattttgtatggttccagcagtcagttaggttgccattgtttggaagcacacatccacgtatctgcaccatgatgatatgacacgcccataccccccatttcacattttgtcagaagtgcatagttatcactaactttgccagtagaaatgtactcccaatttcccacggacttatcttgaataatctctccactgaagcataacaggttttgaattctgttagaatagttgtttttactatcttttaattttatacaaatttcaaagttacgtaatacttttatttaaaaagtgaaacaaagcttttcctctcccttacccacatgttagtccagcagagggggaaagcattggccccaggccaaaatcataaacgctttcaattaactaataataattgctggcatgttgccattaaatattcttgtctcattatctctggttgctttatcaaacccataggtcactgaagcccacttttgagacaaagactatttctcccccaaaagtcaagggaaatataaaaaatgaaattagtgattaagaatagaagtcaattaatacaatcattttgtcttaattatttaaagtccagttttttccctccagcaaacctgaaaatacactatcctccagctatcagaattatattgagatctactcacatttatgatgatgttcagagattctcattgggaaggaaaaggcacacgctgcggcggtcttgcatgactctgttgttgtggaaattcaatttgttcattgtgttttgggctctctgggtggtcagggctgggctctgggtccttggcaattcctcaggttcccagcactccaaagccaagctcacctcctcatcacacaccctacaggagaagcattagggtgtccgactacgtgggtttcatagctgtggaaaagccaaaggggagactcctgaagaaaggcggtgaagactgtgaagagcgggtcaggaagatgagcacagcactgctactcctgtgggcacagggacagcatgtctccagccagcgccaccttgtttaatacatgggaactcactgaaattcattctgtattttgcccgcaaagttttaaagctttcatccacagtcaggaattaaacttataccaatgagagcctcacacattcaaggatgtactaagcactacaggcctcacagaaacagagatcccatcttggagttttcagtaccacatgggagataaagggttttgaacatgaaatgacaaaaacaacagcaagaagaaaattcttgtcctttttcattactatcagactcaaataaatgtcttggctcttacattacattcattcttcaaccattgtggtctggcttccacttccttcacttcaccaacatggctctgccaaaggaagcccgtgatctctaggccatcactttaattgatctttctacaacatttatcctggttgttaagccctccttacaacattcttctctctttgtttttatagctccatctctcctgcttctttaacttgataatgcatacttgatttttctatttgttatttcataaaccaattaatacacagataaaatgactgtatatcaaaccatgtttgtatagaaaaaatggattttggatgcctctcatatgtaattagttctattaaacatattaattgtattgtttaatttgtcaggtttttgacagaattttgtttacaagtaataaaaattttatctccaattttcaaaaaaaaaaataaagtcgacgggccgcgaatttagta

SEQ ID NO: 375682 - DNA, 3754 bp, Homo sapiens
ggcacgagccaaactcctacaggatgggcctcctccaggcctaggccgagtgattggtgagctgggagaggacgggtggataagagtccagtgggacacaggcagcaccaactcctacaggatggggaaagaaggaaaatacgacctcaagctggcagagctgccagcccctgcacagccctcagcagaggattcggacacagaggacgactctgaagccgaacaaactgaaaggaacattcaccccactgcaatgatgtttaccagcactattaacttactgcagactctttgtctgtctgctggagttcatgctgagatcatgcagagtgaagccaccaagactttatgcggactgctgcaaatgttagtggaaagcggaacgacggacaagacatcaaacaggctggtgtacagggagcaacaccggagctggtgcacgctggggtttgtgcagagcatcgctctcacgctgcaggtgtgcggcgccctcagctccccgcagtggatcacgctgctcatgaaggttgtggaagggcacgcacccttcactgccacctcgctgcagaggcagatcttagctgtgcatttgttgcaagcagtccttccgtcatgggacaagaccgaaagggtgagggacatgaaatgcctcatggagaagctgtttgacttcttggggagcttgctcactatgtgctcctctgacgtgccgttactcagaggtgggtggccgtctcccttccctgtaccctggtgaagagcggtgcagtgccgtcactcagaggtgggtggccgtctcccttccctgtgtcctggtgaagagcggtgcagtgccgtcactcagaggtgggtggccgtctcccttccctgtaccctggtgaagagcggtgcagtgccgtcactcagaggtgggtggccgtctcccttccctgtgtcctggtgaagagccgtgtagtgccgtcactcagaggtgagtggccgtctcccttccctgtgccctggtgaagagtggtgcagcagcttctcccctggtttcctcctcagagtccacgctgaggcggcgcagggtgtgcccgcaggcctcgctgactgccacccacagcagcacactggcggaggaggtggtggcactgctgcacacgctgcactccctgactcggtggaatgggctcatcaacaagtacatcaactcccagctccgctccatcacccacagctttgcgggaaggccttccaaaggggcccagttagatgactacttccctgattccgagaaccctgaagtggggggcctcatggcggtcctggctgtggttggaggcatcgatggtcgcctgtgcctgggcggccaagttgtgcacgatgactttggagaagtcaccatgactcgcatcaccctgaagggcaaaatcaccgtgcagttctctgacatgcggacgtgtcgcgtttgcccattgaatcagctgaaaccactccctgccgtggcctttaatgtgaacaacctgcccttcacagagcccatgctgtctgtctgggctcagttggtgaacctcgctggaagcaagttagaaaagcacaaaataaagaaatcgactaaacaggcctttgcaggacaagtggacctggacctgctgcggcgccagcagttgaagctatacatcctgaaagcaggtcgggcgctgttctcccaccaggataaactgcggcagatcctgtctcagccagctgttcaggagactggaactgttcacacagaacccatggatacggagggctagctgtatatgtttattgctgtggaaacatgaaaacaatgatggagcagtggtatcacctgaccttggggacatgtctcctgaagggccgcagccccccatgatcctcttgcagcagctgctggcctcggccacccagccgtctcctgtgaaggccatatttgataaacaggaacttgagactgctgcactggccgttgtggagtccactcacccttcgagcccaggatttgaagactgcagctccagtgaggccaccacgcctgtcaacgtgcagcacatccgccctgccagagtgaagaggcgcaagcagtcacccgttcccgctctgccgatcgtggtgcagctcatggagatgggatttcccagaaggaacatcgagtttgccctgaagtctctcactggtgcttccgggaatgcgtccggcttgcctggtgtggaagccttggtcgggtggctgctggaccactccgacatacaggtcacggagctctcagatgcagacacggtgtccgacgagtattctgacgaggaggtggtggaggacatggatgatgccgcctactccatgtctactggtgctgttgtgacggagagccagacgtacaaaaaccgagctggtttcttgggtaatgatgattatgctgtatatgtgagagagaatattcaggtgggaatgatggttagatgctgccgaacatacgaagaagtgtgcgaaggtgatgtgatgttggcaaagtcatcaagctggacagagatggattgcatgatctcaatgtgcagtgtgactggcagcagaaagggggcatctactggtttaggtacattcatgtggaacttataggctatcctccaccaagaagttcttctcacatcaagattggtgataaagtgcgggtcaaagcctctgtcaccacaccaaaatacaaatggggatctgtgactcatcagagtgtgggggttgtgaaaggtgtgatggatgtcagatgtttcctatcaatggatccagattcaaatgcagaaactgtgatgactttgatttttgtgaaacgtgtttcaagaccaaaaaacacaataccaggcatacatttggcagaataaatgaaccaggcttcagcagaagaaacacttcctataaatctcgcccaaacaggaaaggagaagcattagggtgtccgactacgtgggtttcatagctgtggaaaagccaaaggggagactcctgaagaaaggcggtgaagactgtgaagagcgggtcaggaagatgagcacagcactgctactcctgtgggcacagggacagcatgtctccagccagcgccaccttgtttaatacatgggaactcactgaaattcattctgtattttgcccgcaaagttttaaagctttcatccacagtcaggaattaaacttataccaatgagagcctcacacattcaaggatgtactaagcactacaggcctcacagaaacagagatcccatcttggagttttcagtaccacatgggagataaagggttttgaacatgaaatgacaaaaacaacagcaagaagaaattacattcattcttcaaccattgtggtctggcttccacttccttcacttcaccaacatggctctgccaaaggaagcccgtgatctctaggccatcactttaattgatctttctacaacatttatcctggttgttaagccctccttacaacattcttctctctttgtttttatagctccatctctcctgcttctttaacttgataatgcatacttgatttttctatttgttatttcataaaccaattaatacacagataaaatgactgtatatcaaaccatgtttgtatagaaaaaatggattttggatgcctctcatatgtaattagttctattaaacatattaattgtattgtttaatttgtcaggtttttgacagaattttgtttacaagtaataaaaattttatctccaattttcaa

SEQ ID NO: 375683 - DNA, 6205 bp, Homo sapiens
ggcacgagccaaactcctacaggatgggcctcctccaggcctaggccgagtgattggtgagctgggagaggacgggtggataagagtccagtgggacacaggcagcaccaactcctacaggatggggaaagaaggaaaatacgacctcaagctggcagagctgccagcccctgcacagccctcagcagaggattcggacacagaggacgactctgaagccgaacaaactgaaaggaacattcaccccactgcaatgatgtttaccagcactattaacttactgcagactctttgtctgtctgctggagttcatgctgagatcatgcagagtgaagccaccaagactttatgcggactgctgcaaatgttagtggaaagcggaacgacggacaagacatcaaacaggctggtgtacagggagcaacaccggagctggtgcacgctggggtttgtgcagagcatcgctctcacgctgcaggtgtgcggcgccctcagctccccgcagtggatcacgctgctcatgaaggttgtggaagggcacgcacccttcactgccacctcgctgcagaggcagatcttagctgtgcatttgttgcaagcagtccttccgtcatgggacaagaccgaaagggtgagggacatgaaatgcctcatggagaagctgtttgacttcttggggagcttgctcactatgtgctcctctgacgtgccgttactcagaggtgggtggccgtctcccttccctgtaccctggtgaagagcggtgcagtgccgtcactcagaggtgggtggccgtctcccttccctgtgtcctggtgaagagcggtgcagtgccgtcactcagaggtgggtggccgtctcccttccctgtaccctggtgaagagcggtgcagtgccgtcactcagaggtgggtggccgtctcccttccctgtgtcctggtgaagagccgtgtagtgccgtcactcagaggtgagtggccgtctcccttccctgtgccctggtgaagagtggtgcagcagcttctcccctggtttcctcctcagagtccacgctgaggcggcgcagggtgtgcccgcaggcctcgctgactgccacccacagcagcacactggcggaggaggtggtggcactgctgcacacgctgcactccctgactcggtggaatgggctcatcaacaagtacatcaactcccagctccgctccatcacccacagctttgcgggaaggccttccaaaggggcccagttagatgactacttccctgattccgagaaccctgaagtggggggcctcatggcggtcctggctgtggttggaggcatcgatggtcgcctgtgcctgggcggccaagttgtgcacgatgactttggagaagtcaccatgactcgcatcaccctgaagggcaaaatcaccgtgcagttctctgacatgcggacgtgtcgcgtttgcccattgaatcagctgaaaccactccctgccgtggcctttaatgtgaacaacctgcccttcacagagcccatgctgtctgtctgggctcagttggtgaacctcgctggaagcaagttagaaaagcacaaaataaagaaatcgactaaacaggcctttgcaggacaagtggacctggacctgctgcggcgccagcagttgaagctatacatcctgaaagcaggtcgggcgctgttctcccaccaggataaactgcggcagatcctgtctcagccagctgttcaggagactggaactgttcacacagaacccatggatacggagggctagctgtatatgtttattgctgtggaaacatgaaaacaatgatggagcagtggtatcacctgaccttggggacatgtctcctgaagggccgcagccccccatgatcctcttgcagcagctgctggcctcggccacccagccgtctcctgtgaaggccatatttgataaacaggaacttgagactgctgcactggccgttgtggagtccactcacccttcgagcccaggatttgaagactgcagctccagtgaggccaccacgcctgtcaacgtgcagcacatccgccctgccagagtgaagaggcgcaagcagtcacccgttcccgctctgccgatcgtggtgcagctcatggagatgggatttcccagaaggaacatcgagtttgccctgaagtctctcactggtgcttccgggaatgcgtccggcttgcctggtgtggaagccttggtcgggtggctgctggaccactccgacatacaggtcacggagctctcagatgcagacacggtgtccgacgagtattctgacgaggaggtggtggaggacatggatgatgccgcctactccatgtctactggtgctgttgtgacggagagccagacgtacaaaaaccgagctggtttcttgggtaatgatgattatgctgtatatgtgagagagaatattcaggtgggaatgatggttagatgctgccgaacatacgaagaagtgtgcgaaggtgatgtgatgttggcaaagtcatcaagctggacagagatggattgcatgatctcaatgtgcagtgtgactggcagcagaaagggggcatctactggtttaggtacattcatgtggaacttataggctatcctccaccaagaagttcttctcacatcaagattggtgataaagtgcgggtcaaagcctctgtcaccacaccaaaatacaaatggggatctgtgactcatcagagtgtgggggttgtgaaaggtgtgatggatgtcagatgtttcctatcaatggatccagattcaaatgcagaaactgtgatgactttgatttttgtgaaacgtgtttcaagaccaaaaaacacaataccaggcatacatttggcagaataaatgaaccaggcttcagcagaagaaacacttcctataaatctcgcccaaacaggaaagggtaagtggcctaaaatttttctagtattttcaaaatgacccagttacaataggaaatttcttcttgtactattgtcactaatcccgactcaatatcctttaaaggacaaagatgcatgcataagtaaaaatatgacaggtcacaatcacgccggggtggtcctggggcgaggcccaagttccctgcacgcgtcggcacaagcacgcacactgtgacggggaggacgtttacgtaccatgtccacaccactccagacttggtgagcgccagtaggaactgagctccacactcaatctggcacaccccctgtccatttagtctctcaatgttctggggaatgttgcagccttcacttccgccccggcccaattttccaaagtcaccatcaccccaggaaaataccaaacctaggtttaaaaatagggaagggaagggaagggaagggaagggagagaagaaaggaaagataaagaaagcccaacctccttccaaaatgtcatgagaatcttgagcacatatggtccttggcatgaccacatgacctgcagagcccctgttatagaactcatttttatattttccttagtataacagttaatataatatgtcatttttgttaatagtgtctttttgtcattttactttttaaaagattttattgaaatatacatacaggaaagtgcatctatcataagtgtgcaaattgatgaattctaaaatctttattgtacctgtttagcacctagattgacactgaacataactaacaaccagaaatctccgtgtactcccttcctgtaactacccctgcgcccgaccaaatcactctcttctaacagcataactttgtgtgactagcttttttaatgtcattatatttgtgggattcgtttgtacagttgcatattagtttgcagatccctcactctcatttctatatggtattatattgcataaacgtaccacactttatccaactactgttaaatatttgtgcattttctacttgggggtgatttcaaatagtgctgctatgaacattcttgtaaatgtcttttggtgaacatatgcaacacatatatgcgttgttgttggttcccaggaggggcattcctgggtcataaacaatgcgtgtgttcaggtttagtacagtataatgccaaacaggtttccaaagtgtttgtgccactttacatacctgccattattgaaaaagagttctgtttgctccacattgtcaccaatacttgatattttctgttttttttttcttttaaaccgtactagtgggtgtgcagtgatattgcaatgtggttttaatttgcatcttccttgtgacaaccttgattactgtaagccacttggaaatgtgatttaaattcatataaagatatagtagcaaaacgcatactaggttactttcgtatccagaaagtttagatagaatgatttctatgtaagcttttactgtgtagtctgagtccatgaatattgattacaaaaaacacatctgtaggtgagttacaatacctcacttataattccaaattcatgttgtgttagctcaatatttttcaaataatttttgcatgcaattttcaccttctttctgagtagtttcaggtattttgtatggttccagcagtcagttaggttgccattgtttggaagcacacatccacgtatctgcaccatgatgatatgacacgcccataccccccatttcacattttgtcagaagtgcatagttatcactaactttgccagtagaaatgtactcccaatttcccacggacttatcttgaataatctctccactgaagcataacaggttttgaattctgttagaatagttgtttttactatcttttaattttatacaaatttcaaagttacgtaatacttttatttaaaaagtgaaacaaagcttttcctctcccttacccacatgttagtccagcagagggggaaagcattggccccaggccaaaatcataaacgctttcaattaactaataataattgctggcatgttgccattaaatattcttgtctcattatctctggttgctttatcaaacccataggtcactgaagcccacttttgagacaaagactatttctcccccaaaagtcaagggaaatataaaaaatgaaattagtgattaagaatagaagtcaattaatacaatcattttgtcttaattatttaaagtccagttttttccctccagcaaacctgaaaatacactatcctccagctatcagaattatattgagatctactcacatttatgatgatgttcagagattctcattgggaaggaaaaggcacacgctgcggcggtcttgcatgactctgttgttgtggaaattcaatttgttcattgtgttttgggctctctgggtggtcagggctgggctctgggtccttggcaattcctcaggttcccagcactccaaagccaagctcacctcctcatcacacaccctacaggagaagcattagggtgtccgactacgtgggtttcatagctgtggaaaagccaaaggggagactcctgaagaaaggcggtgaagactgtgaagagcgggtcaggaagatgagcacagcactgctactcctgtgggcacagggacagcatgtctccagccagcgccaccttgtttaatacatgggaactcactgaaattcattctgtattttgcccgcaaagttttaaagctttcatccacagtcaggaattaaacttataccaatgagagcctcacacattcaaggatgtactaagcactacaggcctcacagaaacagagatcccatcttggagttttcagtaccacatgggagataaagggttttgaacatgaaatgacaaaaacaacagcaagaagaaaattcttgtcctttttcattactatcagactcaaataaatgtcttggctcttacattacattcattcttcaaccattgtggtctggcttccacttccttcacttcaccaacatggctctgccaaaggaagcccgtgatctctaggccatcactttaattgatctttctacaacatttatcctggttgttaagccctccttacaacattcttctctctttgtttttatagctccatctctcctgcttctttaacttgataatgcatacttgatttttctatttgttatttcataaaccaattaatacacagataaaatgactgtatatcaaaccatgtttgtatacagtccttttatctgtgtattaattggttt

SEQ ID NO: 375684 - DNA, 2683 bp, Homo sapiens
ggcacgagccaaactcctacaggatgggcctcctccaggcctaggccgagtgattggtgagctgggagaggacgggtggataagagtccagtgggacacaggcagcaccaactcctacaggatggggaaagaaggaaaatacgacctcaagctggcagagctgccagcccctgcacagccctcagcagaggattcggacacagaggacgactctgaagccgaacaaactgaaaggaacattcaccccactgcaatgatgtttaccagcactattaacttactgcagactctttgtctgtctgctggagttcatgctgagatcatgcagagtgaagccaccaagactttatgcggactgctgcaaatgttagtggaaagcggaacgacggacaagacatcaaacaggctggtgtacagggagcaacaccggagctggtgcacgctggggtttgtgcagagcatcgctctcacgctgcaggtgtgcggcgccctcagctccccgcagtggatcacgctgctcatgaaggttgtggaagggcacgcacccttcactgccacctcgctgcagaggcagatcttagctgtgcatttgttgcaagcagtccttccgtcatgggacaagaccgaaagggtgagggacatgaaatgcctcatggagaagctgtttgacttcttggggagcttgctcactatgtgctcctctgacgtgccgttactcagaggtgggtggccgtctcccttccctgtaccctggtgaagagcggtgcagtgccgtcactcagaggtgggtggccgtctcccttccctgtgtcctggtgaagagcggtgcagtgccgtcactcagaggtgggtggccgtctcccttccctgtaccctggtgaagagcggtgcagtgccgtcactcagaggtgggtggccgtctcccttccctgtgtcctggtgaagagccgtgtagtgccgtcactcagaggtgagtggccgtctcccttccctgtgccctggtgaagagtggtgcagcagcttctcccctggtttcctcctcagagtccacgctgaggcggcgcagggtgtgcccgcaggcctcgctgactgccacccacagcagcacactggcggaggaggtggtggcactgctgcacacgctgcactccctgactcggtggaatgggctcatcaacaagtacatcaactcccagctccgctccatcacccacagctttgcgggaaggccttccaaaggggcccagttagatgactacttccctgattccgagaaccctgaagtggggggcctcatggcggtcctggctgtggttggaggcatcgatggtcgcctgtgcctgggcggccaagttgtgcacgatgactttggagaagtcaccatgactcgcatcaccctgaagggcaaaatcaccgtgcagttctctgacatgcggacgtgtcgcgtttgcccattgaatcagctgaaaccactccctgccgtggcctttaatgtgaacaacctgcccttcacagagcccatgctgtctgtctgggctcagttggtgaacctcgctggaagcaagttagaaaagcacaaaataaagaaatcgactaaacaggcctttgcaggacaagtggacctggacctgctgcggcgccagcagttgaagctatacatcctgaaagcaggtcgggcgctgttctcccaccaggataaactgcggcagatcctgtctcagccagctgttcaggagactggaactgttcacacagaacccatggatacggagggctagctgtatatgtttattgctgtggaaacatgaaaacaatgatggagcagtggtatcacctgaccttggggacatgtctcctgaagggccgcagccccccatgatcctcttgcagcagctgctggcctcggccacccagccgtctcctgtgaaggccatatttgataaacaggaacttgagactgctgcactggccgttgtggagtccactcacccttcgagcccaggatttgaagactgcagctccagtgaggccaccacgcctgtcaacgtgcagcacatccgccctgccagagtgaagaggcgcaagcagtcacccgttcccgctctgccgatcgtggtgcagctcatggagatgggatttcccagaaggaacatcgagtttgccctgaagtctctcactggtgcttccgggaatgcgtccggcttgcctggtgtggaagccttggtcgggtggctgctggaccactccgacatacaggtcacggagctctcagatgcagacacggtgtccgacgagtattctgacgaggaggtggtggaggacatggatgatgccgcctactccatgtctactggtgctgttgtgacggagagccagacgtacaaaaaccgagctggtttcttgggtaatgatgattatgctgtatatgtgagagagaatattcaggtgagtaattgtcttaagctggagcctcgatccgtttttcactcagcaaatatttgggtatgtcctatatgccaaacatcagtggacagaggcccctgccctcagggagcctgccttctggtgctggaagacatacctgaccagtgagctcatggtacgctagaaggtgctgtgtaccctggaatgagagagagcagactacagtaaaggggtgggagtgagggcacagtccagggat

SEQ ID NO: 375685 - DNA, 2541 bp, Homo sapiens
  misc_feature (2037)..(2037): n is a, c, g, or t
ggcacgagccaaactcctacaggatgggcctcctccaggcctaggccgagtgattggtgagctgggagaggacgggtggataagagtccagtgggacacaggcagcaccaactcctacaggatggggaaagaaggaaaatacgacctcaagctggcagagctgccagcccctgcacagccctcagcagaggattcggacacagaggacgactctgaagccgaacaaactgaaaggaacattcaccccactgcaatgatgtttaccagcactattaacttactgcagactctttgtctgtctgctggagttcatgctgagatcatgcagagtgaagccaccaagactttatgcggactgctgcaaatgttagtggaaagcggaacgacggacaagacatcaaacaggctggtgtacagggagcaacaccggagctggtgcacgctggggtttgtgcagagcatcgctctcacgctgcaggtgtgcggcgccctcagctccccgcagtggatcacgctgctcatgaaggttgtggaagggcacgcacccttcactgccacctcgctgcagaggcagatcttagctgtgcatttgttgcaagcagtccttccgtcatgggacaagaccgaaagggtgagggacatgaaatgcctcatggagaagctgtttgacttcttggggagcttgctcactatgtgctcctctgacgtgccgttactcagaggtgggtggccgtctcccttccctgtaccctggtgaagagcggtgcagtgccgtcactcagaggtgggtggccgtctcccttccctgtgtcctggtgaagagcggtgcagtgccgtcactcagaggtgggtggccgtctcccttccctgtaccctggtgaagagcggtgcagtgccgtcactcagaggtgggtggccgtctcccttccctgtgtcctggtgaagagccgtgtagtgccgtcactcagaggtgagtggccgtctcccttccctgtgccctggtgaagagtggtgcagcagcttctcccctggtttcctcctcagagtccacgctgaggcggcgcagggtgtgcccgcaggcctcgctgactgccacccacagcagcacactggcggaggaggtggtggcactgctgcacacgctgcactccctgactcggtggaatgggctcatcaacaagtacatcaactcccagctccgctccatcacccacagctttgcgggaaggccttccaaaggggcccagttagatgactacttccctgattccgagaaccctgaagtggggggcctcatggcggtcctggctgtggttggaggcatcgatggtcgcctgtgcctgggcggccaagttgtgcacgatgactttggagaagtcaccatgactcgcatcaccctgaagggcaaaatcaccgtgcagttctctgacatgcggacgtgtcgcgtttgcccattgaatcagctgaaaccactccctgccgtggcctttaatgtgaacaacctgcccttcacagagcccatgctgtctgtctgggctcagttggtgaacctcgctggaagcaagttagaaaagcacaaaataaagaaatcgactaaacaggcctttgcaggacaagtggacctggacctgctgcggcgccagcagttgaagctatacatcctgaaagcaggtcgggcgctgttctcccaccaggataaactgcggcagatcctgtctcagccagctgttcaggagactggaactgttcacacagatgatggagcagtggtatcacctgaccttggggacatgtctcctgaagggccgcagccccccatgatcctcttgcagcagctgctggcctcggccacccagccgtctcctgtgaaggccatatttgataaacaggaacttgaggaaagaatgtccagatgttgtttttggagaagaagaactacaaagttagagcaaatactcttatttataagaagaatgaactcagtgtgtgagaaggagaatacaaatgcaacagcctcaaattagcagtggatgcctnctgggcttctgcaaccgctttccacgggttccaccagatggctagctggtaatgacccagacacctctgagtaaactcccagaaagcctgacaaatatgttgcaaacttagccatatgtagagtggctacaccacatttgcaacgctctcttaacagcatgaccttctttaatagtgatcacttccatttttaggccctttatgcattacttttgtcattttatattgcttctttttttctgatccttgcaaaaaccctgccaagaaagcaagaaaatatgtttccccctcaggacctggacaacatcagatagaatgtgtcacataaatatgtattcataatgaaagttttataggtattaaaaatgaaagctcaaaatggctaggtgatattcctcaattcatatgaacatagatctcttaccttttttcttgatattatattgaatatgtaaagatatttgaaatagtttatatatgagtaattaaaccagctcatctttt

SEQ ID NO: 375686 - DNA, 1929 bp, Homo sapiens
ggcacgagccaaactcctacaggatgggcctcctccaggcctaggccgagtgattggtgagctgggagaggacgggtggataagagtccagtgggacacaggcagcaccaactcctacaggatggggaaagaaggaaaatacgacctcaagctggcagagctgccagcccctgcacagccctcagcagaggattcggacacagaggacgactctgaagccgaacaaactgaaaggaacattcaccccactgcaatgatgtttaccagcactattaacttactgcagactctttgtctgtctgctggagttcatgctgagatcatgcagagtgaagccaccaagactttatgcggactgctgcaaatgttagtggaaagcggaacgacggacaagacatcaaacaggctggtgtacagggagcaacaccggagctggtgcacgctggggtttgtgcagagcatcgctctcacgctgcaggtgtgcggcgccctcagctccccgcagtggatcacgctgctcatgaaggttgtggaagggcacgcacccttcactgccacctcgctgcagaggcagatcttagctgtgcatttgttgcaagcagtccttccgtcatgggacaagaccgaaagggtgagggacatgaaatgcctcatggagaagctgtttgacttcttggggagcttgctcactatgtgctcctctgacgtgccgttactcagaggtgggtggccgtctcccttccctgtaccctggtgaagagcggtgcagtgccgtcactcagaggtgggtggccgtctcccttccctgtgtcctggtgaagagcggtgcagtgccgtcactcagaggtgggtggccgtctcccttccctgtaccctggtgaagagcggtgcagtgccgtcactcagaggtgggtggccgtctcccttccctgtgtcctggtgaagagccgtgtagtgccgtcactcagaggtgagtggccgtctcccttccctgtgccctggtgaagagtggtgcagcagcttctcccctggtttcctcctcagagtccacgctgaggcggcgcagggtgtgcccgcaggcctcgctgactgccacccacagcagcacactggcggaggaggtggtggcactgctgcacacgctgcactccctgactcggtggaatgggctcatcaacaagtacatcaactcccagctccgctccatcacccacagctttgcgggaaggccttccaaaggggcccagttagatgactacttccctgattccgagaaccctgaagtggggggcctcatggcggtcctggctgtggttggaggcatcgatggtcgcctgtgcctgggcggccaagttgtgcacgatgactttggagaagtcaccatgactcgcatcaccctgaagggcaaaatcaccgtgcagttctctgacatgcggacgtgtcgcgtttgcccattgaatcagctgaaaccactccctgccgtggcctttaatgtgaacaacctgcccttcacagagcccatgctgtctgtctgggctcagttggtgaacctcgctggaagcaagttagaaaagcacaaaataaagaaatcgactaaacaggcctttgcaggacaagtggacctggacctgctgcggcgccagcagttgaagctatacatcctgaaagcaggtcgggcgctgttctcccaccaggataaactgcggcagatcctgtctcagccagctgttcaggagactggaactgttcacacaggtgtctttttaaaaagttcttaaatctttataagaagggcagtagaaagtagacaaaggaagtgaataatcagttcataaaaatggacataggtggcttataaatgtacaaaacagacacgtggcctgcccagcaaccaccaactgtgaataaaattgtcatcgtcatcttata

SEQ ID NO: 375687 - DNA, 1612 bp, Homo sapiens
ggcacgagccaaactcctacaggatgggcctcctccaggcctaggccgagtgattggtgagctgggagaggacgggtggataagagtccagtgggacacaggcagcaccaactcctacaggatggggaaagaaggaaaatacgacctcaagctggcagagctgccagcccctgcacagccctcagcagaggattcggacacagaggacgactctgaagccgaacaaactgaaaggaacattcaccccactgcaatgatgtttaccagcactattaacttactgcagactctttgtctgtctgctggagttcatgctgagatcatgcagagtgaagccaccaagactttatgcggactgctgcaaatgttagtggaaagcggaacgacggacaagacatcaaacaggctggtgtacagggagcaacaccggagctggtgcacgctggggtttgtgcagagcatcgctctcacgctgcaggtgtgcggcgccctcagctccccgcagtggatcacgctgctcatgaaggttgtggaagggcacgcacccttcactgccacctcgctgcagaggcagatcttagctgtgcatttgttgcaagcagtccttccgtcatgggacaagaccgaaagggtgagggacatgaaatgcctcatggagaagctgtttgacttcttggggagcttgctcactatgtgctcctctgacgtgccgttactcagaggtgggtggccgtctcccttccctgtaccctggtgaagagcggtgcagtgccgtcactcagaggtgggtggccgtctcccttccctgtgtcctggtgaagagcggtgcagtgccgtcactcagaggtgggtggccgtctcccttccctgtaccctggtgaagagcggtgcagtgccgtcactcagaggtgggtggccgtctcccttccctgtgtcctggtgaagagccgtgtagtgccgtcactcagaggtgagtggccgtctcccttccctgtgccctggtgaagagtggtgcagcagcttctcccctggtttcctcctcagagtccacgctgaggcggcgcagggtgtgcccgcaggcctcgctgactgccacccacagcagcacactggcggaggaggtggtggcactgctgcacacgctgcactccctgactcggtggaatgggctcatcaacaagtacatcaactcccagctccgctccatcacccacagctttgcgggaaggccttccaaaggggcccagttagatgactacttccctgattccgagaaccctgaagtggggggcctcatggcggtcctggctgtggttggaggcatcgatggtcgcctgtgcctgggcggccaagttgtgcacgatgactttggagaagtcaccatgactcgcatcaccctgaagggcaaaatcaccgtgcagttctctgacatgcggacgtgtcgcgtttgcccattgaatcagctgaaaccagtaggtgaacttgtgcttagttactgcatgataagggaaattgactttacactagaaccgagcaccaacatcagcaccaactcctacaggatggggaaagaaggaaaatacgacctcaagctggcagagctgccagcccc

SEQ ID NO: 375688 - DNA, 436 bp, Homo sapiens
tgagatggagtctcgctctgtcacccaggctggagtgcagtggcatgatctcagcacactgcaagctctgcctcccaggttcacaccattctcctgcctcagcctcccgagtagctgggaatacaggcgcctgccatcatgctcagctaattttttgtatttttagtagagacgaggtttcaccgtgttagccaggatggtgtcgatatcctgacctcctgatccacccgccatggcttcccaaagtgctgggattacaggcatgagccaccacgcccggccaatatattggtttctttatgaaaattatactggatctgttacaggtatgattgatgtattttatttttaagttgtcaagcattcagttaatcatgtgtgttgtaacttttcggggagggacatttgcagaggctaacggtatgacattctgaaa

SEQ ID NO: 375689 - DNA, 452 bp, Homo sapiens
ccacctcagtgctctgtttatctgaggactttgacataggaatacttatgtgctctttggttaacacagcacagactttgtttcatgtattatttggagggttttgaggtgagaacctgattgtgttaacatgctagcgaggcttcagaagcattagtgattgcaagtgcgtcagaagctgtggcatgtttaagatttgtgaagactcactgggtttccctgaagttacttccagctgttcctgttgcaggactttttgtgtcaaatagaaaggtactgtaggcagtgccatttgaccacaccgatcatgtttccccccgagcatcccgtggaagaggtcggtcgcttgctgttatgttgcctcttaaaacatgaagatttaggtaaggagctcaatatctttgtactttagctacactgcagattcctcgactaacctgtggtacgtattc

SEQ ID NO: 375690 - DNA, 603 bp, Homo sapiens
gttttagatttcaaggccagcttgagatgctgtgctgggttcccacagaggtggttctgcctttctccaggggtcctaggcttgtagagtggtttggtcatgttagtaatctgtgtggattcaacttacctatggtatcataaatgtatacatgcacagtcaatgttgtgtacatgtatacagcagatttagagatttatacagtttatatgctgcataaatatatagacgtatagtataactgtatcatcaacattgtcatttgatgggtcaaatgagtcaataccaaaatataaagcttgggtaaaaaactgtgttactttagtttttcccaccatttctgaatttttgtttacttttcctttctagcttttgtctggtcctctgagccccagtgagagtttcctgaggtacctcacccttccacaagacaacaggcttgccattgatctgcaacaaacggcggttgttgtcatggcccatttagaccgtctggctacaccctgtagatgcctcctctgtgtagctctccgacgtctcataaggtgtgtgcaagaaccgtgttctccatgtgttttgtagctagtaccacttgtaggttct

SEQ ID NO: 375691 - DNA, 584 bp, Homo sapiens
ctgtaacagttagaagtctggcagtgtcccaagtcaaattctttatctttatttgaaagggaacctcttactgattgtttaaaggatgttgatttgatcccgccttttaatcggatgctgctggaagtcacctttggcaagctgtacgcttgggctgttcagaacattcgaaatgttttggtggatgccagtgccaaatttaaagagcttggtgagtcaataattgtatcaatgttattttatagtttgcctttaattatatgttgtggaaacttgcaaatgccaatttttgcttttgagaagactttaataagtttgtactttgtacttgtataatctatgctgctgtcagctttctcagattttaaacaaaactttaaaatttagcaggagacacaatgttgaagtactctagtataacatttttacattttgacatttttatgtgtatcaccacatatcctaaagtgtctgtgtcctatattgatatttatttcctggatagtttgagcatctacagagagttgattggattggttttgtggaggaaaagtgagacataacttttatatttgaaatggaag

SEQ ID NO: 375692 - DNA, 466 bp, Homo sapiens
catgtctattttccctcccgccgcttctccaaacaggctggtgtacagggagcaacaccggagctggtgcacgctggggtttgtgcagagcatcgctctcacgctgcaggtgtgcggcgccctcagctccccgcagtggatcacgctgctcatgaaggttgtggaagggcacgcacccttcactgccacctcgctgcagaggcaggtaatgtgctgccaggcaaaaccagttccctgagagaggcctccatgtactgaagttccctgccctcagagtcaggggcctttattccgtaacgagtgcagaaagggtctagaagtgacagggtagattttctggaggcaaggggcagaggtccttgataattggtaagttgctaaccttcagtttacctgcttttctcttaagtggtaaatcctgcaactacttactcatctgcttcacagaatttgtagtgtaattgtc

SEQ ID NO: 375693 - DNA, 6058 bp, Homo sapiens
  misc_feature (2)..(3): n is a, c, g, or t
  misc_feature (9)..(9): n is a, c, g, or t
  misc_feature (12)..(13): n is a, c, g, or t
gnntcggcncgnncctcgggccgcgagaggcgccgggatcgcgggcgccggctgagccagcggctcttgggaggctgcgtccgcgcgccggcggggcggggcggccgggccctgcgcgtcaggcctgagacctgggaggaagctggagaaaagatgccctctgaatctttgtgtttggctgcccaggctcgcctcgactccaaatggttgaaaacagatatacagcttgcattcacaagagatgggctctgtggtctgtggaatgaaatggttaaagatggagaaattgtatacactggaacagaatcaacccagaacggatagctccctcctggaaaagcttttgtctggtcctctgagccccagtgagagtttcctgaggtacctcacccttccacaagacaacaggcttgccattgatctgcaacaaacggcggttgttgtcatggcccatttagaccgtctggctacaccctgtagatgcctcctctgtgtagctctccgacgtctcataagagtcattttttacaggtcagaactgtagaaataatgagaaagtgacacttgtacgcatagctgatttggagaaccataataacgatggaggcttctggactgtgattgacgggaaagtgtatgatataaaggacttccagacacagtcgttaacagaaaatagtattcttgctcagtttgcaggggaagacccagtggtagctttggaagctgctttgcagtttgaagacacccgggaatccatgcacgcattttgtgttggccagtatttggagcctgaccaagaaggcgtcaccataccagatctggggagtctctcctcacctctgatagacacagagaggaatctgggcctgcttctcggattacacgcttcctatttagcaatgagcacaccgctgtctcctgtcgagattgaatgtgccaaatggcttcagtcatccatcttctctggaggcctgcagaccagccagatccactacagctacaacgaggagaaagacgaggaccactgcagctccccagggggcacacctgccagcaaatctcgactctgctcccacagacgggccctgggggaccattcccaggcatttctgcaagccattgcagacaacaacattcaggatcacaacgtgaaggactttttgtgtcaaatagaaaggtactgtaggcagtgccatttgaccacaccgatcatgtttccccccgagcatcccgtggaagaggtcggtcgcttgctgttatgttgcctcttaaaacatgaagatttaggtcatgtggcattatctttagttcatgcaggtgcacttgatattgagcaagtaaagcacagaacgttgcctaagtcagtggtggatgtttgtagagttgtctaccaagcaaaatgttcgctcattaagactcatcaagaacagggccgttcttacaaggaggtctgcgctcctgtcatcaaacgtttgagattcctctttaatgaattgagacctgctgtttgtaatgacctctctataatgtctaagtttaaattgttaagttctttgccccattggaggaggatagctcagaagataattcgagaaccaaggaaaaagagagttcctaagaagccagaatctacggatgatgaagaaaaaattggaaacgaagagagtgatttagaagaagcttgcattttgcctcatagtccaataaatgtggacaagagacccattgcaattaaatcacccaaggacaaatggcagccgctgttgagtactgttacagatgttcacaaatacaagtggttgaagcagaatgtgcagggtctttatccgcagtctccactcctcagtacaattgctgaatttgcccttaaagaagagccagtggatgtggaaaagagaaagtgcctactaaaacagttggagagagcagaggttcgcctggaagggatagatacaattttaaaattgtatctggtgagcaagaatttcttacttccatctgtgccgtatgcgatgttttgtggatggcaaagacttattcctgagggaatcgatataggggaacctcttactgattgtttaaaggatgttgatttgatcccgccttttaatcggatgctgctggaagtcacctttggcaagctgtacgcttgggctgttcagaacattcgaaatgttttggtggatgccagtgccaaatttaaagagcttggtatccagccggttcccctgcaaaccatcaccaatgagaacccatcgggaccgagcctggggaccatcccgcaagcccacttcctcctggtgatgctcagcatgctcaccctgcagcacagcgcaaacaaccttgacctcctgctcaattccggcacgctggccctcgctcagacggcactgcgcctgattggccccagttgtgacagcgttgaggaagatatgaatgcttctgctcaaggtgcttctgccacagttttggaagaaacaaggaaggaaacggctcctgtgcagctccctgtttcagggccagaactggctgccatgatgaagattggaacaagggtcatgagaggtgtggactggaaatggggcgatcaggatgggcctcctccaggcctaggccgagtgattggtgagctgggagaggacgggtggataagagtccagtgggacacaggcagcaccaactcctacaggatggggaaagaaggaaaatacgacctcaagctggcagagctgccagcccctgcacagccctcagcagaggattcggacacagaggacgactctgaagccgaacaaactgaaaggaacattcaccccactgcaatgatgtttaccagcactattaacttactgcagactctttgtctgtctgctggagttcatgctgagatcatgcagagtgaagccaccaagactttatgcggactgctgcaaatgttagtggaaagcggaacgacggacaagacatcaaacaggctggtgtacagggagcaacaccggagctggtgcacgctggggtttgtgcagagcatcgctctcacgctgcaggtgtgcggcgccctcagctccccgcagtggatcacgctgctcatgaaggttgtggaagggcacgcacccttcactgccacctcgctgcagaggcagatcttagctgtgcatttgttgcaagcagtccttccgtcatgggacaagaccgaaagggtgagggacatgaaatgcctcatggagaagctgtttgacttcttggggagcttgctcactatgtgctcctctgacgtgccgttactcagagagtccacgctgaggcggcgcagggtgtgcccgcaggcctcgctgactgccacccacagcagcacactggcggaggaggtggtggcactgctgcacacgctgcactccctgactcggtggaatgggctcatcaacaagtacatcaactcccagctccgctccatcacccacagctttgcgggaaggccttccaaaggggcccagttagatgactacttccctgattccgagaaccctgaagtggggggcctcatggcggtcctggctgtggttggaggcatcgatggtcgcctgtgcctgggcggccaagttgtgcacgatgactttggagaagtcaccatgactcgcatcaccctgaagggcaaaatcaccgtgcagttctctgacatgcggacgtgtcgcgtttgcccattgaatcagctgaaaccactccctgccgtggcctttaatgtgaacaacctgcccttcacagagcccatgctgtctgtctgggctcagttggtgaacctcgctggaagcaagttagaaaagcacaaaataaagaaatcgactaaacaggcctttgcaggacaagtggacctggacctgctgcggcgccagcagttgaagctatacatcctgaaagcaggtcgggcgctgttctcccaccaggataaactgcggcagatcctgtctcagccagctgttcaggagactggaactgttcacacagaacccatggatacggagggctagctgtatatgtttattgctgtggaaacatgaaaacaatgatggagcagtggtatcacctgaccttggggacatgtctcctgaagggccgcagccccccatgatcctcttgcagcagctgctggcctcggccacccagccgtctcctgtgaaggccatatttgataaacaggaacttgagactgctgcactggccgttgtggagtccactcacccttcgagcccaggatttgaagactgcagctccagtgaggccaccacgcctgtcaacgtgcagcacatccgccctgccagagtgaagaggcgcaagcagtcacccgttcccgctctgccgatcgtggtgcagctcatggagatgggatttcccagaaggaacatcgagtttgccctgaagtctctcactggtgcttccgggaatgcgtccggcttgcctggtgtggaagccttggtcgggtggctgctggaccactccgacatacaggtcacggagctctcagatgcagacacggtgtccgacgagtattctgacgaggaggtggtggaggacatggatgatgccgcctactccatgtctactggtgctgttgtgacggagagccagacgtacaaaaaccgagctggtttcttgggtaatgatgattatgctgtatatgtgagagagaatattcaggtgggaatgatggttagatgctgccgaacatacgaagaagtgtgcgaaggtgatgtgatgttggcaaagtcatcaagctggacagagatggattgcatgatctcaatgtgcagtgtgactggcagcagaaagggggcatctactggtttaggtacattcatgtggaacttataggctatcctccaccaagaagttcttctcacatcaagattggtgataaagtgcgggtcaaagcctctgtcaccacaccaaaatacaaatggggatctgtgactcatcagagtgtgggggttgtgaaaggtgtgatggatgtcagatgtttcctatcaatggatccagattcaaatgcagaaactgtgatgactttgatttttgtgaaacgtgtttcaagaccaaaaaacacaataccaggcatacatttggcagaataaatgaaccaggcttcagcagaagaaacacttcctataaatctcgcccaaacaggaaaggagaagcattagggtgtccgactacgtgggtttcatagctgtggaaaagccaaaggggagactcctgaagaaaggcggtgaagactgtgaagagcgggtcaggaagatgagcacagcactgctactcctgtgggcacagggacagcatgtctccagccagcgccaccttgtttaatacatgggaactcactgaaattcattctgtattttgcccgcaaagttttaaagctttcatccacagtcaggaattaaacttataccaatgagagcctcacacattcaaggatgtactaagcactacaggcctcacagaaacagagatcccatcttggagttttcagtaccacatgggagataaagggttttgaacatgaaatgacaaaaacaacagcaagaagaaaattcttgtcctttttcattactatcagactcaaataaatgtcttggctcttacattacattcattcttcaaccattgtggtctggcttccacttccttcacttcaccaacatggctctgccaaaggaagcccgtgatctctaggccatcactttaattgatctttctacaacatttatcctggttgttaagccctccttacaacattcttctctctttgtttttatagctccatctctcctgcttctttaacttgataatgcatacttgatttttctatttgttatttcataaaccaattaatacacagataaaatgactgtatatcaaaccatgtttgtatagaaaaaatggattttggatgcctctcatatgtaattagttctattaaacatattaattgtattgtttaatttgtcaggtttttgacagaattttgtttacaagtaataaaaattttatctccaattttcaa

SEQ ID NO: 375694 - DNA, 6248 bp, Homo sapiens
ggcacgagccaaactcctacaggatgggcctcctccaggcctaggccgagtgattggtgagctgggagaggacgggtggataagagtccagtgggacacaggcagcaccaactcctacaggatggggaaagaaggaaaatacgacctcaagctggcagagctgccagcccctgcacagccctcagcagaggattcggacacagaggacgactctgaagccgaacaaactgaaaggaacattcaccccactgcaatgatgtttaccagcactattaacttactgcagactctttgtctgtctgctggagttcatgctgagatcatgcagagtgaagccaccaagactttatgcggactgctgcaaatgttagtggaaagcggaacgacggacaagacatcaaacaggctggtgtacagggagcaacaccggagctggtgcacgctggggtttgtgcagagcatcgctctcacgctgcaggtgtgcggcgccctcagctccccgcagtggatcacgctgctcatgaaggttgtggaagggcacgcacccttcactgccacctcgctgcagaggcagatcttagctgtgcatttgttgcaagcagtccttccgtcatgggacaagaccgaaagggtgagggacatgaaatgcctcatggagaagctgtttgacttcttggggagcttgctcactatgtgctcctctgacgtgccgttactcagaggtgggtggccgtctcccttccctgtaccctggtgaagagcggtgcagtgccgtcactcagaggtgggtggccgtctcccttccctgtgtcctggtgaagagcggtgcagtgccgtcactcagaggtgggtggccgtctcccttccctgtaccctggtgaagagcggtgcagtgccgtcactcagaggtgggtggccgtctcccttccctgtgtcctggtgaagagccgtgtagtgccgtcactcagaggtgagtggccgtctcccttccctgtgccctggtgaagagtggtgcagcagcttctcccctggtttcctcctcagagtccacgctgaggcggcgcagggtgtgcccgcaggcctcgctgactgccacccacagcagcacactggcggaggaggtggtggcactgctgcacacgctgcactccctgactcggtggaatgggctcatcaacaagtacatcaactcccagctccgctccatcacccacagctttgcgggaaggccttccaaaggggcccagttagatgactacttccctgattccgagaaccctgaagtggggggcctcatggcggtcctggctgtggttggaggcatcgatggtcgcctgtgcctgggcggccaagttgtgcacgatgactttggagaagtcaccatgactcgcatcaccctgaagggcaaaatcaccgtgcagttctctgacatgcggacgtgtcgcgtttgcccattgaatcagctgaaaccactccctgccgtggcctttaatgtgaacaacctgcccttcacagagcccatgctgtctgtctgggctcagttggtgaacctcgctggaagcaagttagaaaagcacaaaataaagaaatcgactaaacaggcctttgcaggacaagtggacctggacctgctgcggcgccagcagttgaagctatacatcctgaaagcaggtcgggcgctgttctcccaccaggataaactgcggcagatcctgtctcagccagctgttcaggagactggaactgttcacacagatgatggagcagtggtatcacctgaccttggggacatgtctcctgaagggccgcagccccccatgatcctcttgcagcagctgctggcctcggccacccagccgtctcctgtgaaggccatatttgataaacaggaacttgagactgctgcactggccgttgtggagtccactcacccttcgagcccaggatttgaagactgcagctccagtgaggccaccacgcctgtcaacgtgcagcacatccgccctgccagagtgaagaggcgcaagcagtcacccgttcccgctctgccgatcgtggtgcagctcatggagatgggatttcccagaaggaacatcgagtttgccctgaagtctctcactggtgcttccgggaatgcgtccggcttgcctggtgtggaagccttggtcgggtggctgctggaccactccgacatacaggtcacggagctctcagatgcagacacggtgtccgacgagtattctgacgaggaggtggtggaggacatggatgatgccgcctactccatgtctactggtgctgttgtgacggagagccagacgtacaaaaaccgagctggtttcttgggtaatgatgattatgctgtatatgtgagagagaatattcaggtgggaatgatggttagatgctgccgaacatacgaagaagtgtgcgaaggtgatgtgatgttggcaaagtcatcaagctggacagagatggattgcatgatctcaatgtgcagtgtgactggcagcagaaagggggcatctactggtttaggtacattcatgtggaacttataggctatcctccaccaagaagttcttctcacatcaagattggtgataaagtgcgggtcaaagcctctgtcaccacaccaaaatacaaatggggatctgtgactcatcagagtgtgggggttgtgaaaggtgtgatggatgtcagatgtttcctatcaatggatccagattcaaatgcagaaactgtgatgactttgatttttgtgaaacgtgtttcaagaccaaaaaacacaataccaggcatacatttggcagaataaatgaaccaggcttcagcagaagaaacacttcctataaatctcgcccaaacaggaaagggtaagtggcctaaaatttttctagtattttcaaaatgacccagttacaataggaaatttcttcttgtactattgtcactaatcccgactcaatatcctttaaaggacaaagatgcatgcataagtaaaaatatgacaggtcacaatcacgccggggtggtcctggggcgaggcccaagttccctgcacgcgtcggcacaagcacgcacactgtgacggggaggacgtttacgtaccatgtccacaccactccagacttggtgagcgccagtaggaactgagctccacactcaatctggcacaccccctgtccatttagtctctcaatgttctggggaatgttgcagccttcacttccgccccggcccaattttccaaagtcaccatcaccccaggaaaataccaaacctaggtttaaaaatagggaagggaagggaagggaagggaagggagagaagaaaggaaagataaagaaagcccaacctccttccaaaatgtcatgagaatcttgagcacatatggtccttggcatgaccacatgacctgcagagcccctgttatagaactcatttttatattttccttagtataacagttaatataatatgtcatttttgttaatagtgtctttttgtcattttactttttaaaagattttattgaaatatacatacaggaaagtgcatctatcataagtgtgcaaattgatgaattctaaaatctttattgtacctgtttagcacctagattgacactgaacataactaacaaccagaaatctccgtgtactcccttcctgtaactacccctgcgcccgaccaaatcactctcttctaacagcataactttgtgtgactagcttttttaatgtcattatatttgtgggattcgtttgtacagttgcatattagtttgcagatccctcactctcatttctatatggtattatattgcataaacgtaccacactttatccaactactgttaaatatttgtgcattttctacttgggggtgatttcaaatagtgctgctatgaacattcttgtaaatgtcttttggtgaacatatgcaacacatatatgcgttgttgttggttcccaggaggggcattcctgggtcataaacaatgcgtgtgttcaggtttagtacagtataatgccaaacaggtttccaaagtgtttgtgccactttacatacctgccattattgaaaaagagttctgtttgctccacattgtcaccaatacttgatattttctgttttttttttcttttaaaccgtactagtgggtgtgcagtgatattgcaatgtggttttaatttgcatcttccttgtgacaaccttgattactgtaagccacttggaaatgtgatttaaattcatataaagatatagtagcaaaacgcatactaggttactttcgtatccagaaagtttagatagaatgatttctatgtaagcttttactgtgtagtctgagtccatgaatattgattacaaaaaacacatctgtaggtgagttacaatacctcacttataattccaaattcatgttgtgttagctcaatatttttcaaataatttttgcatgcaattttcaccttctttctgagtagtttcaggtattttgtatggttccagcagtcagttaggttgccattgtttggaagcacacatccacgtatctgcaccatgatgatatgacacgcccataccccccatttcacattttgtcagaagtgcatagttatcactaactttgccagtagaaatgtactcccaatttcccacggacttatcttgaataatctctccactgaagcataacaggttttgaattctgttagaatagttgtttttactatcttttaattttatacaaatttcaaagttacgtaatacttttatttaaaaagtgaaacaaagcttttcctctcccttacccacatgttagtccagcagagggggaaagcattggccccaggccaaaatcataaacgctttcaattaactaataataattgctggcatgttgccattaaatattcttgtctcattatctctggttgctttatcaaacccataggtcactgaagcccacttttgagacaaagactatttctcccccaaaagtcaagggaaatataaaaaatgaaattagtgattaagaatagaagtcaattaatacaatcattttgtcttaattatttaaagtccagttttttccctccagcaaacctgaaaatacactatcctccagctatcagaattatattgagatctactcacatttatgatgatgttcagagattctcattgggaaggaaaaggcacacgctgcggcggtcttgcatgactctgttgttgtggaaattcaatttgttcattgtgttttgggctctctgggtggtcagggctgggctctgggtccttggcaattcctcaggttcccagcactccaaagccaagctcacctcctcatcacacaccctacaggagaagcattagggtgtccgactacgtgggtttcatagctgtggaaaagccaaaggggagactcctgaagaaaggcggtgaagactgtgaagagcgggtcaggaagatgagcacagcactgctactcctgtgggcacagggacagcatgtctccagccagcgccaccttgtttaatacatgggaactcactgaaattcattctgtattttgcccgcaaagttttaaagctttcatccacagtcaggaattaaacttataccaatgagagcctcacacattcaaggatgtactaagcactacaggcctcacagaaacagagatcccatcttggagttttcagtaccacatgggagataaagggttttgaacatgaaatgacaaaaacaacagcaagaagaaaattcttgtcctttttcattactatcagactcaaataaatgtcttggctcttacattacattcattcttcaaccattgtggtctggcttccacttccttcacttcaccaacatggctctgccaaaggaagcccgtgatctctaggccatcactttaattgatctttctacaacatttatcctggttgttaagccctccttacaacattcttctctctttgtttttatagctccatctctcctgcttctttaacttgataatgcatacttgatttttctatttgttatttcataaaccaattaatacacagataaaatgactgtatatcaaaccatgtttgtatagaaaaaatggattttggatgcctctcatatgtaattagttctattaaacatattaattgtattgtttaatttgtcaggtttttgacagaattttgtttacaagtaataaaaattttatctccaattttcaa

SEQ ID NO: 375695 - DNA, 6360 bp, Homo sapiens
ggcacgagccaaactcctacaggatgggcctcctccaggcctaggccgagtgattggtgagctgggagaggacgggtggataagagtccagtgggacacaggcagcaccaactcctacaggatggggaaagaaggaaaatacgacctcaagctggcagagctgccagcccctgcacagccctcagcagaggattcggacacagaggacgactctgaagccgaacaaactgaaaggaacattcaccccactgcaatgatgtttaccagcactattaacttactgcagactctttgtctgtctgctggagttcatgctgagatcatgcagagtgaagccaccaagactttatgcggactgctgcaaatgttagtggaaagcggaacgacggacaagacatcaaacaggctggtgtacagggagcaacaccggagctggtgcacgctggggtttgtgcagagcatcgctctcacgctgcaggtgtgcggcgccctcagctccccgcagtggatcacgctgctcatgaaggttgtggaagggcacgcacccttcactgccacctcgctgcagaggcagatcttagctgtgcatttgttgcaagcagtccttccgtcatgggacaagaccgaaagggtgagggacatgaaatgcctcatggagaagctgtttgacttcttggggagcttgctcactatgtgctcctctgacgtgccgttactcagaggtgggtggccgtctcccttccctgtaccctggtgaagagcggtgcagtgccgtcactcagaggtgggtggccgtctcccttccctgtgtcctggtgaagagcggtgcagtgccgtcactcagaggtgggtggccgtctcccttccctgtaccctggtgaagagcggtgcagtgccgtcactcagaggtgggtggccgtctcccttccctgtgtcctggtgaagagccgtgtagtgccgtcactcagaggtgagtggccgtctcccttccctgtgccctggtgaagagtggtgcagcagcttctcccctggtttcctcctcagagtccacgctgaggcggcgcagggtgtgcccgcaggcctcgctgactgccacccacagcagcacactggcggaggaggtggtggcactgctgcacacgctgcactccctgactcggtggaatgggctcatcaacaagtacatcaactcccagctccgctccatcacccacagctttgcgggaaggccttccaaaggggcccagttagatgactacttccctgattccgagaaccctgaagtggggggcctcatggcggtcctggctgtggttggaggcatcgatggtcgcctgtgcctgggcggccaagttgtgcacgatgactttggagaagtcaccatgactcgcatcaccctgaagggcaaaatcaccgtgcagttctctgacatgcggacgtgtcgcgtttgcccattgaatcagctgaaaccactccctgccgtggcctttaatgtgaacaacctgcccttcacagagcccatgctgtctgtctgggctcagttggtgaacctcgctggaagcaagttagaaaagcacaaaataaagaaatcgactaaacaggcctttgcaggacaagtggacctggacctgctgcggcgccagcagttgaagctatacatcctgaaagcaggtcgggcgctgttctcccaccaggataaactgcggcagatcctgtctcagccagctgttcaggagactggaactgttcacacagaacccatggatacggagggctagctgtatatgtttattgctgtggaaacatgaaaacaatgatggagcagtggtatcacctgaccttggggacatgtctcctgaagggccgcagccccccatgatcctcttgcagcagctgctggcctcggccacccagccgtctcctgtgaaggccatatttgataaacaggaacttgagactgctgcactggccgttgtggagtccactcacccttcgagcccaggatttgaagactgcagctccagtgaggccaccacgcctgtcaacgtgcagcacatccgccctgccagagtgaagaggcgcaagcagtcacccgttcccgctctgccgatcgtggtgcagctcatggagatgggatttcccagaaggaacatcgagtttgccctgaagtctctcactggtgcttccgggaatgcgtccggcttgcctggtgtggaagccttggtcgggtggctgctggaccactccgacatacaggtcacggagctctcagatgcagacacggtgtccgacgagtattctgacgaggaggtggtggaggacatggatgatgccgcctactccatgtctactggtgctgttgtgacggagagccagacgtacaaaaaccgagctggtttcttgggtaatgatgattatgctgtatatgtgagagagaatattcaggtgggaatgatggttagatgctgccgaacatacgaagaagtgtgcgaaggtgatgtgatgttggcaaagtcatcaagctggacagagatggattgcatgatctcaatgtgcagtgtgactggcagcagaaagggggcatctactggtttaggtacattcatgtggaacttataggctatcctccaccaagaagttcttctcacatcaagattggtgataaagtgcgggtcaaagcctctgtcaccacaccaaaatacaaatggggatctgtgactcatcagagtgtgggggttgtgaaaggtgtgatggatgtcagatgtttcctatcaatggatccagattcaaatgcagaaactgtgatgactttgatttttgtgaaacgtgtttcaagaccaaaaaacacaataccaggcatacatttggcagaataaatgaaccaggcttcagcagaagaaacacttcctataaatctcgcccaaacaggaaagggtaagtggcctaaaatttttctagtattttcaaaatgacccagttacaataggaaatttcttcttgtactattgtcactaatcccgactcaatatcctttaaaggacaaagatgcatgcataagtaaaaatatgacaggtcacaatcacgccggggtggtcctggggcgaggcccaagttccctgcacgcgtcggcacaagcacgcacactgtgacggggaggacgtttacgtaccatgtccacaccactccagacttggtgagcgccagtaggaactgagctccacactcaatctggcacaccccctgtccatttagtctctcaatgttctggggaatgttgcagccttcacttccgccccggcccaattttccaaagtcaccatcaccccaggaaaataccaaacctaggtttaaaaatagggaagggaagggaagggaagggaagggagagaagaaaggaaagataaagaaagcccaacctccttccaaaatgtcatgagaatcttgagcacatatggtccttggcatgaccacatgacctgcagagcccctgttatagaactcatttttatattttccttagtataacagttaatataatatgtcatttttgttaatagtgtctttttgtcattttactttttaaaagattttattgaaatatacatacaggaaagtgcatctatcataagtgtgcaaattgatgaattctaaaatctttattgtacctgtttagcacctagattgacactgaacataactaacaaccagaaatctccgtgtactcccttcctgtaactacccctgcgcccgaccaaatcactctcttctaacagcataactttgtgtgactagcttttttaatgtcaaagaatgaaatctacagcatgtattcatttgcatctggcttctgccacccaacattatatttgtgggattcgtttgtacagttgcatattagtttgcagatccctcactctcatttctatatggtattatattgcataaacgtaccacactttatccaactactgttaaatatttgtgcattttctacttgggggtgatttcaaatagtgctgctatgaacattcttgtaaatgtcttttggtgaacatatgcaacacatatatgcgttgttgttggttcccaggaggggcattcctgggtcataaacaatgcgtgtgttcaggtttagtacagtataatgccaaacaggtttccaaagtgtttgtgccactttacatacctgccattattgaaaaagagttctgtttgctccacattgtcaccaatacttgatattttctgttttttttttcttttaaaccgtactagtgggtgtgcagtgatattgcaatgtggttttaatttgcatcttccttgtgacaaccttgattactgtaagccacttggaaatgtgatttaaattcatataaagatatagtagcaaaacgcatactaggttactttcgtatccagaaagtttagatagaatgatttctatgtaagcttttactgtgtagtctgagtccatgaatattgattacaaaaaacacatctgtaggtgagttacaatacctcacttataattccaaattcatgttgtgttagctcaatatttttcaaataatttttgcatgcaattttcaccttctttctgagtagtttcaggtattttgtatggttccagcagtcagttaggttgccattgtttggaagcacacatccacgtatctgcaccatgatgatatgacacgcccataccccccatttcacattttgtcagaagtgcatagttatcactaactttgccagtagaaatgtactcccaatttcccacggacttatcttgaataatctctccactgaagcataacaggttttgaattctgttagaatagttgtttttactatcttttaattttatacaaatttcaaagttacgtaatacttttatttaaaaagtgaaacaaagcttttcctctcccttacccacatgttagtccagcagagggggaaagcattggccccaggccaaaatcataaacgctttcaattaactaataataattgctggcatgttgccattaaatattcttgtctcattatctctggttgctttatcaaacccataggtcactgaagcccacttttgagacaaagactatttctcccccaaaagtcaagggaaatataaaaaatgaaattagtgattaagaatagaagtcaattaatacaatcattttgtcttaattatttaaagtccagttttttccctccagcaaacctgaaaatacactatcctccagctatcagaattatattgagatctactcacatttatgatgatgttcagagattctcattgggaaggaaaaggcacacgctgcggcggtcttgcatgactctgttgttgtggaaattcaatttgttcattgtgttttgggctctctgggtggtcagggctgggctctgggtccttggcaattcctcaggttcccagcactccaaagccaagctcacctcctcatcacacaccctacaggagaagcattagggtgtccgactacgtgggtttcatagctgtggaaaagccaaaggggagactcctgaagaaaggcggtgaagactgtgaagagcgggtcaggaagatgagcacagcactgctactcctgtgggcacagggacagcatgtctccagccagcgccaccttgtttaatacatgggaactcactgaaattcattctgtattttgcccgcaaagttttaaagctttcatccacagtcaggaattaaacttataccaatgagagcctcacacattcaaggatgtactaagcactacaggcctcacagaaacagagatcccatcttggagttttcagtaccacatgggagataaagggttttgaacatgaaatgacaaaaacaacagcaagaagaaaattcttgtcctttttcattactatcagactcaaataaatgtcttggctcttacattacattcattcttcaaccattgtggtctggcttccacttccttcacttcaccaacatggctctgccaaaggaagcccgtgatctctaggccatcactttaattgatctttctacaacatttatcctggttgttaagccctccttacaacattcttctctctttgtttttatagctccatctctcctgcttctttaacttgataatgcatacttgatttttctatttgttatttcataaaccaattaatacacagataaaatgactgtatatcaaaccatgtttgtatagaaaaaatggattttggatgcctctcatatgtaattagttctattaaacatattaattgtattgtttaatttgtcaggtttttgacagaattttgtttacaagtaataaaaattttatctccaattttcaa

SEQ ID NO: 375696 - DNA, 6252 bp, Homo sapiens
ggcacgagccaaactcctacaggatgggcctcctccaggcctaggccgagtgattggtgagctgggagaggacgggtggataagagtccagtgggacacaggcagcaccaactcctacaggatggggaaagaaggaaaatacgacctcaagctggcagagctgccagcccctgcacagccctcagcagaggattcggacacagaggacgactctgaagccgaacaaactgaaaggaacattcaccccactgcaatgatgtttaccagcactattaacttactgcagactctttgtctgtctgctggagttcatgctgagatcatgcagagtgaagccaccaagactttatgcggactgctgcaaatgttagtggaaagcggaacgacggacaagacatcaaacaggctggtgtacagggagcaacaccggagctggtgcacgctggggtttgtgcagagcatcgctctcacgctgcaggtgtgcggcgccctcagctccccgcagtggatcacgctgctcatgaaggttgtggaagggcacgcacccttcactgccacctcgctgcagaggcagatcttagctgtgcatttgttgcaagcagtccttccgtcatgggacaagaccgaaagggtgagggacatgaaatgcctcatggagaagctgtttgacttcttggggagcttgctcactatgtgctcctctgacgtgccgttactcagaggtgggtggccgtctcccttccctgtaccctggtgaagagcggtgcagtgccgtcactcagaggtgggtggccgtctcccttccctgtgtcctggtgaagagcggtgcagtgccgtcactcagaggtgggtggccgtctcccttccctgtaccctggtgaagagcggtgcagtgccgtcactcagaggtgggtggccgtctcccttccctgtgtcctggtgaagagccgtgtagtgccgtcactcagaggtgagtggccgtctcccttccctgtgccctggtgaagagtggtgcagcagcttctcccctggtttcctcctcagagtccacgctgaggcggcgcagggtgtgcccgcaggcctcgctgactgccacccacagcagcacactggcggaggaggtggtggcactgctgcacacgctgcactccctgactcggtggaatgggctcatcaacaagtacatcaactcccagctccgctccatcacccacagctttgcgggaaggccttccaaaggggcccagttagatgactacttccctgattccgagaaccctgaagtggggggcctcatggcggtcctggctgtggttggaggcatcgatggtcgcctgtgcctgggcggccaagttgtgcacgatgactttggagaagtcaccatgactcgcatcaccctgaagggcaaaatcaccgtgcagttctctgacatgcggacgtgtcgcgtttgcccattgaatcagctgaaaccactccctgccgtggcctttaatgtgaacaacctgcccttcacagagcccatgctgtctgtctgggctcagttggtgaacctcgctggaagcaagttagaaaagcacaaaataaagaaatcgactaaacaggcctttgcaggacaagtggacctggacctgctgcggcgccagcagttgaagctatacatcctgaaagcaggtcgggcgctgttctcccaccaggataaactgcggcagatcctgtctcagccagctgttcaggagactggaactgttcacacagaacccatggatacggagggctagctgtatatgtttattgctgtggaaacatgaaaacaatgatggagcagtggtatcacctgaccttggggacatgtctcctgaagggccgcagccccccatgatcctcttgcagcagctgctggcctcggccacccagccgtctcctgtgaaggccatatttgataaacaggaacttgagactgctgcactggccgttgtggagtccactcacccttcgagcccaggatttgaagactgcagctccagtgaggccaccacgcctgtcaacgtgcagcacatccgccctgccagagtgaagaggcgcaagcagtcacccgttcccgctctgccgatcgtggtgcagctcatggagatgggatttcccagaaggaacatcgagtttgccctgaagtctctcactggtgcttccgggaatgcgtccggcttgcctggtgtggaagccttggtcgggtggctgctggaccactccgacatacaggtcacggagctctcagatgcagacacggtgtccgacgagtattctgacgaggaggtggtggaggacatggatgatgccgcctactccatgtctactggtgctgttgtgacggagagccagacgtacaaaaaccgagctggtttcttgggtaatgatgattatgctgtatatgtgagagagaatattcaggtgggaatgatggttagatgctgccgaacatacgaagaagtgtgcgaaggtgatgtgatgttggcaaagtcatcaagctggacagagatggattgcatgatctcaatgtgcagtgtgactggcagcagaaagggggcatctactggtttaggtacattcatgtggaacttataggctatcctccaccaagaagttcttctcacatcaagattggtgataaagtgcgggtcaaagcctctgtcaccacaccaaaatacaaatggggatctgtgactcatcagagtgtgggggttgtgaaaggtgtgatggatgtcagatgtttcctatcaatggatccagattcaaatgcagaaactgtgatgactttgatttttgtgaaacgtgtttcaagaccaaaaaacacaataccaggcatacatttggcagaataaatgaaccaggcttcagcagaagaaacacttcctataaatctcgcccaaacaggaaagggtaagtggcctaaaatttttctagtattttcaaaatgacccagttacaataggaaatttcttcttgtactattgtcactaatcccgactcaatatcctttaaaggacaaagatgcatgcataagtaaaaatatgacaggtcacaatcacgccggggtggtcctggggcgaggcccaagttccctgcacgcgtcggcacaagcacgcacactgtgacggggaggacgtttacgtaccatgtccacaccactccagacttggtgagcgccagtaggaactgagctccacactcaatctggcacaccccctgtccatttagtctctcaatgttctggggaatgttgcagccttcacttccgccccggcccaattttccaaagtcaccatcaccccaggaaaataccaaacctaggtttaaaaatagggaagggaagggaagggaagggaagggagagaagaaaggaaagataaagaaagcccaacctccttccaaaatgtcatgagaatcttgagcacatatggtccttggcatgaccacatgacctgcagagcccctgttatagaactcatttttatattttccttagtataacagttaatataatatgtcatttttgttaatagtgtctttttgtcattttactttttaaaagattttattgaaatatacatacaggaaagtgcatctatcataagtgtgcaaattgatgaattctaaaatctttattgtacctgtttagcacctagattgacactgaacataactaacaaccagaaatctccgtgtactcccttcctgtaactacccctgcgcccgaccaaatcactctcttctaacagcataactttgtgtgactagcttttttaatgtcattatatttgtgggattcgtttgtacagttgcatattagtttgcagatccctcactctcatttctatatggtattatattgcataaacgtaccacactttatccaactactgttaaatatttgtgcattttctacttgggggtgatttcaaatagtgctgctatgaacattcttgtaaatgtcttttggtgaacatatgcaacacatatatgcgttgttgttggttcccaggaggggcattcctgggtcataaacaatgcgtgtgttcaggtttagtacagtataatgccaaacaggtttccaaagtgtttgtgccactttacatacctgccattattgaaaaagagttctgtttgctccacattgtcaccaatacttgatattttctgttttttttttcttttaaaccgtactagtgggtgtgcagtgatattgcaatgtggttttaatttgcatcttccttgtgacaaccttgattactgtaagccacttggaaatgtgatttaaattcatataaagatatagtagcaaaacgcatactaggttactttcgtatccagaaagtttagatagaatgatttctatgtaagcttttactgtgtagtctgagtccatgaatattgattacaaaaaacacatctgtaggtgagttacaatacctcacttataattccaaattcatgttgtgttagctcaatatttttcaaataatttttgcatgcaattttcaccttctttctgagtagtttcaggtattttgtatggttccagcagtcagttaggttgccattgtttggaagcacacatccacgtatctgcaccatgatgatatgacacgcccataccccccatttcacattttgtcagaagtgcatagttatcactaactttgccagtagaaatgtactcccaatttcccacggacttatcttgaataatctctccactgaagcataacaggttttgaattctgttagaatagttgtttttactatcttttaattttatacaaatttcaaagttacgtaatacttttatttaaaaagtgaaacaaagcttttcctctcccttacccacatgttagtccagcagagggggaaagcattggccccaggccaaaatcataaacgctttcaattaactaataataattgctggcatgttgccattaaatattcttgtctcattatctctggttgctttatcaaacccataggtcactgaagcccacttttgagacaaagactatttctcccccaaaagtcaagggaaatataaaaaatgaaattagtgattaagaatagaagtcaattaatacaatcattttgtcttaattatttaaagtccagttttttccctccagcaaacctgaaaatacactatcctccagctatcagaattatattgagatctactcacatttatgatgatgttcagagattctcattgggaaggttgttcattgtgttttgggctctctgggtggtcagggctgggctctgggtccttggcaattcctcaggttcccagcactccaaagccaagctcacctcctcatcacacaccctacaggagaagcattagggtgtccgactacgtgggtttcatagctgtggaaaagccaaaggggagactcctgaagaaaggcggtgaagactgtgaagagcgggtcaggaagatgagcacagcactgctactcctgtgggcacagggacagcatgtctccagccagcgccaccttgtttaatacatgggaactcactgaaattcattctgtattttgcccgcaaagttttaaagctttcatccacagtcaggaattaaacttataccaatgagagcctcacacattcaaggatgtactaagcactacaggcctcacagaaacagagatcccatcttggagttttcagtaccacatgggagataaagggttttgaacatgaaatgacaaaaacaacagcaagaagaaaattcttgtcctttttcattactatcagactcaaataaatgtcttggctcttacattacattcattcttcaaccattgtggtctggcttccacttccttcacttcaccaacatggctctgccaaaggaagcccgtgatctctaggccatcactttaattgatctttctacaacatttatcctggttgttaagccctccttacaacattcttctctctttgtttttatagctccatctctcctgcttctttaacttgataatgcatacttgatttttctatttgttatttcataaaccaattaatacacagataaaatgactgtatatcaaaccatgtttgtatagaaaaaatggattttggatgcctctcatatgtaattagttctattaaacatattaattgtattgtttaatttgtcaggtttttgacagaattttgtttacaagtaataaaaattttatctccaattttcaa

SEQ ID NO: 375697 - DNA, 3808 bp, Homo sapiens
ggcacgagccaaactcctacaggatgggcctcctccaggcctaggccgagtgattggtgagctgggagaggacgggtggataagagtccagtgggacacaggcagcaccaactcctacaggatggggaaagaaggaaaatacgacctcaagctggcagagctgccagcccctgcacagccctcagcagaggattcggacacagaggacgactctgaagccgaacaaactgaaaggaacattcaccccactgcaatgatgtttaccagcactattaacttactgcagactctttgtctgtctgctggagttcatgctgagatcatgcagagtgaagccaccaagactttatgcggactgctgcaaatgttagtggaaagcggaacgacggacaagacatcaaacaggctggtgtacagggagcaacaccggagctggtgcacgctggggtttgtgcagagcatcgctctcacgctgcaggtgtgcggcgccctcagctccccgcagtggatcacgctgctcatgaaggttgtggaagggcacgcacccttcactgccacctcgctgcagaggcagatcttagctgtgcatttgttgcaagcagtccttccgtcatgggacaagaccgaaagggtgagggacatgaaatgcctcatggagaagctgtttgacttcttggggagcttgctcactatgtgctcctctgacgtgccgttactcagaggtgggtggccgtctcccttccctgtaccctggtgaagagcggtgcagtgccgtcactcagaggtgggtggccgtctcccttccctgtgtcctggtgaagagcggtgcagtgccgtcactcagaggtgggtggccgtctcccttccctgtaccctggtgaagagcggtgcagtgccgtcactcagaggtgggtggccgtctcccttccctgtgtcctggtgaagagccgtgtagtgccgtcactcagaggtgagtggccgtctcccttccctgtgccctggtgaagagtggtgcagcagcttctcccctggtttcctcctcagagtccacgctgaggcggcgcagggtgtgcccgcaggcctcgctgactgccacccacagcagcacactggcggaggaggtggtggcactgctgcacacgctgcactccctgactcggtggaatgggctcatcaacaagtacatcaactcccagctccgctccatcacccacagctttgcgggaaggccttccaaaggggcccagttagatgactacttccctgattccgagaaccctgaagtggggggcctcatggcggtcctggctgtggttggaggcatcgatggtcgcctgtgcctgggcggccaagttgtgcacgatgactttggagaagtcaccatgactcgcatcaccctgaagggcaaaatcaccgtgcagttctctgacatgcggacgtgtcgcgtttgcccattgaatcagctgaaaccactccctgccgtggcctttaatgtgaacaacctgcccttcacagagcccatgctgtctgtctgggctcagttggtgaacctcgctggaagcaagttagaaaagcacaaaataaagaaatcgactaaacaggcctttgcaggacaagtggacctggacctgctgcggcgccagcagttgaagctatacatcctgaaagcaggtcgggcgctgttctcccaccaggataaactgcggcagatcctgtctcagccagctgttcaggagactggaactgttcacacagaacccatggatacggagggctagctgtatatgtttattgctgtggaaacatgaaaacaatgatggagcagtggtatcacctgaccttggggacatgtctcctgaagggccgcagccccccatgatcctcttgcagcagctgctggcctcggccacccagccgtctcctgtgaaggccatatttgataaacaggaacttgagactgctgcactggccgttgtggagtccactcacccttcgagcccaggatttgaagactgcagctccagtgaggccaccacgcctgtcaacgtgcagcacatccgccctgccagagtgaagaggcgcaagcagtcacccgttcccgctctgccgatcgtggtgcagctcatggagatgggatttcccagaaggaacatcgagtttgccctgaagtctctcactggtgcttccgggaatgcgtccggcttgcctggtgtggaagccttggtcgggtggctgctggaccactccgacatacaggtcacggagctctcagatgcagacacggtgtccgacgagtattctgacgaggaggtggtggaggacatggatgatgccgcctactccatgtctactggtgctgttgtgacggagagccagacgtacaaaaaccgagctggtttcttgggtaatgatgattatgctgtatatgtgagagagaatattcaggtgggaatgatggttagatgctgccgaacatacgaagaagtgtgcgaaggtgatgtgatgttggcaaagtcatcaagctggacagagatggattgcatgatctcaatgtgcagtgtgactggcagcagaaagggggcatctactggtttaggtacattcatgtggaacttataggctatcctccaccaagaagttcttctcacatcaagattggtgataaagtgcgggtcaaagcctctgtcaccacaccaaaatacaaatggggatctgtgactcatcagagtgtgggggttgtgaaaggtgtgatggatgtcagatgtttcctatcaatggatccagattcaaatgcagaaactgtgatgactttgatttttgtgaaacgtgtttcaagaccaaaaaacacaataccaggcatacatttggcagaataaatgaaccaggcttcagcagaagaaacacttcctataaatctcgcccaaacaggaaaggagaagcattagggtgtccgactacgtgggtttcatagctgtggaaaagccaaaggggagactcctgaagaaaggcggtgaagactgtgaagagcgggtcaggaagatgagcacagcactgctactcctgtgggcacagggacagcatgtctccagccagcgccaccttgtttaatacatgggaactcactgaaattcattctgtattttgcccgcaaagttttaaagctttcatccacagtcaggaattaaacttataccaatgagagcctcacacattcaaggatgtactaagcactacaggcctcacagaaacagagatcccatcttggagttttcagtaccacatgggagataaagggttttgaacatgaaatgacaaaaacaacagcaagaagaaaattcttgtcctttttcattactatcagactcaaataaatgtcttggctcttacattacattcattcttcaaccattgtggtctggcttccacttccttcacttcaccaacatggctctgccaaaggaagcccgtgatctctaggccatcactttaattgatctttctacaacatttatcctggttgttaagccctccttacaacattcttctctctttgtttttatagctccatctctcctgcttctttaacttgataatgcatacttgatttttctatttgttatttcataaaccaattaatacacagataaaatgactgtatatcaaaccatgtttgtatagaaaaaatggattttggatgcctctcatatgtaattagttctattaaacatattaattgtattgtttaatttgtcaggtttttgacagaattttgtttacaagtaataaaaattttatctccaattttcaa

SEQ ID NO: 375698 - DNA, 6251 bp, Homo sapiens
ggcacgagccaaactcctacaggatgggcctcctccaggcctaggccgagtgattggtgagctgggagaggacgggtggataagagtccagtgggacacaggcagcaccaactcctacaggatggggaaagaaggaaaatacgacctcaagctggcagagctgccagcccctgcacagccctcagcagaggattcggacacagaggacgactctgaagccgaacaaactgaaaggaacattcaccccactgcaatgatgtttaccagcactattaacttactgcagactctttgtctgtctgctggagttcatgctgagatcatgcagagtgaagccaccaagactttatgcggactgctgcaaatgttagtggaaagcggaacgacggacaagacatcaaacaggctggtgtacagggagcaacaccggagctggtgcacgctggggtttgtgcagagcatcgctctcacgctgcaggtgtgcggcgccctcagctccccgcagtggatcacgctgctcatgaaggttgtggaagggcacgcacccttcactgccacctcgctgcagaggcagatcttagctgtgcatttgttgcaagcagtccttccgtcatgggacaagaccgaaagggtgagggacatgaaatgcctcatggagaagctgtttgacttcttggggagcttgctcactatgtgctcctctgacgtgccgttactcagaggtgggtggccgtctcccttccctgtaccctggtgaagagcggtgcagtgccgtcactcagaggtgggtggccgtctcccttccctgtgtcctggtgaagagcggtgcagtgccgtcactcagaggtgggtggccgtctcccttccctgtaccctggtgaagagcggtgcagtgccgtcactcagaggtgggtggccgtctcccttccctgtgtcctggtgaagagccgtgtagtgccgtcactcagaggtgagtggccgtctcccttccctgtgccctggtgaagagtggtgcagcagcttctcccctggtttcctcctcagagtccacgctgaggcggcgcagggtgtgcccgcaggcctcgctgactgccacccacagcagcacactggcggaggaggtggtggcactgctgcacacgctgcactccctgactcggtggaatgggctcatcaacaagtacatcaactcccagctccgctccatcacccacagctttgcgggaaggccttccaaaggggcccagttagatgactacttccctgattccgagaaccctgaagtggggggcctcatggcggtcctggctgtggttggaggcatcgatggtcgcctgtgcctgggcggccaagttgtgcacgatgactttggagaagtcaccatgactcgcatcaccctgaagggcaaaatcaccgtgcagttctctgacatgcggacgtgtcgcgtttgcccattgaatcagctgaaaccactccctgccgtggcctttaatgtgaacaacctgcccttcacagagcccatgctgtctgtctgggctcagttggtgaacctcgctggaagcaagttagaaaagcacaaaataaagaaatcgactaaacaggcctttgcaggacaagtggacctggacctgctgcggcgccagcagttgaagctatacatcctgaaagcaggtcgggcgctgttctcccaccaggataaactgcggcagatcctgtctcagccagctgttcaggagactggaactgttcacacagaacccatggatacggagggctagctgtatatgtttattgctgtggaaacatgaaaacaatgatggagcagtggtatcacctgaccttggggacatgtctcctgaagggccgcagccccccatgatcctcttgcagcagctgctggcctcggccacccagccgtctcctgtgaaggccatatttgataaacaggaacttgagactgctgcactggccgttgtggagtccactcacccttcgagcccaggatttgaagactgcagctccagtgaggccaccacgcctgtcaacgtgcagcacatccgccctgccagagtgaagaggcgcaagcagtcacccgttcccgctctgccgatcgtggtgcagctcatggagatgggatttcccagaaggaacatcgagtttgccctgaagtctctcactggtgcttccgggaatgcgtccggcttgcctggtgtggaagccttggtcgggtggctgctggaccactccgacatacaggtcacggagctctcagatgcagacacggtgtccgacgagtattctgacgaggaggtggtggaggacatggatgatgccgcctactccatgtctactggtgctgttgtgacggagagccagacgtacaaaaaccgagctggtttcttgggtaatgatgattatgctgtatatgtgagagagaatattcaggtgggaatgatggttagatgctgccgaacatacgaagaagtgtgcgaaggtgatgtgatgttggcaaagtcatcaagctggacagagatggattgcatgatctcaatgtgcagtgtgactggcagcagaaagggggcatctactggtttaggtacattcatgtggaacttataggctatcctccaccaagaagttcttctcacatcaagattggtgataaagtgcgggtcaaagcctctgtcaccacaccaaaatacaaatggggatctgtgactcatcagagtgtgggggttgtgaaaggtgtgatggatgtcagatgtttcctatcaatggatccagattcaaatgcagaaactgtgatgactttgatttttgtgaaacgtgtttcaagaccaaaaaacacaataccaggcatacatttggcagaataaatgaaccaggcttcagcagaagaaacacttcctataaatctcgcccaaacaggaaagggtaagtggcctaaaatttttctagtattttcaaaatgacccagttacaataggaaatttcttcttgtactattgtcactaatcccgactcaatatcctttaaaggacaaagatgcatgcataagtaaaaatatgacaggtcacaatcacgccggggtggtcctggggcgaggcccaagttccctgcacgcgtcggcacaagcacgcacactgtgacggggaggacgtttacgtaccatgtccacaccactccagacttggtgagcgccagtaggaactgagctccacactcaatctggcacaccccctgtccatttagtctctcaatgttctggggaatgttgcagccttcacttccgccccggcccaattttccaaagtcaccatcaccccaggaaaataccaaacctaggtttaaaaatagggaagggaagggaagggaagggaagggagagaagaaaggaaagataaagaaagcccaacctccttccaaaatgtcatgagaatcttgagcacatatggtccttggcatgaccacatgacctgcagagcccctgttatagaactcatttttatattttccttagtataacagttaatataatatgtcatttttgttaatagtgtctttttgtcattttactttttaaaagattttattgaaatatacatacaggaaagtgcatctatcataagtgtgcaaattgatgaattctaaaatctttattgtacctgtttagcacctagattgacactgaacataactaacaaccagaaatctccgtgtactcccttcctgtaactacccctgcgcccgaccaaatcactctcttctaacagcataactttgtgtgactagcttttttaatgtcattatatttgtgggattcgtttgtacagttgcatattagtttgcagatccctcactctcatttctatatggtattatattgcataaacgtaccacactttatccaactactgttaaatatttgtgcattttctacttgggggtgatttcaaatagtgctgctatgaacattcttgtaaatgtcttttggtgaacatatgcaacacatatatgcgttgttgttggttcccaggaggggcattcctgggtcataaacaatgcgtgtgttcaggtttagtacagtataatgccaaacaggtttccaaagtgtttgtgccactttacatacctgccattattgaaaaagagttctgtttgctccacattgtcaccaatacttgatattttctgttttttttttcttttaaaccgtactagtgggtgtgcagtgatattgcaatgtggttttaatttgcatcttccttgtgacaaccttgattactgtaagccacttggaaatgtgatttaaattcatataaagatatagtagcaaaacgcatactaggttactttcgtatccagaaagtttagatagaatgatttctatgtaagcttttactgtgtagtctgagtccatgaatattgattacaaaaaacacatctgtaggtgagttacaatacctcacttataattccaaattcatgttgtgttagctcaatatttttcaaataatttttgcatgcaattttcaccttctttctgagtagtttcaggtattttgtatggttccagcagtcagttaggttgccattgtttggaagcacacatccacgtatctgcaccatgatgatatgacacgcccataccccccatttcacattttgtcagaagtgcatagttatcactaactttgccagtagaaatgtactcccaatttcccacggacttatcttgaataatctctccactgaagcataacaggttttgaattctgttagaatagttgtttttactatcttttaattttatacaaatttcaaagttacgtaatacttttatttaaaaagtgaaacaaagcttttcctctcccttacccacatgttagtccagcagagggggaaagcattggccccaggccaaaatcataaacgctttcaattaactaataataattgctggcatgttgccattaaatattcttgtctcattatctctggttgctttatcaaacccataggtcactgaagcccacttttgagacaaagactatttctcccccaaaagtcaagggaaatataaaaaatgaaattagtgattaagaatagaagtcaattaatacaatcattttgtcttaattatttaaagtccagttttttccctccagcaaacctgaaaatacactatcctccagctatcagaattatattgagatctactcacatttatgatgatgttcagagattctcattgggaaggaaaaggcacacgctgcggcggtcttgcatgactctgttgttgtggaaattcaatttgttcattgtgttttgggctctctgggtggtcagggctgggctctgggtccttggcaattcctcaggttcccagcactccaaagccaagctcacctcctcatcacacaccctacaggagaagcattagggtgtccgactacgtgggtttcatagccgggtcaggaagatgagcacagcactgctactcctgtgggcacagggacagcatgtctccagccagcgccaccttgtttaatacatgggaactcactgaaattcattctgtattttgcccgcaaagttttaaagctttcatccacagtcaggaattaaacttataccaatgagagcctcacacattcaaggatgtactaagcactacaggcctcacagaaacagagatcccatcttggagttttcagtaccacatgggagataaagggttttgaacatgaaatgacaaaaacaacagcaagaagaaaattcttgtcctttttcattactatcagactcaaataaatgtcttggctcttacattacattcattcttcaaccattgtggtctggcttccacttccttcacttcaccaacatggctctgccaaaggaagcccgtgatctctaggccatcactttaattgatctttctacaacatttatcctggttgttaagccctccttacaacattcttctctctttgtttttatagctccatctctcctgcttctttaacttgataatgcatacttgatttttctatttgttatttcataaaccaattaatacacagataaaatgactgtatatcaaaccatgtttgtatagaaaaaatggattttggatgcctctcatatgtaattagttctattaaacatattaattgtattgtttaatttgtcaggtttttgacagaattttgtttacaagtaataaaaattttatctccaattttcaa

SEQ ID NO: 375699 - DNA, 6439 bp, Homo sapiens
ggcacgagccaaactcctacaggatgggcctcctccaggcctaggccgagtgattggtgagctgggagaggacgggtggataagagtccagtgggacacaggcagcaccaactcctacaggatggggaaagaaggaaaatacgacctcaagctggcagagctgccagcccctgcacagccctcagcagaggattcggacacagaggacgactctgaagccgaacaaactgaaaggaacattcaccccactgcaatgatgtttaccagcactattaacttactgcagactctttgtctgtctgctggagttcatgctgagatcatgcagagtgaagccaccaagactttatgcggactgctgcaaatgttagtggaaagcggaacgacggacaagacatcaaacaggctggtgtacagggagcaacaccggagctggtgcacgctggggtttgtgcagagcatcgctctcacgctgcaggtgtgcggcgccctcagctccccgcagtggatcacgctgctcatgaaggttgtggaagggcacgcacccttcactgccacctcgctgcagaggcagatcttagctgtgcatttgttgcaagcagtccttccgtcatgggacaagaccgaaagggtgagggacatgaaatgcctcatggagaagctgtttgacttcttggggagcttgctcactatgtgctcctctgacgtgccgttactcagaggtgggtggccgtctcccttccctgtaccctggtgaagagcggtgcagtgccgtcactcagaggtgggtggccgtctcccttccctgtgtcctggtgaagagcggtgcagtgccgtcactcagaggtgggtggccgtctcccttccctgtaccctggtgaagagcggtgcagtgccgtcactcagaggtgggtggccgtctcccttccctgtgtcctggtgaagagccgtgtagtgccgtcactcagaggtgagtggccgtctcccttccctgtgccctggtgaagagtggtgcagcagcttctcccctggtttcctcctcagagtccacgctgaggcggcgcagggtgtgcccgcaggcctcgctgactgccacccacagcagcacactggcggaggaggtggtggcactgctgcacacgctgcactccctgactcggtggaatgggctcatcaacaagtacatcaactcccagctccgctccatcacccacagctttgcgggaaggccttccaaaggggcccagttagatgactacttccctgattccgagaaccctgaagtggggggcctcatggcggtcctggctgtggttggaggcatcgatggtcgcctgtgcctgggcggccaagttgtgcacgatgactttggagaagtcaccatgactcgcatcaccctgaagggcaaaatcaccgtgcagttctctgacatgcggacgtgtcgcgtttgcccattgaatcagctgaaaccactccctgccgtggcctttaatgtgaacaacctgcccttcacagagcccatgctgtctgtctgggctcagttggtgaacctcgctggaagcaagttagaaaagcacaaaataaagaaatcgactaaacaggcctttgcaggacaagtggacctggacctgctgcggcgccagcagttgaagctatacatcctgaaagcaggtcgggcgctgttctcccaccaggataaactgcggcagatcctgtctcagccagctgttcaggagactggaactgttcacacagaacccatggatacggagggctagctgtatatgtttattgctgtggaaacatgaaaacaatgatggagcagtggtatcacctgaccttggggacatgtctcctgaagggccgcagccccccatgatcctcttgcagcagctgctggcctcggccacccagccgtctcctgtgaaggccatatttgataaacaggaacttgagactgctgcactggccgttgtggagtccactcacccttcgagcccaggatttgaagactgcagctccagtgaggccaccacgcctgtcaacgtgcagcacatccgccctgccagagtgaagaggcgcaagcagtcacccgttcccgctctgccgatcgtggtgcagctcatggagatgggatttcccagaaggaacatcgagtttgccctgaagtctctcactggtgcttccgggaatgcgtccggcttgcctggtgtggaagccttggtcgggtggctgctggaccactccgacatacaggtcacggagctctcagatgcagacacggtgtccgacgagtattctgacgaggaggtggtggaggacatggatgatgccgcctactccatgtctactggtgctgttgtgacggagagccagacgtacaaaaaccgagctggtttcttgggtaatgatgattatgctgtatatgtgagagagaatattcaggtgggaatgatggttagatgctgccgaacatacgaagaagtgtgcgaaggtgatgtgatgttggcaaagtcatcaagctggacagagatggattgcatgatctcaatgtgcagtgtgactggcagcagaaagggggcatctactggtttaggtacattcatgtggaacttataggctatcctccaccaagaagttcttctcacatcaagattggtgataaagtgcgggtcaaagcctctgtcaccacaccaaaatacaaatggggatctgtgactcatcagagtgtgggggttgtgaaaggtgtgatggatgtcagatgtttcctatcaatggatccagattcaaatgcagaaactgtgatgactttgatttttgtgaaacgtgtttcaagaccaaaaaacacaataccaggcatacatttggcagaataaatgaaccaggcttcagcagaagaaacacttcctataaatctcgcccaaacaggaaagggtaagtggcctaaaatttttctagtattttcaaaatgacccagttacaataggaaatttcttcttgtactattgtcactaatcccgactcaatatcctttaaaggacaaagatgcatgcataagtaaaaatatgacaggtcacaatcacgccggggtggtcctggggcgaggcccaagttccctgcacgcgtcggcacaagcacgcacactgtgacggggaggacgtttacgtaccatgtccacaccactccagacttggtgagcgccagtaggaactgagctccacactcaatctggcacaccccctgtccatttagtctctcaatgttctggggaatgttgcagccttcacttccgccccggcccaattttccaaagtcaccatcaccccaggaaaataccaaacctaggtttaaaaatagggaagggaagggaagggaagggaagggagagaagaaaggaaagataaagaaagcccaacctccttccaaaatgtcatgagaatcttgagcacatatggtccttggcatgaccacatgacctgcagagcccctgttatagaactcatttttatattttccttagtataacagttaatataatatgtcatttttgttaatagtgtctttttgtcattttactttttaaaagattttattgaaatatacatacaggaaagtgcatctatcataagtgtgcaaattgatgaattctaaaatctttattgtacctgtttagcacctagattgacactgaacataactaacaaccagaaatctccgtgtactcccttcctgtaactacccctgcgcccgaccaaatcactctcttctaacagcataactttgtgtgactagcttttttaatgtcattatatttgtgggattcgtttgtacagttgcatattagtttgcagatccctcactctcatttctatatggtattatattgcataaacgtaccacactttatccaactactgttaaatatttgtgcattttctacttgggggtgatttcaaatagtgctgctatgaacattcttgtaaatgtcttttggtgaacatatgcaacacatatatgcgttgttgttggttcccaggaggggcattcctgggtcataaacaatgcgtgtgttcaggtttagtacagtataatgccaaacaggtttccaaagtgtttgtgccactttacatacctgccattattgaaaaagagttctgtttgctccacattgtcaccaatacttgatattttctgttttttttttcttttaaaccgtactagtgggtgtgcagtgatattgcaatgtggttttaatttgcatcttccttgtgacaaccttgattactgtaagccacttggaaatgtgatttaaattcatataaagatatagtagcaaaacgcatactaggttactttcgtatccagaaagtttagatagaatgatttctatgtaagcttttactgtgtagtctgagtccatgaatattgattacaaaaaacacatctgtaggtgagttacaatacctcacttataattccaaattcatgttgtgttagctcaatatttttcaaataatttttgcatgcaattttcaccttctttctgagtagtttcaggtattttgtatggttccagcagtcagttaggttgccattgtttggaagcacacatccacgtatctgcaccatgatgatatgacacgcccataccccccatttcacattttgtcagaagtgcatagttatcactaactttgccagtagaaatgtactcccaatttcccacggacttatcttgaataatctctccactgaagcataacaggttttgaattctgttagaatagttgtttttactatcttttaattttatacaaatttcaaagttacgtaatacttttatttaaaaagtgaaacaaagcttttcctctcccttacccacatgttagtccagcagagggggaaagcattggccccaggccaaaatcataaacgctttcaattaactaataataattgctggcatgttgccattaaatattcttgtctcattatctctggttgctttatcaaacccataggtcactgaagcccacttttgagacaaagactatttctcccccaaaagtcaagggaaatataaaaaatgaaattagtgattaagaatagaagtcaattaatacaatcattttgtcttaattatttaaagtccagttttttccctccagcaaacctgaaaatacactatcctccagctatcagaattatattgagatctactcacatttatgatgatgttcagagattctcattgggaaggaaaaggcacacgctgcggcggtcttgcatgactctgttgttgtggaaattcaatttgttcattgtgttttgggctctctgggtggtcagggctgggctctgggtccttggcaattcctcaggttcccagcactccaaagccaagctcacctcctcatcacacaccctacaggagaagcattagggtgtccgactacgtgggtttcatagctgtggaaaagccaaaggggagactcctgaagaaaggcggtgaagactgtgaagagcgggtcaggaagatgagcacagcactgctactcctgtgggcacagggacagcatgtctccagccagcgccaccttgtttaatacatgggaactcactgaaattcattctgtattttgcccgcaaagttttaaagctttcatccacagtcaggaattaaacttataccaatgagagcctcacacattcaaggatgtactaagcactacaggcctcacagaaacagagatcccatcttggagttttcagtaccacatgggagataaagggttttgaacatgaaatgacaaaaacaacagcaagaagaaaattcttgtcctttttcattactatcagactcaaataaatgtcttggctcttacattacattcattcttcaaccattgtggtctggcttccacttccttcacttcaccaacatggctctgccaaaggaagcccgtgatctctaggccatcactttaattgatctttctacaacatttatcctggttgttaagccctccttacaacattcttctctctttgtttttatagctccatctctcctgcttctttaacttgataatgcatacttgatttttctatttgttatttcataaaccaattaatacacagataaaatgactgtatatcaaaccatgtttgtatagaaaaaatggattttggatgcctctcatatgtaattagttctattaaacatattaattgtattgtttaatttgtcaggtttttgacagaattttgtttacaagtaataaaaattttatctccaattttcaaaaaaaaaaactcgagattttttttttttttttgttaaaccactaaagtttattactcatacaaataaaaattcacatttatacagattggtttttaaaaaagggttacttattatttcgggaacatttctgaa

SEQ ID NO: 375700 - DNA, 6725 bp, Homo sapiens
ggcacgagccaaactcctacaggatgggcctcctccaggcctaggccgagtgattggtgagctgggagaggacgggtggataagagtccagtgggacacaggcagcaccaactcctacaggatggggaaagaaggaaaatacgacctcaagctggcagagctgccagcccctgcacagccctcagcagaggattcggacacagaggacgactctgaagccgaacaaactgaaaggaacattcaccccactgcaatgatgtttaccagcactattaacttactgcagactctttgtctgtctgctggagttcatgctgagatcatgcagagtgaagccaccaagactttatgcggactgctgcaaatgttagtggaaagcggaacgacggacaagacatcaaacaggctggtgtacagggagcaacaccggagctggtgcacgctggggtttgtgcagagcatcgctctcacgctgcaggtgtgcggcgccctcagctccccgcagtggatcacgctgctcatgaaggttgtggaagggcacgcacccttcactgccacctcgctgcagaggcagatcttagctgtgcatttgttgcaagcagtccttccgtcatgggacaagaccgaaagggtgagggacatgaaatgcctcatggagaagctgtttgacttcttggggagcttgctcactatgtgctcctctgacgtgccgttactcagaggtgggtggccgtctcccttccctgtaccctggtgaagagcggtgcagtgccgtcactcagaggtgggtggccgtctcccttccctgtgtcctggtgaagagcggtgcagtgccgtcactcagaggtgggtggccgtctcccttccctgtaccctggtgaagagcggtgcagtgccgtcactcagaggtgggtggccgtctcccttccctgtgtcctggtgaagagccgtgtagtgccgtcactcagaggtgagtggccgtctcccttccctgtgccctggtgaagagtggtgcagcagcttctcccctggtttcctcctcagagtccacgctgaggcggcgcagggtgtgcccgcaggcctcgctgactgccacccacagcagcacactggcggaggaggtggtggcactgctgcacacgctgcactccctgactcggtggaatgggctcatcaacaagtacatcaactcccagctccgctccatcacccacagctttgcgggaaggccttccaaaggggcccagttagatgactacttccctgattccgagaaccctgaagtggggggcctcatggcggtcctggctgtggttggaggcatcgatggtcgcctgtgcctgggcggccaagttgtgcacgatgactttggagaagtcaccatgactcgcatcaccctgaagggcaaaatcaccgtgcagttctctgacatgcggacgtgtcgcgtttgcccattgaatcagctgaaaccactccctgccgtggcctttaatgtgaacaacctgcccttcacagagcccatgctgtctgtctgggctcagttggtgaacctcgctggaagcaagttagaaaagcacaaaataaagaaatcgactaaacaggcctttgcaggacaagtggacctggacctgctgcggcgccagcagttgaagctatacatcctgaaagcaggtcgggcgctgttctcccaccaggataaactgcggcagatcctgtctcagccagctgttcaggagactggaactgttcacacagaacccatggatacggagggctagctgtatatgtttattgctgtggaaacatgaaaacaatgatggagcagtggtatcacctgaccttggggacatgtctcctgaagggccgcagccccccatgatcctcttgcagcagctgctggcctcggccacccagccgtctcctgtgaaggccatatttgataaacaggaacttgagactgctgcactggccgttgtggagtccactcacccttcgagcccaggatttgaagactgcagctccagtgaggccaccacgcctgtcaacgtgcagcacatccgccctgccagagtgaagaggcgcaagcagtcacccgttcccgctctgccgatcgtggtgcagctcatggagatgggatttcccagaaggaacatcgagtttgccctgaagtctctcactggtgcttccgggaatgcgtccggcttgcctggtgtggaagccttggtcgggtggctgctggaccactccgacatacaggtcacggagctctcagatgcagacacggtgtccgacgagtattctgacgaggaggtggtggaggacatggatgatgccgcctactccatgtctactggtgctgttgtgacggagagccagacgtacaaaaaccgagctggtttcttgggtaatgatgattatgctgtatatgtgagagagaatattcaggtgggaatgatggttagatgctgccgaacatacgaagaagtgtgcgaaggtgatgtgatgttggcaaagtcatcaagctggacagagatggattgcatgatctcaatgtgcagtgtgactggcagcagaaagggggcatctactggtttaggtacattcatgtggaacttataggctatcctccaccaagaagttcttctcacatcaagattggtgataaagtgcgggtcaaagcctctgtcaccacaccaaaatacaaatggggatctgtgactcatcagagtgtgggggttgtgaaaggtgtgatggatgtcagatgtttcctatcaatggatccagattcaaatgcagaaactgtgatgactttgatttttgtgaaacgtgtttcaagaccaaaaaacacaataccaggcatacatttggcagaataaatgaaccaggcttcagcagaagaaacacttcctataaatctcgcccaaacaggaaagggtaagtggcctaaaatttttctagtattttcaaaatgacccagttacaataggaaatttcttcttgtactattgtcactaatcccgactcaatatcctttaaaggacaaagatgcatgcataagtaaaaatatgacaggtcacaatcacgccggggtggtcctggggcgaggcccaagttccctgcacgcgtcggcacaagcacgcacactgtgacggggaggacgtttacgtaccatgtccacaccactccagacttggtgagcgccagtaggaactgagctccacactcaatctggcacaccccctgtccatttagtctctcaatgttctggggaatgttgcagccttcacttccgccccggcccaattttccaaagtcaccatcaccccaggaaaataccaaacctaggtttaaaaatagggaagggaagggaagggaagggaagggagagaagaaaggaaagataaagaaagcccaacctccttccaaaatgtcatgagaatcttgagcacatatggtccttggcatgaccacatgacctgcagagcccctgttatagaactcatttttatattttccttagtataacagttaatataatatgtcatttttgttaatagtgtctttttgtcattttactttttaaaagattttattgaaatatacatacaggaaagtgcatctatcataagtgtgcaaattgatgaattctaaaatctttattgtacctgtttagcacctagattgacactgaacataactaacaaccagaaatctccgtgtactcccttcctgtaactacccctgcgcccgaccaaatcactctcttctaacagcataactttgtgtgactagcttttttaatgtcattatatttgtgggattcgtttgtacagttgcatattagtttgcagatccctcactctcatttctatatggtattatattgcataaacgtaccacactttatccaactactgttaaatatttgtgcattttctacttgggggtgatttcaaatagtgctgctatgaacattcttgtaaatgtcttttggtgaacatatgcaacacatatatgcgttgttgttggttcccaggaggggcattcctgggtcataaacaatgcgtgtgttcaggtttagtacagtataatgccaaacaggtttccaaagtgtttgtgccactttacatacctgccattattgaaaaagagttctgtttgctccacattgtcaccaatacttgatattttctgttttttttttcttttaaaccgtactagtgggtgtgcagtgatattgcaatgtggttttaatttgcatcttccttgtgacaaccttgattactgtaagccacttggaaatgtgatttaaattcatataaagatatagtagcaaaacgcatactaggttactttcgtatccagaaagtttagatagaatgatttctatgtaagcttttactgtgtagtctgagtccatgaatattgattacaaaaaacacatctgtaggtgagttacaatacctcacttataattccaaattcatgttgtgttagctcaatatttttcaaataatttttgcatgcaattttcaccttctttctgagtagtttcaggtattttgtatggttccagcagtcagttaggttgccattgtttggaagcacacatccacgtatctgcaccatgatgatatgacacgcccataccccccatttcacattttgtcagaagtgcatagttatcactaactttgccagtagaaatgtactcccaatttcccacggacttatcttgaataatctctccactgaagcataacaggttttgaattctgttagaatagttgtttttactatcttttaattttatacaaatttcaaagttacgtaatacttttatttaaaaagtgaaacaaagcttttcctctcccttacccacatgttagtccagcagagggggaaagcattggccccaggccaaaatcataaacgctttcaattaactaataataattgctggcatgttgccattaaatattcttgtctcattatctctggttgctttatcaaacccataggtcactgaagcccacttttgagacaaagactatttctcccccaaaagtcaagggaaatataaaaaatgaaattagtgattaagaatagaagtcaattaatacaatcattttgtcttaattatttaaagtccagttttttccctccagcaaacctgaaaatacactatcctccagctatcagaattatattgagatctactcacatttatgatgatgttcagagattctcattgggaaggaaaaggcacacgctgcggcggtcttgcatgactctgttgttgtggaaattcaatttgttcattgtgttttgggctctctgggtggtcagggctgggctctgggtccttggcaattcctcaggttcccagcactccaaagccaagctcacctcctcatcacacaccctacaggagaagcattagggtgtccgactacgtgggtttcatagctgtggaaaagccaaaggggagactcctgaagaaaggcggtgaagactgtgaagagcgggtcaggaagatgagcacagcactgctactcctgtgggcacagggacagcatgtctccagccagcgccaccttgtttaatacatgggaactcactgaaattcattctgtattttgcccgcaaagttttaaagctttcatccacagtcaggaattaaacttataccaatgagagcctcacacattcaaggatgtactaagcactacaggcctcacagaaacagagatcccatcttggagttttcagtaccacatgggagataaagggttttgaacatgaaatgacaaaaacaacagcaagaagaaaattcttgtcctttttcattactatcagactcaaataaatgtcttggctcttacattacattcattcttcaaccattgtggtctggcttccacttccttcacttcaccaacatggctctgccaaaggaagcccgtgatctctaggccatcactttaattgatctttctacaacatttatcctggttgttaagccctccttacaacattcttctctctttgtttttatagctccatctctcctgcttctttaacttgataatgcatacttgatttttctatttgttatttcataaaccaattaatacacagataaaatgactgtatatcaaaccatgtttgtatagaaaaaatggattttggatgcctctcatatgtaattagttctattaaacatattaattgtattgtttaatttgtcaggtttttgacagaattttgtttacaagtaataaaaattttatctccaattttcaaaaaaaaaaaaaaaaaaaaaaaaaaaaaaaaaaaaaaaaaaaaaaaaaaaaaaaaggagcgaggaggaggagcacgaaaaaaaaaaaaaaacgagggggggcgcgcccgccgaagaggccccccgccggggccgccgagccaagggcgccccccccagggggggcgtaaagggcccgcgggggcggtacaacaccagcggccgcggggcacaaccaccacggcgcggtccctctggcgagaagaaccccccctcctcgcggccacggcgggacaacacaccgcgaccccaacactccgcgagaacaaattcagcgccccacagcacaccacaaaaaccacccacccgctacaggcgtcacccaacgccatcatccgcgcggcaaacgtcgcccccgcgcctccgacacacctctacacga

SEQ ID NO: 375701 - DNA, 6252 bp, Homo sapiens
ggcacgagccaaactcctacaggatgggcctcctccaggcctaggccgagtgattggtgagctgggagaggacgggtggataagagtccagtgggacacaggcagcaccaactcctacaggatggggaaagaaggaaaatacgacctcaagctggcagagctgccagcccctgcacagccctcagcagaggattcggacacagaggacgactctgaagccgaacaaactgaaaggaacattcaccccactgcaatgatgtttaccagcactattaacttactgcagactctttgtctgtctgctggagttcatgctgagatcatgcagagtgaagccaccaagactttatgcggactgctgcaaatgttagtggaaagcggaacgacggacaagacatcaaacaggctggtgtacagggagcaacaccggagctggtgcacgctggggtttgtgcagagcatcgctctcacgctgcaggtgtgcggcgccctcagctccccgcagtggatcacgctgctcatgaaggttgtggaagggcacgcacccttcactgccacctcgctgcagaggcagatcttagctgtgcatttgttgcaagcagtccttccgtcatgggacaagaccgaaagggtgagggacatgaaatgcctcatggagaagctgtttgacttcttggggagcttgctcactatgtgctcctctgacgtgccgttactcagaggtgggtggccgtctcccttccctgtaccctggtgaagagcggtgcagtgccgtcactcagaggtgggtggccgtctcccttccctgtgtcctggtgaagagcggtgcagtgccgtcactcagaggtgggtggccgtctcccttccctgtaccctggtgaagagcggtgcagtgccgtcactcagaggtgggtggccgtctcccttccctgtgtcctggtgaagagccgtgtagtgccgtcactcagaggtgagtggccgtctcccttccctgtgccctggtgaagagtggtgcagcagcttctcccctggtttcctcctcagagtccacgctgaggcggcgcagggtgtgcccgcaggcctcgctgactgccacccacagcagcacactggcggaggaggtggtggcactgctgcacacgctgcactccctgactcggtggaatgggctcatcaacaagtacatcaactcccagctccgctccatcacccacagctttgcgggaaggccttccaaaggggcccagttagatgactacttccctgattccgagaaccctgaagtggggggcctcatggcggtcctggctgtggttggaggcatcgatggtcgcctgtgcctgggcggccaagttgtgcacgatgactttggagaagtcaccatgactcgcatcaccctgaagggcaaaatcaccgtgcagttctctgacatgcggacgtgtcgcgtttgcccattgaatcagctgaaaccactccctgccgtggcctttaatgtgaacaacctgcccttcacagagcccatgctgtctgtctgggctcagttggtgaacctcgctggaagcaagttagaaaagcacaaaataaagaaatcgactaaacaggcctttgcaggacaagtggacctggacctgctgcggcgccagcagttgaagctatacatcctgaaagcaggtcgggcgctgttctcccaccaggataaactgcggcagatcctgtctcagccagctgttcaggagactggaactgttcacacagaacccatggatacggagggctagctgtatatgtttattgctgtggaaacatgaaaacaatgatggagcagtggtatcacctgaccttggggacatgtctcctgaagggccgcagccccccatgatcctcttgcagcagctgctggcctcggccacccagccgtctcctgtgaaggccatatttgataaacaggaacttgagactgctgcactggccgttgtggagtccactcacccttcgagcccaggatttgaagactgcagctccagtgaggccaccacgcctgtcaacgtgcagcacatccgccctgccagagtgaagaggcgcaagcagtcacccgttcccgctctgccgatcgtggtgcagctcatggagatgggatttcccagaaggaacatcgagtttgccctgaagtctctcactggtgcttccgggaatgcgtccggcttgcctggtgtggaagccttggtcgggtggctgctggaccactccgacatacaggtcacggagctctcagatgcagacacggtgtccgacgagtattctgacgaggaggtggtggaggacatggatgatgccgcctactccatgtctactggtgctgttgtgacggagagccagacgtacaaaaaccgagctggtttcttgggtaatgatgattatgctgtatatgtgagagagaatattcaggtgggaatgatggttagatgctgccgaacatacgaagaagtgtgcgaaggtgatgtgatgttggcaaagtcatcaagctggacagagatggattgcatgatctcaatgtgcagtgtgactggcagcagaaagggggcatctactggtttaggtacattcatgtggaacttataggctatcctccaccaagaagttcttctcacatcaagattggtgataaagtgcgggtcaaagcctctgtcaccacaccaaaatacaaatggggatctgtgactcatcagagtgtgggggttgtgaaaggtgtgatggatgtcagatgtttcctatcaatggatccagattcaaatgcagaaactgtgatgactttgatttttgtgaaacgtgtttcaagaccaaaaaacacaataccaggcatacatttggcagaataaatgaaccaggcttcagcagaagaaacacttcctataaatctcgcccaaacaggaaagggtaagtggcctaaaatttttctagtattttcaaaatgacccagttacaataggaaatttcttcttgtactattgtcactaatcccgactcaatatcctttaaaggacaaagatgcatgcataagtaaaaatatgacaggtcacaatcacgccggggtggtcctggggcgaggcccaagttccctgcacgcgtcggcacaagcacgcacactgtgacggggaggacgtttacgtaccatgtccacaccactccagacttggtgagcgccagtaggaactgagctccacactcaatctggcacaccccctgtccatttagtctctcaatgttctggggaatgttgcagccttcacttccgccccggcccaattttccaaagtcaccatcaccccaggaaaataccaaacctaggtttaaaaatagggaagggaagggaagggaagggaagggagagaagaaaggaaagataaagaaagcccaacctccttccaaaatgtcatgagaatcttgagcacatatggtccttggcatgaccacatgacctgcagagcccctgttatagaactcatttttatattttccttagtataacagttaatataatatgtcatttttgttaatagtgtctttttgtcattttactttttaaaagattttattgaaatatacatacaggaaagtgcatctatcataagtgtgcaaattgatgaattctaaaatctttattgtacctgtttagcacctagattgacactgaacataactaacaaccagaaatctccgtgtactcccttcctgtaactacccctgcgcccgaccaaatcactctcttctaacagcataactttgtgtgactagcttttttaatgtcattatatttgtgggattcgtttgtacagttgcatattagtttgcagatccctcactctcatttctatatggtattatattgcataaacgtaccacactttatccaactactgttaaatatttgtgcattttctacttgggggtgatttcaaatagtgctgctatgaacattcttgtaaatgtcttttggtgaacatatgcaacacatatatgcgttgttgttggttcccaggaggggcattcctgggtcataaacaatgcgtgtgttcaggtttagtacagtataatgccaaacaggtttccaaagtgtttgtgccactttacatacctgccattattgaaaaagagttctgtttgctccacattgtcaccaatacttgatattttctgttttttttttcttttaaaccgtactagtgggtgtgcagtgatattgcaatgtggttttaatttgcatcttccttgtgacaaccttgattactgtaagccacttggaaatgtgatttaaattcatataaagatatagtagcaaaacgcatactaggttactttcgtatccagaaagtttagatagaatgatttctatgtaagcttttactgtgtagtctgagtccatgaatattgattacaaaaaacacatctgtaggtgagttacaatacctcacttataattccaaattcatgttgtgttagctcaatatttttcaaataatttttgcatgcaattttcaccttctttctgagtagtttcaggtattttgtatggttccagcagtcagttaggttgccattgtttggaagcacacatccacgtatctgcaccatgatgatatgacacgcccataccccccatttcacattttgtcagaagtgcatagttatcactaactttgccagtagaaatgtactcccaatttcccacggacttatcttgaataatctctccactgaagcataacaggttttgaattctgttagaatagttgtttttactatcttttaattttatacaaatttcaaagttacgtaatacttttatttaaaaagtgaaacaaagcttttcctctcccttacccacatgttagtccagcagagggggaaagcattggccccaggccaaaatcataaacgctttcaattaactaataataattgctggcatgttgccattaaatattcttgtctcattatctctggttgctttatcaaacccataggtcactgaagcccacttttgagacaaagactatttctcccccaaaagtcaagggaaatataaaaaatgaaattagtgattaagaatagaagtcaattaatacaatcattttgtcttaattatttaaagtccagttttttccctccagcaaacctgaaaatacactatcctccagctatcagaattatattgagatctactcacatttatgatgatgttcagagattctcattgggaaggaaaaggcacacgctgcggcggtcttgcatgactctgttgttgtggaaattcaatttgttcattgtgttttgggctctctgggtggtcagggctgggctctgggtccttggcaattcctcaggttcccagcactccaaagccaagctcacctcctcatcacacaccctacaggagaagcattagggtgtccgactacgtgggtttcatagctgtggaaaagccaaaggggagactcctgaagaaaggcggtgaagactgtgaagagcgggtcaggaagatgagcacagcactgctactcctgtgggcacagggacagcatgtctccagccagcgccaccttgtttaatacatgggaactcactgaaattcattctgtattttgcccgcaaagttttaaagctttcatccacagtcaggaattaaacttataccaatgagagcctcacacattcaaggatgtactaagcactacaggcctcacagaaacagagatcccatcttggagttttcagtaccacatgggagataaagggttttgaacatgaaatgacaaaaacaacagcaagaagaaattacattcattcttcaaccattgtggtctggcttccacttccttcacttcaccaacatggctctgccaaaggaagcccgtgatctctaggccatcactttaattgatctttctacaacatttatcctggttgttaagccctccttacaacattcttctctctttgtttttatagctccatctctcctgcttctttaacttgataatgcatacttgatttttctatttgttatttcataaaccaattaatacacagataaaatgactgtatatcaaaccatgtttgtatagaaaaaatggattttggatgcctctcatatgtaattagttctattaaacatattaattgtattgtttaatttgtcaggtttttgacagaattttgtttacaagtaataaaaattttatctccaattttcaa

SEQ ID NO: 375702 - DNA, 6119 bp, Homo sapiens
ggcacgagccaaactcctacaggatgggcctcctccaggcctaggccgagtgattggtgagctgggagaggacgggtggataagagtccagtgggacacaggcagcaccaactcctacaggatggggaaagaaggaaaatacgacctcaagctggcagagctgccagcccctgcacagccctcagcagaggattcggacacagaggacgactctgaagccgaacaaactgaaaggaacattcaccccactgcaatgatgtttaccagcactattaacttactgcagactctttgtctgtctgctggagttcatgctgagatcatgcagagtgaagccaccaagactttatgcggactgctgcaaatgttagtggaaagcggaacgacggacaagacatcaaacaggctggtgtacagggagcaacaccggagctggtgcacgctggggtttgtgcagagcatcgctctcacgctgcaggtgtgcggcgccctcagctccccgcagtggatcacgctgctcatgaaggttgtggaagggcacgcacccttcactgccacctcgctgcagaggcagatcttagctgtgcatttgttgcaagcagtccttccgtcatgggacaagaccgaaagggtgagggacatgaaatgcctcatggagaagctgtttgacttcttggggagcttgctcactatgtgctcctctgacgtgccgttactcagaggtgggtggccgtctcccttccctgtaccctggtgaagagcggtgcagtgccgtcactcagaggtgggtggccgtctcccttccctgtgtcctggtgaagagcggtgcagtgccgtcactcagaggtgggtggccgtctcccttccctgtaccctggtgaagagcggtgcagtgccgtcactcagaggtgggtggccgtctcccttccctgtgtcctggtgaagagccgtgtagtgccgtcactcagaggtgagtggccgtctcccttccctgtgccctggtgaagagtggtgcagcagcttctcccctggtttcctcctcagagtccacgctgaggcggcgcagggtgtgcccgcaggcctcgctgactgccacccacagcagcacactggcggaggaggtggtggcactgctgcacacgctgcactccctgactcggtggaatgggctcatcaacaagtacatcaactcccagctccgctccatcacccacagctttgcgggaaggccttccaaaggggcccagttagatgactacttccctgattccgagaaccctgaagtggggggcctcatggcggtcctggctgtggttggaggcatcgatggtcgcctgtgcctgggcggccaagttgtgcacgatgactttggagaagtcaccatgactcgcatcaccctgaagggcaaaatcaccgtgcagttctctgacatgcggacgtgtcgcgtttgcccattgaatcagctgaaaccactccctgccgtggcctttaatgtgaacaacctgcccttcacagagcccatgctgtctgtctgggctcagttggtgaacctcgctggaagcaagttagaaaagcacaaaataaagaaatcgactaaacaggcctttgcaggacaagtggacctggacctgctgcggcgccagcagttgaagctatacatcctgaaagcaggtcgggcgctgttctcccaccaggataaactgcggcagatcctgtctcagccagctgttcaggagactggaactgttcacacagaacccatggatacggagggctagctgtatatgtttattgctgtggaaacatgaaaacaatgatggagcagtggtatcacctgaccttggggacatgtctcctgaagggccgcagccccccatgatcctcttgcagcagctgctggcctcggccacccagccgtctcctgtgaaggccatatttgataaacaggaacttgagactgctgcactggccgttgtggagtccactcacccttcgagcccaggatttgaagactgcagctccagtgaggccaccacgcctgtcaacgtgcagcacatccgccctgccagagtgaagaggcgcaagcagtcacccgttcccgctctgccgatcgtggtgcagctcatggagatgggatttcccagaaggaacatcgagtttgccctgaagtctctcactggtgcttccgggaatgcgtccggcttgcctggtgtggaagccttggtcgggtggctgctggaccactccgacatacaggtcacggagctctcagatgcagacacggtgtccgacgagtattctgacgaggaggtggtggaggacatggatgatgccgcctactccatgtctactggtgctgttgtgacggagagccagacgtacaaaaaccgagctggtttcttgggtaatgatgattatgctgtatatgtgagagagaatattcaggtgggaatgatggttagatgctgccgaacatacgaagaagtgtgcgaaggtgatgtgatgttggcaaagtcatcaagctggacagagatggattgcatgatctcaatgtgcagtgtgactggcagcagaaagggggcatctactggtttaggtacattcatgtggaacttataggctatcctccaccaagaagttcttctcacatcaagattggtgataaagtgcgggtcaaagcctctgtcaccacaccaaaatacaaatggggatctgtgactcatcagagtgtgggggttgtgaaaggtgtgatggatgtcagatgtttcctatcaatggatccagattcaaatgcagaaactgtgatgactttgatttttgtgaaacgtgtttcaagaccaaaaaacacaataccaggcatacatttggcagaataaatgaaccaggcttcagcagaagaaacacttcctataaatctcgcccaaacaggaaagggtaagtggcctaaaatttttctagtattttcaaaatgacccagttacaataggaaatttcttcttgtactattgtcactaatcccgactcaatatcctttaaaggacaaagatgcatgcataagtaaaaatatgacaggtcacaatcacgccggggtggtcctggggcgaggcccaagttccctgcacgcgtcggcacaagcacgcacactgtgacggggaggacgtttacgtaccatgtccacaccactccagacttggtgagcgccagtaggaactgagctccacactcaatctggcacaccccctgtccatttagtctctcaatgttctggggaatgttgcagccttcacttccgccccggcccaattttccaaagtcaccatcaccccaggaaaataccaaacctaggtttaaaaatagggaagggaagggaagggaagggaagggagagaagaaaggaaagataaagaaagcccaacctccttccaaaatgtcatgagaatcttgagcacatatggtccttggcatgaccacatgacctgcagagcccctgttatagaactcatttttatattttccttagtataacagttaatataatatgtcatttttgttaatagtgtctttttgtcattttactttttaaaagattttattgaaatatacatacaggaaagtgcatctatcataagtgtgcaaattgatgaattctaaaatctttattgtacctgtttagcacctagattgacactgaacataactaacaaccagaaatctccgtgtactcccttcctgtaactacccctgcgcccgaccaaatcactctcttctaacagcataactttgtgtgactagcttttttaatgtcattatatttgtgggattcgtttgtacagttgcatattagtttgcagatccctcactctcatttctatatggtattatattgcataaacgtaccacactttatccaactactgttaaatatttgtgcattttctacttgggggtgatttcaaatagtgctgctatgaacattcttgtaaatgtcttttggtgaacatatgcaacacatatatgcgttgttgttggttcccaggaggggcattcctgggtcataaacaatgcgtgtgttcaggtttagtacagtataatgccaaacaggtttccaaagtgtttgtgccactttacatacctgccattattgaaaaagagttctgtttgctccacattgtcaccaatacttgatattttctgttttttttttcttttaaaccgtactagtgggtgtgcagtgatattgcaatgtggttttaatttgcatcttccttgtgacaaccttgattactgtaagccacttggaaatgtgatttaaattcatataaagatatagtagcaaaacgcatactaggttactttcgtatccagaaagtttagatagaatgatttctatgtaagcttttactgtgtagtctgagtccatgaatattgattacaaaaaacacatctgtaggtgagttacaatacctcacttataattccaaattcatgttgtgttagctcaatatttttcaaataatttttgcatgcaattttcaccttctttctgagtagtttcaggtattttgtatggttccagcagtcagttaggttgccattgtttggaagcacacatccacgtatctgcaccatgatgatatgacacgcccataccccccatttcacattttgtcagaagtgcatagttatcactaactttgccagtagaaatgtactcccaatttcccacggacttatcttgaataatctctccactgaagcataacaggttttgaattctgttagaatagttgtttttactatcttttaattttatacaaatttcaaagttacgtaatacttttatttaaaaagtgaaacaaagcttttcctctcccttacccacatgttagtccagcagagggggaaagcattggccccaggccaaaatcataaacgctttcaattaactaataataattgctggcatgttgccattaaatattcttgtctcattatctctggttgctttatcaaacccataggtcactgaagcccacttttgagacaaagactatttctcccccaaaagtcaagggaaatataaaaaatgaaattagtgattaagaatagaagtcaattaatacaatcattttgtcttaattatttaaagtccagttttttccctccagcaaacctgaaaatacactatcctccagctatcagaattatattgagatctactcacatttatgatgatgttcagagattctcattgggaaggaaaaggcacacgctgcggcggtcttgcatgactctgttgttgtggaaattcaatttgttcattgtgttttgggctctctgggtggtcagggctgggctctgggtccttggcaattcctcaggttcccagcactccaaagccaagctcacctcctcatcacacaccctacaggagaagcattagggtgtccgactacgtgggtttcatagctgtggaaaagccaaaggggagactcctgaagaaaggcggtgaagactgtgaagagcgggtcaggaagatgagcacagcactgctactcctgtgggcacagggacagcatgtctccagccagcgccaccttgtttaatacatgggaactcactgaaattcattctgtattttgcccgcaaagttttaaagctttcatccacagtcaggaattaaacttataccaatgagagcctcacacattcaaggatgtactaagcactacaggcctcacagaaacagagatcccatcttggagttttcagtaccacatgggagataaagggttttgaacatgaaatgacaaaaacaacagcaagaagaaaattcttgtcctttttcattactatcagactcaaataaatgtcttggctcttacattacattcattcttcaaccattgtggtctggcttccacttccttcacttcaccaacatggctctgccaaaggaagcccgtgatctctaggccatcactttaattgatctttctacaacatttatcctggttgttaagccctccttacaacattcttctctctttgtttttatagctccatctctcctgcttctttaacttgataatgcaggagagatggagctaaaaaaaaaa

SEQ ID NO: 375703 - DNA, 3463 bp, Homo sapiens
ggcacgagccaaactcctacaggatgggcctcctccaggcctaggccgagtgattggtgagctgggagaggacgggtggataagagtccagtgggacacaggcagcaccaactcctacaggatggggaaagaaggaaaatacgacctcaagctggcagagctgccagcccctgcacagccctcagcagaggattcggacacagaggacgactctgaagccgaacaaactgaaaggaacattcaccccactgcaatgatgtttaccagcactattaacttactgcagactctttgtctgtctgctggagttcatgctgagatcatgcagagtgaagccaccaagactttatgcggactgctgcaaatgttagtggaaagcggaacgacggacaagacatcaaacaggctggtgtacagggagcaacaccggagctggtgcacgctggggtttgtgcagagcatcgctctcacgctgcaggtgtgcggcgccctcagctccccgcagtggatcacgctgctcatgaaggttgtggaagggcacgcacccttcactgccacctcgctgcagaggcagatcttagctgtgcatttgttgcaagcagtccttccgtcatgggacaagaccgaaagggtgagggacatgaaatgcctcatggagaagctgtttgacttcttggggagcttgctcactatgtgctcctctgacgtgccgttactcagaggtgggtggccgtctcccttccctgtaccctggtgaagagcggtgcagtgccgtcactcagaggtgggtggccgtctcccttccctgtgtcctggtgaagagcggtgcagtgccgtcactcagaggtgggtggccgtctcccttccctgtaccctggtgaagagcggtgcagtgccgtcactcagaggtgggtggccgtctcccttccctgtgtcctggtgaagagccgtgtagtgccgtcactcagaggtgagtggccgtctcccttccctgtgccctggtgaagagtggtgcagcagcttctcccctggtttcctcctcagagtccacgctgaggcggcgcagggtgtgcccgcaggcctcgctgactgccacccacagcagcacactggcggaggaggtggtggcactgctgcacacgctgcactccctgactcggtggaatgggctcatcaacaagtacatcaactcccagctccgctccatcacccacagctttgcgggaaggccttccaaaggggcccagttagatgactacttccctgattccgagaaccctgaagtggggggcctcatggcggtcctggctgtggttggaggcatcgatggtcgcctgtgcctgggcggccaagttgtgcacgatgactttggagaagtcaccatgactcgcatcaccctgaagggcaaaatcaccgtgcagttctctgacatgcggacgtgtcgcgtttgcccattgaatcagctgaaaccactccctgccgtggcctttaatgtgaacaacctgcccttcacagagcccatgctgtctgtctgggctcagttggtgaacctcgctggaagcaagttagaaaagcacaaaataaagaaatcgactaaacaggcctttgcaggacaagtggacctggacctgctgcggcgccagcagttgaagctatacatcctgaaagcaggtcgggcgctgttctcccaccaggataaactgcggcagatcctgtctcagccagctgttcaggagactggaactgttcacacagaacccatggatacggagggctagctgtatatgtttattgctgtggaaacatgaaaacaatgatggagcagtggtatcacctgaccttggggacatgtctcctgaagggccgcagccccccatgatcctcttgcagcagctgctggcctcggccacccagccgtctcctgtgaaggccatatttgataaacaggaacttgagactgctgcactggccgttgtggagtccactcacccttcgagcccaggatttgaagactgcagctccagtgaggccaccacgcctgtcaacgtgcagcacatccgccctgccagagtgaagaggcgcaagcagtcacccgttcccgctctgccgatcgtggtgcagctcatggagatgggatttcccagaaggaacatcgagtttgccctgaagtctctcactggtgcttccgggaatgcgtccggcttgcctggtgtggaagccttggtcgggtggctgctggaccactccgacatacaggtcacggagctctcagatgcagacacggtgtccgacgagtattctgacgaggaggtggtggaggacatggatgatgccgcctactccatgtctactggtgctgttgtgacggagagccagacgtacaaaaaccgagctggtttcttgggtaatgatgattatgctgtatatgtgagagagaatattcaggtgggaatgatggttagatgctgccgaacatacgaagaagtgtgcgaaggtgatgtgatgttggcaaagtcatcaagctggacagagatggattgcatgatctcaatgtgcagtgtgactggcagcagaaagggggcatctactggtttaggtacattcatgtggaacttataggctatcctccaccaagaagttcttctcacatcaagattggtgataaagtgcgggtcaaagcctctgtcaccacaccaaaatacaaatggggatctgtgactcatcagagtgtgggggttgtgaaaggtgtgatggatgtcagatgtttcctatcaatggatccagattcaaatgcagaaactgtgatgactttgatttttgtgaaacgtgtttcaagaccaaaaaacacaataccaggcatacatttggcagaataaatgaaccaggtatggcagaatgtttatattctctcttccaccaaatattaatgaaatacttattgtggaccacagtgtactggaatttgttattttaaggttcctttgcatatggtaattctgtagagtgagtacagtgagacggaagtgacggtcctacccgctgatgactggctggctttttaaaaaaatcaggatggggtatcggggaagaattagaataactaggcttgtttgcttgtttttccataaagaaacattaaaagaatctcaagaaactagtaagtgtttagttgcgtggcatgtggaattggttagatggagagtgagtgttttaatttgtataccttttattatatttttcattgtggcaaaatatatttaacttaaaattagccacttagtcattttctaagtttataattcagggtattaagtaccttaagtacagtgttgcacaaccatcacaactttctcttaccaaaacttttcaccactccgatcagaaactctgtacccattaagcaatttaactgccctacttccccttaccccaaccctggtaaccttgaatctaactttggtct

SEQ ID NO: 375704 - DNA, 2526 bp, Homo sapiens
ggcacgagccaaactcctacaggatgggcctcctccaggcctaggccgagtgattggtgagctgggagaggacgggtggataagagtccagtgggacacaggcagcaccaactcctacaggatggggaaagaaggaaaatacgacctcaagctggcagagctgccagcccctgcacagccctcagcagaggattcggacacagaggacgactctgaagccgaacaaactgaaaggaacattcaccccactgcaatgatgtttaccagcactattaacttactgcagactctttgtctgtctgctggagttcatgctgagatcatgcagagtgaagccaccaagactttatgcggactgctgcaaatgttagtggaaagcggaacgacggacaagacatcaaacaggctggtgtacagggagcaacaccggagctggtgcacgctggggtttgtgcagagcatcgctctcacgctgcaggtgtgcggcgccctcagctccccgcagtggatcacgctgctcatgaaggttgtggaagggcacgcacccttcactgccacctcgctgcagaggcagatcttagctgtgcatttgttgcaagcagtccttccgtcatgggacaagaccgaaagggtgagggacatgaaatgcctcatggagaagctgtttgacttcttggggagcttgctcactatgtgctcctctgacgtgccgttactcagaggtgggtggccgtctcccttccctgtaccctggtgaagagcggtgcagtgccgtcactcagaggtgggtggccgtctcccttccctgtgtcctggtgaagagcggtgcagtgccgtcactcagaggtgggtggccgtctcccttccctgtaccctggtgaagagcggtgcagtgccgtcactcagaggtgggtggccgtctcccttccctgtgtcctggtgaagagccgtgtagtgccgtcactcagaggtgagtggccgtctcccttccctgtgccctggtgaagagtggtgcagcagcttctcccctggtttcctcctcagagtccacgctgaggcggcgcagggtgtgcccgcaggcctcgctgactgccacccacagcagcacactggcggaggaggtggtggcactgctgcacacgctgcactccctgactcggtggaatgggctcatcaacaagtacatcaactcccagctccgctccatcacccacagctttgcgggaaggccttccaaaggggcccagttagatgactacttccctgattccgagaaccctgaagtggggggcctcatggcggtcctggctgtggttggaggcatcgatggtcgcctgtgcctgggcggccaagttgtgcacgatgactttggagaagtcaccatgactcgcatcaccctgaagggcaaaatcaccgtgcagttctctgacatgcggacgtgtcgcgtttgcccattgaatcagctgaaaccactccctgccgtggcctttaatgtgaacaacctgcccttcacagagcccatgctgtctgtctgggctcagttggtgaacctcgctggaagcaagttagaaaagcacaaaataaagaaatcgactaaacaggcctttgcaggacaagtggacctggacctgctgcggcgccagcagttgaagctatacatcctgaaagcaggtcgggcgctgttctcccaccaggataaactgcggcagatcctgtctcagccagctgttcaggagactggaactgttcacacagatgatggagcagtggtatcacctgaccttggggacatgtctcctgaagggccgcagccccccatgatcctcttgcagcagctgctggcctcggccacccagccgtctcctgtgaaggccatatttgataaacaggaacttgaggtacagccatgcagccttgacagtttttaatccacagcactaaattgtgaacactttttttctagatgtatattttcttaaggatctattctgaatgttaaatgatagtacgcaaataattctaatgattcattggggtttaaccatgtttgtgcatagtctgcagaacattataatactaaagactgagagggttgaagtttaaccttattttgggtttgtgtaaattgtgaaaaaatattaactagatgcagcatgggttaaacgctcacatcttcatgaagggatctttttccaggaagtagaattattcaaagaggctcgtcaggactctggcagccgtttgtctgtttcattcactcaggagcctcttgggggtgctctggtgccgccagcctctccgctctctccatgctgtggagcaggtgagggcagcagcgaggcacagggtcagggctacgggacgttcgcatagaggaggcgacgtgattgagtgtaagagggatgggagctttcatggctggcaacatagaggattagagatgttcattccaaaatctttcttgctgtgtaatacattaaaaatctggacaaatatcagagacaaaaataaaactatcagtactca

SEQ ID NO: 375705 - DNA, 1945 bp, Homo sapiens
ggcacgagccaaactcctacaggatgggcctcctccaggcctaggccgagtgattggtgagctgggagaggacgggtggataagagtccagtgggacacaggcagcaccaactcctacaggatggggaaagaaggaaaatacgacctcaagctggcagagctgccagcccctgcacagccctcagcagaggattcggacacagaggacgactctgaagccgaacaaactgaaaggaacattcaccccactgcaatgatgtttaccagcactattaacttactgcagactctttgtctgtctgctggagttcatgctgagatcatgcagagtgaagccaccaagactttatgcggactgctgcaaatgttagtggaaagcggaacgacggacaagacatcaaacaggctggtgtacagggagcaacaccggagctggtgcacgctggggtttgtgcagagcatcgctctcacgctgcaggtgtgcggcgccctcagctccccgcagtggatcacgctgctcatgaaggttgtggaagggcacgcacccttcactgccacctcgctgcagaggcagatcttagctgtgcatttgttgcaagcagtccttccgtcatgggacaagaccgaaagggtgagggacatgaaatgcctcatggagaagctgtttgacttcttggggagcttgctcactatgtgctcctctgacgtgccgttactcagaggtgggtggccgtctcccttccctgtaccctggtgaagagcggtgcagtgccgtcactcagaggtgggtggccgtctcccttccctgtgtcctggtgaagagcggtgcagtgccgtcactcagaggtgggtggccgtctcccttccctgtaccctggtgaagagcggtgcagtgccgtcactcagaggtgggtggccgtctcccttccctgtgtcctggtgaagagccgtgtagtgccgtcactcagaggtgagtggccgtctcccttccctgtgccctggtgaagagtggtgcagcagcttctcccctggtttcctcctcagagtccacgctgaggcggcgcagggtgtgcccgcaggcctcgctgactgccacccacagcagcacactggcggaggaggtggtggcactgctgcacacgctgcactccctgactcggtggaatgggctcatcaacaagtacatcaactcccagctccgctccatcacccacagctttgcgggaaggccttccaaaggggcccagttagatgactacttccctgattccgagaaccctgaagtggggggcctcatggcggtcctggctgtggttggaggcatcgatggtcgcctgtgcctgggcggccaagttgtgcacgatgactttggagaagtcaccatgactcgcatcaccctgaagggcaaaatcaccgtgcagttctctgacatgcggacgtgtcgcgtttgcccattgaatcagctgaaaccagtaggtgaacttgtgcttagttactgcatgataagggaaattgactttacactagaaccgagcaccaacatcagcacttgaaagaacttgattctggtacttgaagtttgccttccaggaagctgtgcgagcttgtgcttctgtggtaagcagggcctgtctcacagggcacttaaagcagtggttcgtgtgtatttcagcctcagagacacgaagagggctttagcaacctagaaggtaccgtgcatctatgaggtagttctaattattttaaaatgtgaatttatgaagtttactttttattcaacaactcaagttttaaaaaaacaaacatgtttaaacacctttaaaaaaacagcctttcttcatgtagaaaatgcttagtagttttgagtgacgtgacttaatgtagcagctactgtcatcttaatctgtgaatcaaggatgcacagggagaaggagccatttacatt

SEQ ID NO: 375706 - DNA, 553 bp, Homo sapiens
gagtactgttacagatgttcacaaatacaagtggttgaagcagaatgtgcagggtctttatccgcagtctccactcctcagtacaattgctgaatttgcccttaaagaagagccagtggatgtggaaaagagaaagtgcctactaaaacaggtaacatttgatgagaaatgcttctctgcattgggtaatatacataacacttaactgtatgcattgatattttgcagttggagagagcagaggttcgcctggaagggatagatacaattttaaaattgtatctggtgagcaagaatttcttacttccatctgtgccgtatgcgatgttttgtggatggcaaagacttattcctgagggaatcgatataggtaaaacgttagcatatttttttcttaattaaggaagctgtggcaacagaatgtttttctgtaacagttagaagtctggcagtgtcccaagtcaaattctttatctttatttgaaagggaacctcttactgattgtttaaaggatgttgatttgatcccgccttttaatcggatgctgctgga

SEQ ID NO: 375707 - DNA, 1080 bp, Homo sapiens
agcggaaagcgcccgctgctgtctcggctgccgcgggcgagagcggccgagtccccgccccgccacttccggtcccgccgccgggagccggtgcggctgtgaggggccgcgtctcgcagcagccgcccggaccgggcatggtgttgggcgccgggcccgcctcgcctgtctcggggagcccagggtaaaggcagcagtaatgctaacgctagcaagtaaactgaagcgtgacgatggtctcaaagggtcccggacggcagccacagcgtccgactcgactcggagggtttctgtgagagacaaattgcttgttaaagaggttgcagaacttgaagctaatttaccttgtacatgtaaagtgcattttcctgatccaaacaagcttcattgttttcagctaacagtaaccccagatgagggttactaccagggtggaaaatttcagtttgaaactgaagttcccgatgcgtacaacatggtggatcttttgaattttgatgatccactgaatattgaagctgcagaacatcatttgcgggacaaggaggacttccggaataaagtggatgactacatcaaacgttatgccagatgataaaaggggacgattgcaggcccatggactgtgttacagtttgtctctaacatgaaacagcaagagcttatgtcagggccagatggaaatgacagtgcctactccaagagttccccatgctgggaaagagaacacctgtgaacagggcctccatgcacagccaactggggtgagaattctatttggtgcacgtgctattgtgtccggaattggtgggttcttggtctcactgacttcaagaatgaagccgcggaccctcgcggaaagtttatatggactataatgcaacgactcccctggagccagaagttatccaggccatgaccaaggccatgtgggaagcctggggaaatcccagcagcccgtattcagcaggaagaaaggccaaggatattataaatgcagctcgggaaagcctcgcgaagatgataggggggaaacctcaagatataatcttcacttccgggggcactgaggtaaagctt

SEQ ID NO: 375708 - DNA, 2014 bp, Homo sapiens
agcggaaagcgcccgctgctgtctcggctgccgcgggcgagagcggccgagtccccgccccgccacttccggtcccgccgccgggagccggtgcggctgtgaggggccgcgtctcgcagcagccgcccggaccgggcatggtgttgggcgccgggcccgcctcgcctgtctcggggagcccagggtaaaggcagcagtaatgctaacgctagcaagtaaactgaagcgtgacgatggtctcaaagggtcccggacggcagccacagcgtccgactcgactcggagggtttctgtgagagacaaattgcttgttaaagaggttgcagaacttgaagctaatttaccttgtacatgtaaagtgcattttcctgatccaaacaagcttcattgttttcagctaacagtaaccccagatgagggttactaccagggtggaaaatttcagtttgaaactgaagttcccgatgcgtacaacatggtgcctcccaaagtgaaatgcctgaccaagatctggcaccccaacatcacagagacaggggaaatatgtctgagtttattgagagaacattcaattgatggcactggctgggctcccacaagaacattaaaggatgtcgtttggggattaaactctttgtttactgatcttttgaattttgatgatccactgaatattgaagctgcagaacatcatttgcgggacaaggaggacttccggaataaagtggatgactacatcaaacgttatgccagatgataaaaggggacgattgcaggcccatggactgtgttacagtttgtctctaacatgaaacagcaagaggtagccccctctcccgtcctcatgctccctctcagtcccctggattgccccagtcctgtgaccatgttgccctgaagaagaccatcttcatgactgctcattgtagatggagaattcaacataaatacagcaagaaaatgtgtttgggcttctgaagagttgtctgcttaccttaacatgtttacttttttgaacttgtactgtataggctgttggtgaaattcttaagaagttgtaatgaactcaaaattgaggccagagcttgctttcccttttcccaaacaaaattggttttctgcacaagcgatgctaatgatgtgttcagtgtaactcgcagattggcaataagatacccgctacaaactgtgattggatgcaaaatctcttagcttctttcacgaatgttggccctgcctagatgttgtgaagcctcccagaatgcatagagtcattcactgtagatctcttattgaaatgcgtattttatttaatgtaagtatattttggaacagatttgtaatttgtacaattcaatgctttaattattttttctattctcatttagtttgtattttcattgtatagagcagacagaaagatgttgggtcaagcaactattgaagagaaatacaaagaaaatatgaaaggcacattattcattttgtccaaatgcaatgagaatctcactcttaaaaatcagctcttgctttcgggtccggatgtggtgagcacattttggagccctttgaagctagatttggatgatcaaaacaaaaaggcagggagcccattctaacatgctgcccagaggaaactggctggagcctggaccagctggggctgatgcttttgcagtggtcatgtgattgtgacctggtagctacttatcagagagccagaccctgctgtcctgggagacaggagcgatgcctcaggaatcagcccaatgtctgatgtcactgagactgtacctgtggccttcttctgagtttgctatggctccaggccctgccggtggggtgagcctcctaggccttggaggaccaggagtcaacagtggcatatgccatcctcggccaggttaatatactgcagaggaaaagccctgaagagaggcaagtggatttactccagcatgtagacatttgaaccagtgaaatcaaacacaaaataaatgtctgtctagtttca

SEQ ID NO: 375709 - DNA, 2230 bp, Homo sapiens
agcggaaagcgcccgctgctgtctcggctgccgcgggcgagagcggccgagtccccgccccgccacttccggtcccgccgccgggagccggtgcggctgtgaggggccgcgtctcgcagcagccgcccggaccgggcatggtgttgggcgccgggcccgcctcgcctgtctcggggagcccagggtaaaggcagcagtaatgctaacgctagcaagtaaactgaagcgtgacgatggtctcaaagggtcccggacggcagccacagcgtccgactcgactcggagggtttctgtgagagacaaattgcttgttaaagaggttgcagaacttgaagctaatttaccttgtacatgtaaagtgcattttcctgatccaaacaagcttcattgttttcagctaacagtaaccccagatgagggttactaccagggtggaaaatttcagtttgaaactgaagttcccgatgcgtacaacatggtgcctcccaaagtgaaatgcctgaccaagatctggcaccccaacatcacagagacaggggaaatatgtctgagtttattgagagaacattcaattgatggcactggctgggctcccacaagaacattaaaggatgtcgtttggggattaaactctttgtttactgatcttttgaattttgatgatccactgaatattgaagctgcagaacatcatttgcgggacaaggaggacttccggaataaagtggatgactacatcaaacgttatgccagatgataaaaggggacgattgcaggcccatggactgtgttacagtttgtctctaacatgaaacagcaagaggtagccccctctcccgtcctcatgctccctctcagtcccctggattgccccagtcctgtgaccatgttgccctgaagaagaccatcttcatgactgctcattgtagatggagaattcaacataaatacagcaagaaaatgtgtttgggcttctgaagagttgtctgcttaccttaacatgtttacttttttgaacttgtactgtataggctgttggtgaaattcttaagaagttgtaatgaactcaaaattgaggccagagcttgctttcccttttcccaaacaaaattggttttctgcacaagcgatgctaatgatgtgttcagtgtaactcgcagattggcaataagatacccgctacaaactgtgattggatgcaaaatctcttagcttctttcacgaatgttggccctgcctagatgttgtgaagcctcccagaatgcatagagtcattcactgtagatctcttattgaaatgcgtattttatttaatgtaagtatattttggaacagatttgtaatttgtacaattcaatgctttaattattttttctattctcatttagtttgtattttcattgtatagagcagacagaaagatgttgggtcaagcaactattgaagagaaatacaaagaaaatatgaaaggcacattattcattttgtccaaatgcaatgagaatctcactcttaaaaatcagctcttgctttcgggtccggatgtggtgagcacattttggagccctttgaagctagatttggatgatcaaaacaaaaaggcagggagcccattctaacatgctgcccagaggaaactggctggagcctggaccagctggggctgatgcttttgcagtggtcatgtgattgtgacctggtagctacttatcagagagccagaccctgctgtcctgggagacaggagcgatgcctcaggaatcagcccaatgtctgatgtcactgagactgtacctgtggccttcttctgagtttgctatggctccaggccctgccggtggggtgagcctcctaggccttggaggaccaggagtcaacagtggcatatgccatcctcggccaggttaatatactgcagaggaaaagccctgaagagaggcaagtggatttactccagcatgtagacatttgaaccagtgaaatcaaacacaaaataaatgtctgtctagtttcaaaaacacacaaactcaccaaaattactaatcaaaaaaatcaacacacaacattatacaaatacaaaagtcagcacacacaaagcactaacacaaatagcaacaaccagagatcagatataacacactgtataccaaaagaccaaccatgaaagaaagagacacacaatgccaaacagagatcgccaaagagcacaagaaacaacacacacaacaat

SEQ ID NO: 375710 - DNA, 1614 bp, Homo sapiens
gggatgtggtaaggctctggcctggagatgtgatttgcagagactgtcggcgtgatctctctcattgtctctgtgttgcagcctcccaaagtgaaatgcctgaccaagatctggcaccccaacatcacagagacaggggaaatatgtctgagtttattgagagaacattcaattgatggcactggctgggctcccacaagaacattaaaggatgtcgtttggggattaaactctttgtttactgatcttttgaattttgatgatccactgaatattgaagctgcagaacatcatttgcgggacaaggaggacttccggaataaagtggatgactacatcaaacgttatgccagatgataaaaggggacgattgcaggcccatggactgtgttacagtttgtctctaacatgaaacagcaagaggtagccccctctcccgtcctcatgctccctctcagtcccctggattgccccagtcctgtgaccatgttgccctgaagaagaccatcttcatgactgctcattgtagatggagaattcaacataaatacagcaagaaaatgtgtttgggcttctgaagagttgtctgcttaccttaacatgtttacttttttgaacttgtactgtataggctgttggtgaaattcttaagaagttgtaatgaactcaaaattgaggccagagcttgctttcccttttcccaaacaaaattggttttctgcacaagcgatgctaatgatgtgttcagtgtaactcgcagattggcaataagatacccgctacaaactgtgattggatgcaaaatctcttagcttctttcacgaatgttggccctgcctagatgttgtgaagcctcccagaatgcatagagtcattcactgtagatctcttattgaaatgcgtattttatttaatgtaagtatattttggaacagatttgtaatttgtacaattcaatgctttaattattttttctattctcatttagtttgtattttcattgtatagagcagacagaaagatgttgggtcaagcaactattgaagagaaatacaaagaaaatatgaaaggcacattattcattttgtccaaatgcaatgagaatctcactcttaaaaatcagctcttgctttcgggtccggatgtggtgagcacattttggagccctttgaagctagatttggatgatcaaaacaaaaaggcagggagcccattctaacatgctgcccagaggaaactggctggagcctggaccagctggggctgatgcttttgcagtggtcatgtgattgtgacctggtagctacttatcagagagccagaccctgctgtcctgggagacaggagcgatgcctcaggaatcagcccaatgtctgatgtcactgagactgtacctgtggccttcttctgagtttgctatggctccaggccctgccggtggggtgagcctcctaggccttggaggaccaggagtcaacagtggcatatgccatcctcggccaggttaatatactgcagaggaaaagccctgaagagaggcaagtggatttactccagcatgtagacatttgaaccagtgaaatcaaacacaaaataaatgtctgtctagtttca

SEQ ID NO: 375711 - DNA, 1951 bp, Homo sapiens
agcggaaagcgcccgctgctgtctcggctgccgcgggcgagagcggccgagtccccgccccgccacttccggtcccgccgccgggagccggtgcggctgtgaggggccgcgtctcgcagcagccgcccggaccgggcatggtgttgggcgccgggcccgcctcgcctgtctcggggagcccagggtaaaggcagcagtaatgctaacgctagcaagtaaactgaagcgtgacgatggtctcaaagggtcccggacggcagccacagcgtccgactcgactcggagggtttctgtgagagacaaattgcttgttaaagaggttgcagaacttgaagctaatttaccttgtacatgtaaagtgcattttcctgatccaaacaagcttcattgttttcagctaacagtaaccccagatgagggttactaccagggtggaaaatttcagtttgaaactgaagttcccgatgcgtacaacatggtgcctcccaaagtgaaatgcctgaccaagatctggcaccccaacatcacagagacaggggaaatatgtctgagtttattgagagaacattcaattgatggcactggctgggctcccacaagaacattaaaggatgtcgtttggggattaaactctttgtttactgaggacttccggaataaagtggatgactacatcaaacgttatgccagatgataaaaggggacgattgcaggcccatggactgtgttacagtttgtctctaacatgaaacagcaagaggtagccccctctcccgtcctcatgctccctctcagtcccctggattgccccagtcctgtgaccatgttgccctgaagaagaccatcttcatgactgctcattgtagatggagaattcaacataaatacagcaagaaaatgtgtttgggcttctgaagagttgtctgcttaccttaacatgtttacttttttgaacttgtactgtataggctgttggtgaaattcttaagaagttgtaatgaactcaaaattgaggccagagcttgctttcccttttcccaaacaaaattggttttctgcacaagcgatgctaatgatgtgttcagtgtaactcgcagattggcaataagatacccgctacaaactgtgattggatgcaaaatctcttagcttctttcacgaatgttggccctgcctagatgttgtgaagcctcccagaatgcatagagtcattcactgtagatctcttattgaaatgcgtattttatttaatgtaagtatattttggaacagatttgtaatttgtacaattcaatgctttaattattttttctattctcatttagtttgtattttcattgtatagagcagacagaaagatgttgggtcaagcaactattgaagagaaatacaaagaaaatatgaaaggcacattattcattttgtccaaatgcaatgagaatctcactcttaaaaatcagctcttgctttcgggtccggatgtggtgagcacattttggagccctttgaagctagatttggatgatcaaaacaaaaaggcagggagcccattctaacatgctgcccagaggaaactggctggagcctggaccagctggggctgatgcttttgcagtggtcatgtgattgtgacctggtagctacttatcagagagccagaccctgctgtcctgggagacaggagcgatgcctcaggaatcagcccaatgtctgatgtcactgagactgtacctgtggccttcttctgagtttgctatggctccaggccctgccggtggggtgagcctcctaggccttggaggaccaggagtcaacagtggcatatgccatcctcggccaggttaatatactgcagaggaaaagccctgaagagaggcaagtggatttactccagcatgtagacatttgaaccagtgaaatcaaacacaaaataaatgtctgtctagtttca

SEQ ID NO: 375712 - DNA, 1758 bp, Homo sapiens
agcggaaagcgcccgctgctgtctcggctgccgcgggcgagagcggccgagtccccgccccgccacttccggtcccgccgccgggagccggtgcggctgtgaggggccgcgtctcgcagcagccgcccggaccgggcatggtgttgggcgccgggcccgcctcgcctgtctcggggagcccagaggttgcagaacttgaagctaatttaccttgtacatgtaaagtgcattttcctgatccaaacaagcttcattgttttcagctaacagtaaccccagcctcccaaagtgaaatgcctgaccaagatctggcaccccaacatcacagagacaggggaaatatgtctgagtttattgagagaacattcaattgatggcactggctgggctcccacaagaacattaaaggatgtcgtttggggattaaactctttgtttactgatcttttgaattttgatgatccactgaatattgaagctgcagaacatcatttgcgggacaaggaggacttccggaataaagtggatgactacatcaaacgttatgccagatgataaaaggggacgattgcaggcccatggactgtgttacagtttgtctctaacatgaaacagcaagaggtagccccctctcccgtcctcatgctccctctcagtcccctggattgccccagtcctgtgaccatgttgccctgaagaagaccatcttcatgactgctcattgtagatggagaattcaacataaatacagcaagaaaatgtgtttgggcttctgaagagttgtctgcttaccttaacatgtttacttttttgaacttgtactgtataggctgttggtgaaattcttaagaagttgtaatgaactcaaaattgaggccagagcttgctttcccttttcccaaacaaaattggttttctgcacaagcgatgctaatgatgtgttcagtgtaactcgcagattggcaataagatacccgctacaaactgtgattggatcctcccagaatgcatagagtcattcactgtagatctcttattgaaatgcgtattttatttaatgtaagtatattttggaacagatttgtaatttgtacaattcaatgctttaattattttttctattctcatttagtttgtattttcattgtatagagcagacagaaagatgttgggtcaagcaactattgaagagaaatacaaagaaaatatgaaaggcacattattcattttgtccaaatgcaatgagaatctcactcttaaaaatcagctcttgctttcgggtccggatgtggtgagcacattttggagccctttgaagctagatttggatgatcaaaacaaaaaggcagggagcccattctaacatgctgcccagaggaaactggctggagcctggaccagctggggctgatgcttttgcagtggtcatgtgattgtgacctggtagctacttatcagagagccagaccctgctgtcctgggagacaggagcgatgcctcaggaatcagcccaatgtctgatgtcactgagactgtacctgtggccttcttctgagtttgctatggctccaggccctgccggtggggtgagcctcctaggccttggaggaccaggagtcaacagtggcatatgccatcctcggccaggttaatatactgcagaggaaaagccctgaagagaggcaagtggatttactccagcatgtagacatttgaaccagtgaaatcaaacacaaaataaatgtctgtctagtttca

SEQ ID NO: 375713 - DNA, 1473 bp, Homo sapiens
agcggaaagcgcccgctgctgtctcggctgccgcgggcgagagcggccgagtccccgccccgccacttccggtcccgccgccgggagccggtgcggctgtgaggggccgcgtctcgcagcagccgcccggaccgggcatggtgttgggcgccgggcccgcctcgcctgtctcggggagcccagggtaaaggcagcagtaatgctaacgctagcaagtaaactgaagcgtgacgatggtctcaaagggtcccggacggcagccacagcgtccgactcgactcggagggtttctgtgagagacaaattgcttgttaaagaggttgcagaacttgaagctaatttaccttgtacatgtaaagtgcattttcctgatccaaacaagcttcattgttttcagctaacagtaaccccagatgagggttactaccagggtggaaaatttcagtttgaaactgaagttcccgatgcgtacaacatggtgcctcccaaagtgaaatgcctgaccaagatctggcaccccaacatcacagagacaggggaaatatgtctgagtttattgagagaacattcaattgatggcactggctgggctcccacaagaacattaaaggatgtcgtttggggattaaactctttgtttactgatcttttgaattttgatgatccactgaatattgaagctgcagaacatcatttgcgggacaaggaggacttccggaataaagtggatgactacatcaaacgttatgccagatgataaaaggggacgattgcaggcccatggactgtgttacagtttgtctctaacatgaaacagcaagaggtagccccctctcccgtcctcatgctccctctcagtcccctggattgccccagtcctgtgaccatgttgccctgaagaagaccatcttcatgactgctcattgtagatggagaattcaacataaatacagcaagaaaatgtgtttgggcttctgaagagttgtctgcttaccttaacatgtttacttttttgaacttgtactgtataggctgttggtgaaattcttaagaagttgtaatgaactcaaaattgaggccagagcttgctttcccttttcccaaacaaaattggttttctgcacaagcgatgctaatgatgtgttcagtgtaactcgcagattggcaataagatacccgctacaaactgtgattggatgcaaaatctcttagcttctttcacgaatgttggccctgcctagatgttgtgaagcctcccagaatgcatagagtcattcactgtagatctcttattgaaatgcgtattttatttaatgtaagtatattttggaacagatttgtaatttgtacaattcaatgctttaattattttttctattctcatttagtttgtattttcattgtatagagcagacagaaagatgttgggtcaagcaactattgaagagaaatacaaagaaaatatgaaaggca

SEQ ID NO: 375714 - DNA, 883 bp, Homo sapiens
agcggaaagcgcccgctgctgtctcggctgccgcgggcgagagcggccgagtccccgccccgccacttccggtcccgccgccgggagccggtgcggctgtgaggggccgcgtctcgcagcagccgcccggaccgggcatggtgttgggcgccgggcccgcctcgcctgtctcggggagcccagggtaaaggcagcagtaatgctaacgctagcaagtaaactgaagcgtgacgatggtctcaaagggtcccggacggcagccacagcgtccgactcgactcggagggtttctgtgagagacaaattgcttgttaaagaggttgcagaacttgaagctaatttaccttgtacatgtaaagtgcattttcctgatccaaacaagcttcattgttttcagctaacagtaaccccagtttattgagagaacattcaattgatggcactggctgggctcccacaagaacattaaaggatgtcgtttggggattaaactctttgtttactgatcttttgaattttgatgatccactgaatattgaagctgcagaacatcatttgcgggacaaggtgagaattctatttggtgcacgtgctattgtgtccggaattggtgggttcttggtctcactgacttcaagaatgaagccgcggaccctcgcggaaagtttatatggactataatgcaacgactcccctggagccagaagttatccaggccatgaccaaggccatgtgggaagcctggggaaatcccagcagcccgtattcagcaggaagaaaggccaaggatattataaatgcagctcgggaaagcctcgcgaagatgataggggggaaacctcaagatataatcttcacttccgggggcactgaggtaaagctt

SEQ ID NO: 375715 - DNA, 2143 bp, Homo sapiens
agcggaaagcgcccgctgctgtctcggctgccgcgggcgagagcggccgagtccccgccccgccacttccggtcccgccgccgggagccggtgcggctgtgaggggccgcgtctcgcagcagccgcccggaccgggcatggtgttgggcgccgggcccgcctcgcctgtctcggggagcccagggtaaaggcagcagtaatgctaacgctagcaagtaaactgaagcgtgacgatggtctcaaagggtcccggacggcagccacagcgtccgactcgactcggagggtttctgtgagagacaaattgcttgttaaagaggttgcagaacttgaagctaatttaccttacagggtctctctttgttgcccaagttggagtacagtggcatgagtgtggctcactgcagtctcaacctcctgggctcaagtgatcttcccacctcagtctcctgagcagctgagacctcagacctcaggtacatgtaaagtgcattttcctgatccaaacaagcttcattgttttcagctaacagtaaccccagatgagggttactaccagggtggaaaatttcagtttgaaactgaagttcccgatgcgtacaacatggtgcctcccaaagtgaaatgcctgaccaagatctggcaccccaacatcacagagacaggggaaatatgtctgagtttattgagagaacattcaattgatggcactggctgggctcccacaagaacattaaaggatgtcgtttggggattaaactctttgtttactgatcttttgaattttgatgatccactgaatattgaagctgcagaacatcatttgcgggacaaggaggacttccggaataaagtggatgactacatcaaacgttatgccagatgataaaaggggacgattgcaggcccatggactgtgttacagtttgtctctaacatgaaacagcaagaggtagccccctctcccgtcctcatgctccctctcagtcccctggattgccccagtcctgtgaccatgttgccctgaagaagaccatcttcatgactgctcattgtagatggagaattcaacataaatacagcaagaaaatgtgtttgggcttctgaagagttgtctgcttaccttaacatgtttacttttttgaacttgtactgtataggctgttggtgaaattcttaagaagttgtaatgaactcaaaattgaggccagagcttgctttcccttttcccaaacaaaattggttttctgcacaagcgatgctaatgatgtgttcagtgtaactcgcagattggcaataagatacccgctacaaactgtgattggatgcaaaatctcttagcttctttcacgaatgttggccctgcctagatgttgtgaagcctcccagaatgcatagagtcattcactgtagatctcttattgaaatgcgtattttatttaatgtaagtatattttggaacagatttgtaatttgtacaattcaatgctttaattattttttctattctcatttagtttgtattttcattgtatagagcagacagaaagatgttgggtcaagcaactattgaagagaaatacaaagaaaatatgaaaggcacattattcattttgtccaaatgcaatgagaatctcactcttaaaaatcagctcttgctttcgggtccggatgtggtgagcacattttggagccctttgaagctagatttggatgatcaaaacaaaaaggcagggagcccattctaacatgctgcccagaggaaactggctggagcctggaccagctggggctgatgcttttgcagtggtcatgtgattgtgacctggtagctacttatcagagagccagaccctgctgtcctgggagacaggagcgatgcctcaggaatcagcccaatgtctgatgtcactgagactgtacctgtggccttcttctgagtttgctatggctccaggccctgccggtggggtgagcctcctaggccttggaggaccaggagtcaacagtggcatatgccatcctcggccaggttaatatactgcagaggaaaagccctgaagagaggcaagtggatttactccagcatgtagacatttgaaccagtgaaatcaaacacaaaataaatgtctgtctagtttca

SEQ ID NO: 375716 - DNA, 1812 bp, Homo sapiens
agcggaaagcgcccgctgctgtctcggctgccgcgggcgagagcggccgagtccccgccccgccacttccggtcccgccgccgggagccggtgcggctgtgaggggccgcgtctcgcagcagccgcccggaccgggcatggtgttgggcgccgggcccgcctcgcctgtctcggggagcccagaggttgcagaacttgaagctaatttaccttgtacatgtaaagtgcattttcctgatccaaacaagcttcattgttttcagctaacagtaaccccagcctcccaaagtgaaatgcctgaccaagatctggcaccccaacatcacagagacaggggaaatatgtctgagtttattgagagaacattcaattgatggcactggctgggctcccacaagaacattaaaggatgtcgtttggggattaaactctttgtttactgatcttttgaattttgatgatccactgaatattgaagctgcagaacatcatttgcgggacaaggaggacttccggaataaagtggatgactacatcaaacgttatgccagatgataaaaggggacgattgcaggcccatggactgtgttacagtttgtctctaacatgaaacagcaagaggtagccccctctcccgtcctcatgctccctctcagtcccctggattgccccagtcctgtgaccatgttgccctgaagaagaccatcttcatgactgctcattgtagatggagaattcaacataaatacagcaagaaaatgtgtttgggcttctgaagagttgtctgcttaccttaacatgtttacttttttgaacttgtactgtataggctgttggtgaaattcttaagaagttgtaatgaactcaaaattgaggccagagcttgctttcccttttcccaaacaaaattggttttctgcacaagcgatgctaatgatgtgttcagtgtaactcgcagattggcaataagatacccgctacaaactgtgattggatgcaaaatctcttagcttctttcacgaatgttggccctgcctagatgttgtgaagcctcccagaatgcatagagtcattcactgtagatctcttattgaaatgcgtattttatttaatgtaagtatattttggaacagatttgtaatttgtacaattcaatgctttaattattttttctattctcatttagtttgtattttcattgtatagagcagacagaaagatgttgggtcaagcaactattgaagagaaatacaaagaaaatatgaaaggcacattattcattttgtccaaatgcaatgagaatctcactcttaaaaatcagctcttgctttcgggtccggatgtggtgagcacattttggagccctttgaagctagatttggatgatcaaaacaaaaaggcagggagcccattctaacatgctgcccagaggaaactggctggagcctggaccagctggggctgatgcttttgcagtggtcatgtgattgtgacctggtagctacttatcagagagccagaccctgctgtcctgggagacaggagcgatgcctcaggaatcagcccaatgtctgatgtcactgagactgtacctgtggccttcttctgagtttgctatggctccaggccctgccggtggggtgagcctcctaggccttggaggaccaggagtcaacagtggcatatgccatcctcggccaggttaatatactgcagaggaaaagccctgaagagaggcaagtggatttactccagcatgtagacatttgaaccagtgaaatcaaacacaaaataaatgtctgtctagtttca

SEQ ID NO: 375717 - DNA, 1960 bp, Homo sapiens
agcggaaagcgcccgctgctgtctcggctgccgcgggcgagagcggccgagtccccgccccgccacttccggtcccgccgccgggagccggtgcggctgtgaggggccgcgtctcgcagcagccgcccggaccgggcatggtgttgggcgccgggcccgcctcgcctgtctcggggagcccagggtaaaggcagcagtaatgctaacgctagcaagtaaactgaagcgtgacgatggtctcaaagggtcccggacggcagccacagcgtccgactcgactcggagggtttctgtgagagacaaattgcttgttaaagaggttgcagaacttgaagctaatttaccttgtacatgtaaagtgcattttcctgatccaaacaagcttcattgttttcagctaacagtaaccccagatgagggttactaccagggtggaaaatttcagtttgaaactgaagttcccgatgcgtacaacatggtgcctcccaaagtgaaatgcctgaccaagatctggcaccccaacatcacagagacaggggaaatatgtctgagtttattgagagaacattcaattgatggcactggctgggctcccacaagaacattaaaggatgtcgtttggggattaaactctttgtttactgatcttttgaattttgatgatccactgaatattgaagctgcagaacatcatttgcgggacaaggaggacttccggaataaagtggatgactacatcaaacgttatgccagatgataaaaggggacgattgcaggcccatggactgtgttacagtttgtctctaacatgaaacagcaagaggtagccccctctcccgtcctcatgctccctctcagtcccctggattgccccagtcctgtgaccatgttgccctgaagaagaccatcttcatgactgctcattgtagatggagaattcaacataaatacagcaagaaaatgtgtttgggcttctgaagagttgtctgcttaccttaacatgtttacttttttgaacttgtactgtataggctgttggtgaaattcttaagaagttgtaatgaactcaaaattgaggccagagcttgctttcccttttcccaaacaaaattggttttctgcacaagcgatgctaatgatgtgttcagtgtaactcgcagattggcaataagatacccgctacaaactgtgattggatcctcccagaatgcatagagtcattcactgtagatctcttattgaaatgcgtattttatttaatgtaagtatattttggaacagatttgtaatttgtacaattcaatgctttaattattttttctattctcatttagtttgtattttcattgtatagagcagacagaaagatgttgggtcaagcaactattgaagagaaatacaaagaaaatatgaaaggcacattattcattttgtccaaatgcaatgagaatctcactcttaaaaatcagctcttgctttcgggtccggatgtggtgagcacattttggagccctttgaagctagatttggatgatcaaaacaaaaaggcagggagcccattctaacatgctgcccagaggaaactggctggagcctggaccagctggggctgatgcttttgcagtggtcatgtgattgtgacctggtagctacttatcagagagccagaccctgctgtcctgggagacaggagcgatgcctcaggaatcagcccaatgtctgatgtcactgagactgtacctgtggccttcttctgagtttgctatggctccaggccctgccggtggggtgagcctcctaggccttggaggaccaggagtcaacagtggcatatgccatcctcggccaggttaatatactgcagaggaaaagccctgaagagaggcaagtggatttactccagcatgtagacatttgaaccagtgaaatcaaacacaaaataaatgtctgtctagtttca

SEQ ID NO: 375718 - DNA, 1956 bp, Homo sapiens
agcggaaagcgcccgctgctgtctcggctgccgcgggcgagagcggccgagtccccgccccgccacttccggtcccgccgccgggagccggtgcggctgtgaggggccgcgtctcgcagcagccgcccggaccgggcatggtgttgggcgccgggcccgcctcgcctgtctcggggagcccagggtaaaggcagcagtaatgctaacgctagcaagtaaactgaagcgtgacgatggtctcaaagggtcccggacggcagccacagcgtccgactcgactcggagggtttctgtgagagacaaattgcttgttaaagaggttgcagaacttgaagctaatttaccttgtacatgtaaagtgcattttcctgatccaaacaagcttcattgttttcagctaacagtaaccccagatgagggttactaccagggtggaaaatttcagtttgaaactgaagttcccgatgcgtacaacatggtgcctcccaaagtgaaatgcctgaccaagatctggcaccccaacatcacagagacaggggaaatatgtctgaggatgtcgtttggggattaaactctttgtttactgatcttttgaattttgatgatccactgaatattgaagctgcagaacatcatttgcgggacaaggaggacttccggaataaagtggatgactacatcaaacgttatgccagatgataaaaggggacgattgcaggcccatggactgtgttacagtttgtctctaacatgaaacagcaagaggtagccccctctcccgtcctcatgctccctctcagtcccctggattgccccagtcctgtgaccatgttgccctgaagaagaccatcttcatgactgctcattgtagatggagaattcaacataaatacagcaagaaaatgtgtttgggcttctgaagagttgtctgcttaccttaacatgtttacttttttgaacttgtactgtataggctgttggtgaaattcttaagaagttgtaatgaactcaaaattgaggccagagcttgctttcccttttcccaaacaaaattggttttctgcacaagcgatgctaatgatgtgttcagtgtaactcgcagattggcaataagatacccgctacaaactgtgattggatgcaaaatctcttagcttctttcacgaatgttggccctgcctagatgttgtgaagcctcccagaatgcatagagtcattcactgtagatctcttattgaaatgcgtattttatttaatgtaagtatattttggaacagatttgtaatttgtacaattcaatgctttaattattttttctattctcatttagtttgtattttcattgtatagagcagacagaaagatgttgggtcaagcaactattgaagagaaatacaaagaaaatatgaaaggcacattattcattttgtccaaatgcaatgagaatctcactcttaaaaatcagctcttgctttcgggtccggatgtggtgagcacattttggagccctttgaagctagatttggatgatcaaaacaaaaaggcagggagcccattctaacatgctgcccagaggaaactggctggagcctggaccagctggggctgatgcttttgcagtggtcatgtgattgtgacctggtagctacttatcagagagccagaccctgctgtcctgggagacaggagcgatgcctcaggaatcagcccaatgtctgatgtcactgagactgtacctgtggccttcttctgagtttgctatggctccaggccctgccggtggggtgagcctcctaggccttggaggaccaggagtcaacagtggcatatgccatcctcggccaggttaatatactgcagaggaaaagccctgaagagaggcaagtggatttactccagcatgtagacatttgaaccagtgaaatcaaacacaaaataaatgtctgtctagtttca

SEQ ID NO: 375719 - DNA, 6500 bp, Homo sapiens
ctttctccttccctcttgcctccagtgactgtctccaggatttctctcttcctatttcaggaggactctcacaggctcccacagcctgtgttaagctgaggtttcccctagatctcgtatatccccaacacatacctccacgcacacacatccccaagaacctcgagctcacaccaacagacacacgcgcgcatacacactcgctctcgcttgtccatctccctcccgggggagccggcgcgcgctcccacctttgccgcacactccggcgagccgagcccgcagcgctccaggattctgcggctcggaactcggattgcagctctgaacccccatggtggttttttaaacacttcttttccttctcttcctcgttttgattgcaccgtttccatctgggggctagaggagcaaggcagcagccttcccagccagcccttgttggcttgccatcgtccatctggcttataaaagtttgctgagcgcagtccagagggctgcgctgctcgtcccctcggctggcagaagggggtgacgctgggcagcggcgaggagcgcgccgctgcctctggcgggctttcggcttgaggggcaaggtgaagagcgcaccggccgtggggtttaccgagctggatttgtatgttgcaccatgccttcttggatcggggctgtgattcttcccctcttggggctgctgctctccctccccgccggggcggatgtgaaggctcggagctgcggagaggtccgccaggcgtacggtgccaagggattcagcctggcggacatcccctaccaggagatcgcaggggaacacttaagaatctgtcctcaggaatatacatgctgcaccacagaaatggaagacaagttaagccaacaaagcaaactcgaatttgaaaaccttgtggaagagacaagccattttgtgcgcaccacttttgtgtccaggcataagaaatttgacgaatttttccgagagctcctggagaatgcagaaaagtcactaaatgatatgtttgtacggacctatggcatgctgtacatgcagaattcagaagtcttccaggacctcttcacagagctgaaaaggtactacactgggggtaatgtgaatctggaggaaatgctcaatgacttttgggctcggctcctggaacggatgtttcagctgataaaccctcagtatcacttcagtgaagactacctggaatgtgtgagcaaatacactgaccagctcaagccatttggagacgtgccccggaaactgaagattcaggttacccgcgccttcattgctgccaggacctttgtccaggggctgactgtgggcagagaagttgcaaaccgagtttccaaggtcagcccaaccccagggtgtatccgtgccctcatgaagatgctgtactgcccatactgtcgggggcttcccactgtgaggccctgcaacaactactgtctcaacgtcatgaagggctgcttggcaaatcaggctgacctcgacacagagtggaatctgtttatagatgcaatgctcttggtggcagagcgactggaggggccattcaacattgagtcggtcatggacccgatagatgtcaagatttctgaagccattatgaacatgcaagaaaacagcatgcaggtgtctgcaaaggtctttcagggatgtggtcagcccaaacctgctccagccctcagatctgcccgctcagctcctgaaaattttaatacacgtttcaggccctacaatcctgaggaaagaccaacaactgctgcaggcacaagcttggaccggctggtcacagacataaaagagaaattgaagctctctaaaaaggtctggtcagcattaccctacactatctgcaaggacgagagcgtgacagcgggcacgtccaacgaggaggaatgctggaacgggcacagcaaagccagatacttgcctgagatcatgaatgatgggctcaccaaccagatcaacaatcccgaggtggatgtggacatcactcggcctgacactttcatcagacagcagattatggctctccgtgtgatgaccaacaaactaaaaaacgcctacaatggcaatgatgtcaatttccaggacacaagtgatgaatccagtggctcagggagtggcagtgggtgcatggatgacgtgtgtcccacggagtttgagtttgtcaccacagaggcccccgcagtggatcccgaccggagagaggtggactcttctgcagcccagcgtggccactccctgctctcctggtctctcacctgcattgtcctggcactgcagagactgtgcagataatcttgggtttttggtcagatgaaactgcattttagctatctgaatggccaactcacttcttttcttacactcttggacaatggaccatgccacaaaaacttaccgttttctatgagaagagagcagtaatgcaatctgcctccctttttgttttcccaaagagtaccgggtgccagactgaactgcttcctctttccttcagctatctgtggggaccttgtttattctagagagaattcttactcaaatttttcgtaccaggagattttcttaccttcatttgcttttatgctgcagaagtaaaggaatctcacgttgtgagggtttttttttttctcatttaaaataaaaaaggaagaaagaaaataattttccttgtaaaatcgggccaaaccccaagacagctacattttcaacaaaaaagcaaacagagaaaaataaatgaactttaacactgtaagttcagcattgacagcacttccagtgtaagcttttttgtgacaaatccgggtttaaaaatgcttatggggagaaagcttaaagtttgttctaaatgtagtgaaaatgcactgttgtcttggaggtatcatcttgcactctaaccaaacaacaccaaattaatctggaggtactgatactaaatttggaatcccgtctttaatatgagaacacaaattactacaactcagtacctctgtcttactctgcccaatttcaatttagtaatggcaccattattcttaattcccttaatgtctgtccgctgtatccaattggcacagattttccccttcatcttcaattactagtagctacccccatcaattcaccttcctcaagagtctcaattgaaaataatctttgatgatacaatctctgcttttgccacaggtttgacattaactagacgtttctgcccctgtgctcattaccctcccaaaacaatagtttttttaatgaattgaaacacaattagatccattcctgagttttcatttttaactatttactttgtgtcagttggtttctgcatcacaagggcattctcttacaaaacaactcacaacagaaaaaaaaagtcaagacaaaaaatatatatatatagtattgacatggagatttctttcacttttttagtcttagtatgatcatctatttttatatctatgtatatataaatcacagattttaacttcttaattccaagctcagggttgacacacctttgtaagaaaatgttttgtcaaccagctcttcttgttttgtgctgctcaaagaagggattcctcagtgatcggtgagcaccaagaatcaagaaagagaactttttatgtatctaactgtccatttattaaaaatttgccagggcacacccttctgcatgagtgtgcttcagcctgggtgctccagactacaccaaactcatgggatgagccattggtgtgcagggctttaccggtgatggaaactgtatgtgtaaagaatgttattcatgaaaaaccattgctttcatgtaaaacaccttcggcctaggattcctgcctggcacttggatacattacctaactcaataggccagtttagagccacagcctaacctgttcaccaagtaggccaaagccaggcctttcgctccccctgacagagagaagcaaaataaacccaactgggggctttatgaatacagttggctatccatatgtttcttagtttttatgatgcatctggagtagggaaaagtaatgtttcaagacaccatagtaggccagttacattttaattaactcatcgacagtattgacacgtaaatggtatttttcaatctgttctcatcaaaattaaaattagttattgatttagtcatcacatttaagtagaacacatgtggcacaatagtattaagtatatttgagcacttttgcaagacagaaagtatttacaagcatctattgctactttatgcctaatgaaatataaaatgtaggatgatgagagactttgtggcattctttcatttaaacctttatgaaattaaccatctagttcatcattacatactcctagaaaaccatccatttcactgcccacattttggcttcctaccacaaattccacataagacttctctatgaaggaccagtcatttacattgctcatttcattctgtgttcagaagtcagtattgtctttctccaataattaaggtgcaatacaaattaaatcaaccttgattttccagactatttgaataataacttgcttttatggctttaaactccaggtctttcctttttaaaatatttctgcattctcttttatgaactagatcaggatgccttgtttttcctgtgctttcacccccaaaaggttttgtgcatgtgtatgaatacacataatattagtgaatgtgaacccatgttctatacgcactaaacacacagttaatatataaacgcctgcttcatttgtttcaacaccttcattatcaatatgattcatattgatgagatatagtgatgcataatgagccaggcagagagctgaaatgatatcagttaatgatgtcacagtgttagcaccctgcatggatgtggtcaaaatatcattcaagttgtacttcctagtttttatcatcatactactatgtcatatgattttcagactaatttaacatgagaaatgttttggccctaaaggatttcacttaacctagttaccctatttcagtaagtattttggaattcaaccctcgaattattttttctcatttcagcatagtgataggggatgcaatgaggcttcattattttttatgacctgcccctcatttgctctgatgttccctaaattctgtaatcatatcataacttttgttatgaatagagaggaatgggctcactgaaacctgacactagaaattggtgggtgatgctcataactgcaaacacttagcttattgaagtgcctctatttacatgttctttagttataatatgtatttttctaacagaaatacacgtctgtaattggtatatattatactttgtatgtgtcacaacaaaagctaaacagaggctaaagtctttagcagagaagaatgaattacaaatttaccaataagagctctgtttatggttctgtattgaaggacaaccatgacaaccttctgtcattttcacgaaggccaagttggtactttgattatagccatcgtagaacattagcactagaaatctgtctcccttacaatgacttacctagctagcatcaagtaacttgtatcacctgctttaaatgtaagggatagaaaatactattttgtctacactgaaaaacattattattcattgataagtagtaataattataaaagtaacattctttaaagcaaacacattgaaaatattattacaggcagaaccctgatttttaatttatattccctgctgcagacattagccttctttaattcttttgccattacatacatgtttcggctacagactgaacacgaactaaagtccctaaggaggaaaaaaccttaacatattcctgagatgtgattcttttattacttctttttgcaaagctaattatcaaatgatttgattaaacctagacgcattaggaaatgcaagttttacctaaaacttgcagaaatttaaacacatttccatttacttactaacgaacagacctgatttttatttaaaaacacaatttagctttgccaacagaagagtaaaggaaaccataacttataaatttgtaatgtgttcctccttgttggagacattagccagtgtttagttttagaccaacttatacaaacagagtattgatttgtacacattctggagacttgctatatcatggtttgctatggcacagactcagcttagcatggggacattttgaacttcattcaaagttgagtagttactggaacctttgacattgccttgtaatgaggtacttccaaaaaaagacccctaacaatggcataatagtgaggtctctctgtgcatatacataatatatatgcaggataaatgtgtgcaccaatcaaatctaaaattttatgtgactgtcaaatgaatattatttgggttaagatttttcatttctgatttggatagaaaattgctattaatcttgtattaaaatagtttttaaaaatcta

SEQ ID NO: 375720 - DNA, 6761 bp, Homo sapiens
ctttctccttccctcttgcctccagtgactgtctccaggatttctctcttcctatttcaggaggactctcacaggctcccacagcctgtgttaagctgaggtttcccctagatctcgtatatccccaacacatacctccacgcacacacatccccaagaacctcgagctcacaccaacagacacacgcgcgcatacacactcgctctcgcttgtccatctccctcccgggggagccggcgcgcgctcccacctttgccgcacactccggcgagccgagcccgcagcgctccaggattctgcggctcggaactcggattgcagctctgaacccccatggtggttttttaaacacttcttttccttctcttcctcgttttgattgcaccgtttccatctgggggctagaggagcaaggcagcagccttcccagccagcccttgttggcttgccatcgtccatctggcttataaaagtttgctgagcgcagtccagagggctgcgctgctcgtcccctcggctggcagaagggggtgacgctgggcagcggcgaggagcgcgccgctgcctctggcgggctttcggcttgaggggcaaggtgaagagcgcaccggccgtggggtttaccgagctggatttgtatgttgcaccatgccttcttggatcggggctgtgattcttcccctcttggggctgctgctctccctccccgccggggcggatgtgaaggctcggagctgcggagaggtccgccaggcgtacggtgccaagggattcagcctggcggacatcccctaccaggagatcgcaggggaacacttaagaatctgtcctcaggaatatacatgctgcaccacagaaatggaagacaagttaagccaacaaagcaaactcgaatttgaaaaccttgtggaagagacaagccattttgtgcgcaccacttttgtgtccaggcataagaaatttgacgaatttttccgagagctcctggagaatgcagaaaagtcactaaatgatatgtttgtacggacctatggcatgctgtacatgcagaattcagaagtcttccaggacctcttcacagagctgaaaaggtactacactgggggtaatgtgaatctggaggaaatgctcaatgacttttgggctcggctcctggaacggatgtttcagctgataaaccctcagtatcacttcagtgaagactacctggaatgtgtgagcaaatacactgaccagctcaagccatttggagacgtgccccggaaactgaagattcaggttacccgcgccttcattgctgccaggacctttgtccaggggctgactgtgggcagagaagttgcaaaccgagtttccaaggtcagcccaaccccagggtgtatccgtgccctcatgaagatgctgtactgcccatactgtcgggggcttcccactgtgaggccctgcaacaactactgtctcaacgtcatgaagggctgcttggcaaatcaggctgacctcgacacagagtggaatctgtttatagatgcaatgctcttggtggcagagcgactggaggggccattcaacattgagtcggtcatggacccgatagatgtcaagatttctgaagccattatgaacatgcaagaaaacagcatgcaggtgtctgcaaaggtctttcagggatgtggtcagcccaaacctgctccagccctcagatctgcccgctcagctcctgaaaattttaatacacgtttcaggccctacaatcctgaggaaagaccaacaactgctgcaggcacaagcttggaccggctggtcacagacataaaagagaaattgaagctctctaaaaaggtctggtcagcattaccctacactatctgcaaggacgagagcgtgacagcgggcacgtccaacgaggaggaatgctggaacgggcacagcaaagccagatacttgcctgagatcatgaatgatgggctcaccaaccagatcaacaatcccgaggtggatgtggacatcactcggcctgacactttcatcagacagcagattatggctctccgtgtgatgaccaacaaactaaaaaacgcctacaatggcaatgatgtcaatttccaggacacaagtgatgaatccagtggctcagggagtggcagtgggtgcatggatgacgtgtgtcccacggagtttgagtttgtcaccacagaggcccccgcagtggatcccgaccggagagaggtggactcttctgcagcccagcgtggccactccctgctctcctggtctctcacctgcattgtcctggcactgcagagactgtgcagataatcttgggtttttggtcagatgaaactgcattttagctatctgaatggccaactcacttcttttcttacactcttggacaatggaccatgccacaaaaacttaccgttttctatgagaagagagcagtaatgcaatctgcctccctttttgttttcccaaagagtaccgggtgccagactgaactgcttcctctttccttcagctatctgtggggaccttgtttattctagagagaattcttactcaaatttttcgtaccaggagattttcttaccttcatttgcttttatgctgcagaagtaaaggaatctcacgttgtgagggtttttttttttctcatttaaaataaaaaaggaagaaagaaaataattttccttgtaaaatcgggccaaaccccaagacagctacattttcaacaaaaaagcaaacagagaaaaataaatgaactttaacactgtaagttcagcattgacagcacttccagtgtaagcttttttgtgacaaatccgggtttaaaaatgcttatggggagaaagcttaaagtttgttctaaatgtagtgaaaatgcactgttgtcttggaggtatcatcttgcactctaaccaaacaacaccaaattaatctggaggtactgatactaaatttggaatcccgtctttaatatgagaacacaaattactacaactcagtacctctgtcttactctgcccaatttcaatttagtaatggcaccattattcttaattcccttaatgtctgtccgctgtatccaattggcacagattttccccttcatcttcaattactagtagctacccccatcaattcaccttcctcaagagtctcaattgaaaataatctttgatgatacaatctctgcttttgccacaggtttgacattaactagacgtttctgcccctgtgctcattaccctcccaaaacaatagtttttttaatgaattgaaacacaattagatccattcctgagttttcatttttaactatttactttgtgtcagttggtttctgcatcacaagggcattctcttacaaaacaactcacaacagaaaaaaaaagtcaagacaaaaaatatatatatatagtattgacatggagatttctttcacttttttagtcttagtatgatcatctatttttatatctatgtatatataaatcacagattttaacttcttaattccaagctcagggttgacacacctttgtaagaaaatgttttgtcaaccagctcttcttgttttgtgctgctcaaagaagggattcctcagtgatcggtgagcaccaagaatcaagaaagagaactttttatgtatctaactgtccatttattaaaaatttgccagggcacacccttctgcatgagtgtgcttcagcctgggtgctccagactacaccaaactcatgggatgagccattggtgtgcagggctttaccggtgatggaaactgtatgtgtaaagaatgttattcatgaaaaaccattgctttcatgtaaaacaccttcggcctaggattcctgcctggcacttggatacattacctaactcaataggccagtttagagccacagcctaacctgttcaccaagtaggccaaagccaggcctttcgctccccctgacagagagaagcaaaataaacccaactgggggctttatgaatacagttggctatccatatgtttcttagtttttatgatgcatctggagtagggaaaagtaatgtttcaagacaccatagtaggccagttacattttaattaactcatcgacagtattgacacgtaaatggtatttttcaatctgttctcatcaaaattaaaattagttattgatttagtcatcacatttaagtagaacacatgtggcacaatagtattaagtatatttgagcacttttgcaagacagaaagtatttacaagcatctattgctactttatgcctaatgaaatataaaatgtaggatgatgagagactttgtggcattctttcatttaaacctttatgaaattaaccatctagttcatcattacatactcctagaaaaccatccatttcactgcccacattttggcttcctaccacaaattccacataagacttctctatgaaggaccagtcatttacattgctcatttcattctgtgttcagaagtcagtattgtctttctccaataattaaggtgcaatacaaattaaatcaaccttgattttccagactatttgaataataacttgcttttatggctttaaactccaggtctttcctttttaaaatatttctgcattctcttttatgaactagatcaggatgccttgtttttcctgtgctttcacccccaaaaggttttgtgcatgtgtatgaatacacataatattagtgaatgtgaacccatgttctatacgcactaaacacacagttaatatataaacgcctgcttcatttgtttcaacaccttcattatcaatatgattcatattgatgagatatagtgatgcataatgagccaggcagagagctgaaatgatatcagttaatgatgtcacagtgttagcaccctgcatggatgtggtcaaaatatcattcaagttgtacttcctagtttttatcatcatactactatgtcatatgattttcagactaatttaacatgagaaatgttttggccctaaaggatttcacttaacctagttaccctatttcagtaagtattttggaattcaaccctcgaattattttttctcatttcagcatagtgataggggatgcaatgaggcttcattattttttatgacctgcccctcatttgctctgatgttccctaaattctgtaatcatatcataacttttgttatgaatagagaggaatgggctcactgaaacctgacactagaaattggtgggtgatgctcataactgcaaacacttagcttattgaagtgcctctatttacatgttctttagttataatatgtatttttctaacagaaatacacgtctgtaattggtatatattatactttgtatgtgtcacaacaaaagctaaacagaggctaaagtctttagcagagaagaatgaattacaaatttaccaataagagctctgtttatggttctgtattgaaggacaaccatgacaaccttctgtcattttcacgaaggccaagttggtactttgattatagccatcgtagaacattagcactagaaatctgtctcccttacaatgacttacctagctagcatcaagtaacttgtatcacctgctttaaatgtaagggatagaaaatactattttgtctacactgaaaaacattattattcattgataagtagtaataattataaaagtaacattctttaaagcaaacacattgaaaatattattacaggcagaaccctgatttttaatttatattccctgctgcagacattagccttctttaattcttttgccattacatacatgtttcggctacagactgaacacgaactaaagtccctaaggaggaaaaaaccttaacatattcctgagatgtgattcttttattacttctttttgcaaagctaattatcaaatgatttgattaaacctagacgcattaggaaatgcaagttttacctaaaacttgcagaaatttaaacacatttccatttacttactaacgaacagacctgatttttatttaaaaacacaatttagctttgccaacagaagagtaaaggaaaccataacttataaatttgtaatgtgttcctccttgttggagacattagccagtgtttagttttagaccaacttatacaaacagagtattgatttgtacacattctggagacttgctatatcatggtttgctatggcacagactcagcttagcatggggacattttgaacttcattcaaagttgagtagttactggaacctttgacattgccttgtaatgaggtacttccaaaaaaagacccctaacaatggcataatagtgaggtctctctgtgcatatacataatatatatgcaggataaatgtgtgcaccaatcaaatctaaaattttatgtgactgtcaaatgaatattatttgggttaagatttttcatttctgatttggatagaaaattgctattaatcttgtattaaaatagtttttaaaaatctaaaaaaaaaaaaaaaaaaaacggagtttggcctctcatctcagtggatatatccctcccaaaaggaaacaagggcaaggcttatctttgtgtcaaaacggagagtcacccaactgtgtggaagacaagatgctctcgacagttgcagtacttacccttggctaagaactgcactgctttgtttaaaggactgcagaccaaggagcgagctttctctcagagcatgcttttctttattaaaattactgatgcagaacatttga

SEQ ID NO: 375721 - DNA, 2892 bp, Homo sapiens
  misc_feature (2819)..(2819): n is a, c, g, or t
  misc_feature (2827)..(2827): n is a, c, g, or t
  misc_feature (2833)..(2833): n is a, c, g, or t
ctttctccttccctcttgcctccagtgactgtctccaggatttctctcttcctatttcaggaggactctcacaggctcccacagcctgtgttaagctgaggtttcccctagatctcgtatatccccaacacatacctccacgcacacacatccccaagaacctcgagctcacaccaacagacacacgcgcgcatacacactcgctctcgcttgtccatctccctcccgggggagccggcgcgcgctcccacctttgccgcacactccggcgagccgagcccgcagcgctccaggattctgcggctcggaactcggattgcagctctgaacccccatggtggttttttaaacacttcttttccttctcttcctcgttttgattgcaccgtttccatctgggggctagaggagcaaggcagcagccttcccagccagcccttgttggcttgccatcgtccatctggcttataaaagtttgctgagcgcagtccagagggctgcgctgctcgtcccctcggctggcagaagggggtgacgctgggcagcggcgaggagcgcgccgctgcctctggcgggctttcggcttgaggggcaaggtgaagagcgcaccggccgtggggtttaccgagctggatttgtatgttgcaccatgccttcttggatcggggctgtgattcttcccctcttggggctgctgctctccctccccgccggggcggatgtgaaggctcggagctgcggagaggtccgccaggcgtacggtgccaagggattcagcctggcggacatcccctaccaggagatcgcaggggaacacttaagaatctgtcctcaggaatatacatgctgcaccacagaaatggaagacaagttaagccaacaaagcaaactcgaatttgaaaaccttgtggaagagacaagccattttgtgcgcaccacttttgtgtccaggcataagaaatttgacgaatttttccgagagctcctggagaatgcagaaaagtcactaaatgatatgtttgtacggacctatggcatgctgtacatgcagaattcagaagtcttccaggacctcttcacagagctgaaaaggtactacactgggggtaatgtgaatctggaggaaatgctcaatgacttttgggctcggctcctggaacggatgtttcagctgataaaccctcagtatcacttcagtgaagactacctggaatgtgtgagcaaatacactgaccagctcaagccatttggagacgtgccccggaaactgaagattcaggttacccgcgccttcattgctgccaggacctttgtccaggggctgactgtgggcagagaagttgcaaaccgagtttccaaggtcagcccaaccccagggtgtatccgtgccctcatgaagatgctgtactgcccatactgtcgggggcttcccactgtgaggccctgcaacaactactgtctcaacgtcatgaagggctgcttggcaaatcaggctgacctcgacacagagtggaatctgtttatagatgcaatgctcttggtggcagagcgactggaggggccattcaacattgagtcggtcatggacccgatagatgtcaagatttctgaagccattatgaacatgcaagaaaacagcatgcaggtgtctgcaaaggtctttcagggatgtggtcagcccaaacctgctccagccctcagatctgcccgctcagctcctgaaaattttaatacacgtttcaggccctacaatcctgaggaaagaccaacaactgctgcaggcacaagcttggaccggctggtcacagacataaaagagaaattgaagctctctaaaaaggtctggtcagcattaccctacactatctgcaaggacgagagcgtgacagcgggcacgtccaacgaggaggaatgctggaacgggcacagcaaagccagatacttgcctgagatcatgaatgatgggctcaccaaccagatcaacaatcccgaggtggatgtggacatcactcggcctgacactttcatcagacagcagattatggctctccgtgtgatgaccaacaaactaaaaaacgcctacaatggcaatgatgtcaatttccaggacacaagtgatgaatccagtggctcagggagtggcagtgggtgcatggatgacgtgtgtcccacggagtttgagtttgtcaccacagaggcccccgcagtggatcccgaccggagagaggtggactcttctgcagcccagcgtggccactccctgctctcctggtctctcacctgcattgtcctggcactgcagagactgtgcagataatcttgggtttttggtcagatgaaactgcattttagctatctgaatggccaactcacttcttttcttacactcttggacaatggaccatgccacaaaaacttaccgttttctatgagaagagagcagtaatgcaatctgcctccctttttgttttcccaaagagtaccgggtgccagactgaactgcttcctctttccttcagctatctgtggggaccttgtttattctagagagaattcttactcaaatttttcgtaccaggagattttcttaccttcatttgcttttatgctgcagaagtaaaggaatctcacgttgtgagggtttttttttttctcatttaaaataaaaaaggaagaaagaaaataattttccttgtaaaatcgggccaaaccccaagacagctacattttcaacaaaaaagcaaacagagaaaaataaatgaactttaacactgtaagttcagcattgacagcacttccagtgtaagcttttgggcaancggttaanatgttnggggacggcaaagtggccaagggtgagcagccggctgggggcctcggcctacaaaaaca

SEQ ID NO: 375722 - DNA, 5191 bp, Homo sapiens
gaggttgatgttttgatcaactaacaaatctggagcctgccttcagcttgggtcagcccaaccccagggtgtatccgtgccctcatgaagatgctgtactgcccatactgtcgggggcttcccactgtgaggccctgcaacaactactgtctcaacgtcatgaagggctgcttggcaaatcaggctgacctcgacacagagtggaatctgtttatagatgcaatgctcttggtggcagagcgactggaggggccattcaacattgagtcggtcatggacccgatagatgtcaagatttctgaagccattatgaacatgcaagaaaacagcatgcaggtgtctgcaaaggtctttcagggatgtggtcagcccaaacctgctccagccctcagatctgcccgctcagctcctgaaaattttaatacacgtttcaggccctacaatcctgaggaaagaccaacaactgctgcaggcacaagcttggaccggctggtcacagacataaaagagaaattgaagctctctaaaaaggtctggtcagcattaccctacactatctgcaaggacgagagcgtgacagcgggcacgtccaacgaggaggaatgctggaacgggcacagcaaagccagatacttgcctgagatcatgaatgatgggctcaccaaccagatcaacaatcccgaggtggatgtggacatcactcggcctgacactttcatcagacagcagattatggctctccgtgtgatgaccaacaaactaaaaaacgcctacaatggcaatgatgtcaatttccaggacacaagtgatgaatccagtggctcagggagtggcagtgggtgcatggatgacgtgtgtcccacggagtttgagtttgtcaccacagaggcccccgcagtggatcccgaccggagagaggtggactcttctgcagcccagcgtggccactccctgctctcctggtctctcacctgcattgtcctggcactgcagagactgtgcagataatcttgggtttttggtcagatgaaactgcattttagctatctgaatggccaactcacttcttttcttacactcttggacaatggaccatgccacaaaaacttaccgttttctatgagaagagagcagtaatgcaatctgcctccctttttgttttcccaaagagtaccgggtgccagactgaactgcttcctctttccttcagctatctgtggggaccttgtttattctagagagaattcttactcaaatttttcgtaccaggagattttcttaccttcatttgcttttatgctgcagaagtaaaggaatctcacgttgtgagggtttttttttttctcatttaaaataaaaaaggaagaaagaaaataattttccttgtaaaatcgggccaaaccccaagacagctacattttcaacaaaaaagcaaacagagaaaaataaatgaactttaacactgtaagttcagcattgacagcacttccagtgtaagcttttttgtgacaaatccgggtttaaaaatgcttatggggagaaagcttaaagtttgttctaaatgtagtgaaaatgcactgttgtcttggaggtatcatcttgcactctaaccaaacaacaccaaattaatctggaggtactgatactaaatttggaatcccgtctttaatatgagaacacaaattactacaactcagtacctctgtcttactctgcccaatttcaatttagtaatggcaccattattcttaattcccttaatgtctgtccgctgtatccaattggcacagattttccccttcatcttcaattactagtagctacccccatcaattcaccttcctcaagagtctcaattgaaaataatctttgatgatacaatctctgcttttgccacaggtttgacattaactagacgtttctgcccctgtgctcattaccctcccaaaacaatagtttttttaatgaattgaaacacaattagatccattcctgagttttcatttttaactatttactttgtgtcagttggtttctgcatcacaagggcattctcttacaaaacaactcacaacagaaaaaaaaagtcaagacaaaaaatatatatatatagtattgacatggagatttctttcacttttttagtcttagtatgatcatctatttttatatctatgtatatataaatcacagattttaacttcttaattccaagctcagggttgacacacctttgtaagaaaatgttttgtcaaccagctcttcttgttttgtgctgctcaaagaagggattcctcagtgatcggtgagcaccaagaatcaagaaagagaactttttatgtatctaactgtccatttattaaaaatttgccagggcacacccttctgcatgagtgtgcttcagcctgggtgctccagactacaccaaactcatgggatgagccattggtgtgcagggctttaccggtgatggaaactgtatgtgtaaagaatgttattcatgaaaaaccattgctttcatgtaaaacaccttcggcctaggattcctgcctggcacttggatacattacctaactcaataggccagtttagagccacagcctaacctgttcaccaagtaggccaaagccaggcctttcgctccccctgacagagagaagcaaaataaacccaactgggggctttatgaatacagttggctatccatatgtttcttagtttttatgatgcatctggagtagggaaaagtaatgtttcaagacaccatagtaggccagttacattttaattaactcatcgacagtattgacacgtaaatggtatttttcaatctgttctcatcaaaattaaaattagttattgatttagtcatcacatttaagtagaacacatgtggcacaatagtattaagtatatttgagcacttttgcaagacagaaagtatttacaagcatctattgctactttatgcctaatgaaatataaaatgtaggatgatgagagactttgtggcattctttcatttaaacctttatgaaattaaccatctagttcatcattacatactcctagaaaaccatccatttcactgcccacattttggcttcctaccacaaattccacataagacttctctatgaaggaccagtcatttacattgctcatttcattctgtgttcagaagtcagtattgtctttctccaataattaaggtgcaatacaaattaaatcaaccttgattttccagactatttgaataataacttgcttttatggctttaaactccaggtctttcctttttaaaatatttctgcattctcttttatgaactagatcaggatgccttgtttttcctgtgctttcacccccaaaaggttttgtgcatgtgtatgaatacacataatattagtgaatgtgaacccatgttctatacgcactaaacacacagttaatatataaacgcctgcttcatttgtttcaacaccttcattatcaatatgattcatattgatgagatatagtgatgcataatgagccaggcagagagctgaaatgatatcagttaatgatgtcacagtgttagcaccctgcatggatgtggtcaaaatatcattcaagttgtacttcctagtttttatcatcatactactatgtcatatgattttcagactaatttaacatgagaaatgttttggccctaaaggatttcacttaacctagttaccctatttcagtaagtattttggaattcaaccctcgaattattttttctcatttcagcatagtgataggggatgcaatgaggcttcattattttttatgacctgcccctcatttgctctgatgttccctaaattctgtaatcatatcataacttttgttatgaatagagaggaatgggctcactgaaacctgacactagaaattggtgggtgatgctcataactgcaaacacttagcttattgaagtgcctctatttacatgttctttagttataatatgtatttttctaacagaaatacacgtctgtaattggtatatattatactttgtatgtgtcacaacaaaagctaaacagaggctaaagtctttagcagagaagaatgaattacaaatttaccaataagagctctgtttatggttctgtattgaaggacaaccatgacaaccttctgtcattttcacgaaggccaagttggtactttgattatagccatcgtagaacattagcactagaaatctgtctcccttacaatgacttacctagctagcatcaagtaacttgtatcacctgctttaaatgtaagggatagaaaatactattttgtctacactgaaaaacattattattcattgataagtagtaataattataaaagtaacattctttaaagcaaacacattgaaaatattattacaggcagaaccctgatttttaatttatattccctgctgcagacattagccttctttaattcttttgccattacatacatgtttcggctacagactgaacacgaactaaagtccctaaggaggaaaaaaccttaacatattcctgagatgtgattcttttattacttctttttgcaaagctaattatcaaatgatttgattaaacctagacgcattaggaaatgcaagttttacctaaaacttgcagaaatttaaacacatttccatttacttactaacgaacagacctgatttttatttaaaaacacaatttagctttgccaacagaagagtaaaggaaaccataacttataaatttgtaatgtgttcctccttgttggagacattagccagtgtttagttttagaccaacttatacaaacagagtattgatttgtacacattctggagacttgctatatcatggtttgctatggcacagactcagcttagcatggggacattttgaacttcattcaaagttgagtagttactggaacctttgacattgccttgtaatgaggtacttccaaaaaaagacccctaacaatggcataatagtgaggtctctctgtgcatatacataatatatatgcaggataaatgtgtgcaccaatcaaatctaaaattttatgtgactgtcaaatgaatattatttgggttaagatttttcatttctgatttggatagaaaattgctattaatcttgtattaaaatagtttttaaaaatcta

SEQ ID NO: 375723 - DNA, 1825 bp, Homo sapiens
ctttctccttccctcttgcctccagtgactgtctccaggatttctctcttcctatttcaggaggactctcacaggctcccacagcctgtgttaagctgaggtttcccctagatctcgtatatccccaacacatacctccacgcacacacatccccaagaacctcgagctcacaccaacagacacacgcgcgcatacacactcgctctcgcttgtccatctccctcccgggggagccggcgcgcgctcccacctttgccgcacactccggcgagccgagcccgcagcgctccaggattctgcggctcggaactcggattgcagctctgaacccccatggtggttttttaaacacttcttttccttctcttcctcgttttgattgcaccgtttccatctgggggctagaggagcaaggcagcagccttcccagccagcccttgttggcttgccatcgtccatctggcttataaaagtttgctgagcgcagtccagagggctgcgctgctcgtcccctcggctggcagaagggggtgacgctgggcagcggcgaggagcgcgccgctgcctctggcgggctttcggcttgaggggcaaggtgaagagcgcaccggccgtggggtttaccgagctggatttgtatgttgcaccatgccttcttggatcggggctgtgattcttcccctcttggggctgctgctctccctccccgccggggcggatgtgaaggctcggagctgcggagaggtccgccaggcgtacggtgccaagggattcagcctggcggacatcccctaccaggagatcgcaggggaacacttaagaatctgtcctcaggaatatacatgctgcaccacagaaatggaagacaagttaagccaacaaagcaaactcgaatttgaaaaccttgtggaagagacaagccattttgtgcgcaccacttttgtgtccaggcataagaaatttgacgaatttttccgagagctcctggagaatgcagaaaagtcactaaatgatatgtttgtacggacctatggcatgctgtacatgcagaattcagaagtcttccaggacctcttcacagagctgaaaaggtactacactgggggtaatgtgaatctggaggaaatgctcaatgacttttgggctcggctcctggaacggatgtttcagctgataaaccctcagtatcacttcagtgaagactacctggaatgtgtgagcaaatacactgaccagctcaagccatttggagacgtgccccggaaactgaagattcaggttacccgcgccttcattgctgccaggacctttgtccaggggctgactgtgggcagagaagttgcaaaccgagtttccaaggtaattgaaaacgtgctttctttctcattggtgttccttgtttattctgtttttaaaaccaatgtttaaaaaaaaaaaaaaaaaaaaaaaaccaaggtaaaaattcttaattggtggtccttgctcttaatcagttaaatatcaaagcataattctggctttcttttccttgcattgtgtgagagagaacaggattttaagccattctatgtggtttgaaaattaatgttaatacttatcagcagtatagcagagaagcttttagtaccaatggtgcaaaagcaggcacgttgcaactatgatcatttgatatttctgatcagggttttaaggatgataaatactcatgaaagaatccattcagaggttataatcctctagggagtcaagatgacattttgttggactcaaggtttttttgttctgtttgtgtgttgtgttggttggtttttgagggtgagggag

SEQ ID NO: 375724 - DNA, 2289 bp, Homo sapiens
gggagaagccgagggcagcttagccacggccggttcccgttccctccaggacgcgagggtcgccttgggtggggaacccgcgaccgggcgaggacctatcccggtgtggggcttcccgatttcgaaagaatctcgctgcacccccgcccagagttcagaccaagcgaaaagttatttgagaggcctcgggggcgcggggtgaggagtcgtggcggaggccttggtcggggcgccgtggatatccccgagtcaccgcgtccctctcctgcagctcccgcgtcgctgggaggagcgagggagcgagcgggaaggggtctagctggcctttgctcggccctccccagcgcccggctttgaacccgccctgcactgctgtctgggcgggtccggggactcagcactcgacccaaaggtgcaggcgcgcgagcacaacccatggctgcgctgggctgcgcgaggctgaggtgggcgctgcgaggggccggccgtggcctctgcccccacggggccagagccaaggccgcgatccctgccgccctcccctcggacaaggccaccggagctcccggagccgggcctggtgtccggcggcggcaacggagcttagaggagattccacgtctaggacagctgcgcttcttctttcagctgttcgttcaaggctatgccctgcaactgcaccagttacaggtgctttacaaggccaagtacggtccaatgtggatgtcctacttagggcctcagatgcacgtgaacctggccagtgccccgctcttggagcaagtgatgcggcaagagggcaagtacccagtacggaacgacatggagctatggaaggagcaccgggaccagcacgacctgacctatgggccgttcaccacggaaggacaccactggtaccagctgcgccaggctctgaaccagcggttgctgaagccagcggaagcagcgctctatacggatgctttcaatgaggtgattgatgactttatgactcgactggaccagctgcgggcagagagtgcttcggggaaccaggtgtcggacatggctcaactcttctactactttgccttggaagctatttgctacatcctgttcgagaaacgcattggctgcctgcagcgatccatccccgaggacaccgtgaccttcgtcagatccatcgggttaatgttccagaactcactctatgccaccttcctccccaagtggactcgccccgtgctgcctttctggaagcgatacctggatggttggaatgccatcttttcctttgggaagaagctgattgatgagaagctcgaagatatggaggcccaactgcaggcagcagggccagatggcatccaggtgtctggctacctgcacttcttactggccagtggacagctcagtcctcgggaggccatgggcagcctgcctgagctgctcatggctggagtggacacgacatccaacacgctgacatgggccctgtaccacctctcaaaggaccctgagatccaggaggccttgcacgaggaagtggtgggtgtggtgccagccgggcaagtgccccagcacaaggactttgcccacatgccgttgctcaaagctgtgcttaaggagactctgcgtctctaccctgtggtccccacaaactcccggatcatagaaaaggaaattgaagttgatggcttcctcttccccaagaacacccagtttgtgttctgccactatgtggtgtcccgggaccccactgccttctctgagcctgaaagcttccagccccaccgctggctgagaaacagccagcctgctacccccaggatccagcacccatttggctctgtgccctttggctatggggtccgggcctgcctgggccgcaggattgcagagctggagatgcagctactcctcgcaaggctgatccagaagtacaaggtggtcctggccccggagacgggggagttgaagagtgtggcccgcattgtcctggttcccaataagaaagtgggcctgcagttcctgcagagacagtgctgagctgagtctccgccttgctggggcttgtcctagaggctccagctctggcacagtggttcctggctgctgccatgtctcagatgaggagggagagaaggaggccgccagactcgagaggtgggaggaactccttgcacacaccctgagcttttgccacttctatcatttttgagcaactccctctcagctaaaaggccacccctttatcgcattgctgtccttgggtagaatataaaataaagggacttttatttctta

SEQ ID NO: 375725 - DNA, 326 bp, Homo sapiens
gcggccgctccaacatcagaatggtaaccaggacaatgggcctgcagttcctgcagagacagtgctgagctgagtctccgccttgctggggcttgtcctagaggctccagctctggcacagtggttcctggctgctgccatgtctcagatgaggagggagagaaggaggccgccagactcgagaggtgggaggaactccttgcacacaccctgagcttttgccacttctatcatttttgagcaactccctctcagctaaaaggccacccctttatcgcattgctgtccttgggtagaatataaaataaagggacttttatttctta

SEQ ID NO: 375726 - DNA, 2419 bp, Homo sapiens
gggagaagccgagggcagcttagccacggccggttcccgttccctccaggacgcgagggtcgccttgggtggggaacccgcgaccgggcgaggacctatcccggtgtggggcttcccgatttcgaaagaatctcgctgcacccccgcccagagttcagaccaagcgaaaagttatttgagaggcctcgggggcgcggggtgaggagtcgtggcggaggccttggtcggggcgccgtggatatccccgagtcaccgcgtccctctcctgcagctcccgcgtcgctgggaggagcgagggagcgagcgggaaggggtctagctggcctttgctcggccctccccagcgcccggctttgaacccgccctgcactgctgtctgggcgggtccggggactcagcactcgacccaaaggtgcaggcgcgcgagcacaacccatggctgcgctgggctgcgcgaggctgaggtgggcgctgcgaggggccggccgtggcctctgcccccacggggccagagccaaggccgcgatccctgccgccctcccctcggacaaggccaccggagctcccggagccgggcctggtgtccggcggcggcaacggagcttagaggagattccacgtctaggacagctgcgcttcttctttcagctgttcgttcaaggctatgccctgcaactgcaccagttacaggtgctttacaaggccaagtacggtccaatgtggatgtcctacttagggcctcagatgcacgtgaacctggccagtgccccgctcttggagcaagtgatgcggcaagagggcaagtacccagtacggaacgacatggagctatggaaggagcaccgggaccagcacgacctgacctatgggccgttcaccacggaaggacaccactggtaccagctgcgccaggctctgaaccagcggttgctgaagccagcggaagcagcgctctatacggatgctttcaatgaggtgattgatgactttatgactcgactggaccagctgcgggcagagagtgcttcggggaaccaggtgtcggacatggctcaactcttctactactttgccttggaaggtacccttgctgggagaggggctggggaagggaatgggtcagggagaggttgtgctccctctcctcaagggctcctggattccatatgtcctggttctgcctcctgtgatggcctctgtgcactactcagctatttgctacatcctgttcgagaaacgcattggctgcctgcagcgatccatccccgaggacaccgtgaccttcgtcagatccatcgggttaatgttccagaactcactctatgccaccttcctccccaagtggactcgccccgtgctgcctttctggaagcgatacctggatggttggaatgccatcttttcctttgggaagaagctgattgatgagaagctcgaagatatggaggcccaactgcaggcagcagggccagatggcatccaggtgtctggctacctgcacttcttactggccagtggacagctcagtcctcgggaggccatgggcagcctgcctgagctgctcatggctggagtggacacgacatccaacacgctgacatgggccctgtaccacctctcaaaggaccctgagatccaggaggccttgcacgaggaagtggtgggtgtggtgccagccgggcaagtgccccagcacaaggactttgcccacatgccgttgctcaaagctgtgcttaaggagactctgcgtctctaccctgtggtccccacaaactcccggatcatagaaaaggaaattgaagttgatggcttcctcttccccaagaacacccagtttgtgttctgccactatgtggtgtcccgggaccccactgccttctctgagcctgaaagcttccagccccaccgctggctgagaaacagccagcctgctacccccaggatccagcacccatttggctctgtgccctttggctatggggtccgggcctgcctgggccgcaggattgcagagctggagatgcagctactcctcgcaaggctgatccagaagtacaaggtggtcctggccccggagacgggggagttgaagagtgtggcccgcattgtcctggttcccaataagaaagtgggcctgcagttcctgcagagacagtgctgagctgagtctccgccttgctggggcttgtcctagaggctccagctctggcacagtggttcctggctgctgccatgtctcagatgaggagggagagaaggaggccgccagactcgagaggtgggaggaactccttgcacacaccctgagcttttgccacttctatcatttttgagcaactccctctcagctaaaaggccacccctttatcgcattgctgtccttgggtagaatataaaataaagggacttttatttctta

SEQ ID NO: 375727 - DNA, 2098 bp, Homo sapiens
gggagaagccgagggcagcttagccacggccggttcccgttccctccaggacgcgagggtcgccttgggtggggaacccgcgaccgggcgaggacctatcccggtgtggggcttcccgatttcgaaagaatctcgctgcacccccgcccagagttcagaccaagcgaaaagttatttgagaggcctcgggggcgcggggtgaggagtcgtggcggaggccttggtcggggcgccgtggatatccccgagtcaccgcgtccctctcctgcagctcccgcgtcgctgggaggagcgagggagcgagcgggaaggggtctagctggcctttgctcggccctccccagcgcccggctttgaacccgccctgcactgctgtctgggcgggtccggggactcagcactcgacccaaaggtgcaggcgcgcgagcacaacccatggctgcgctgggctgcgcgaggctgaggtgggcgctgcgaggggccggccgtggcctctgcccccacggggccagagccaaggccgcgatccctgccgccctcccctcggacaaggccaccggagctcccggagccgggcctggtgtccggcggcggcaacggagcttagaggagattccacgtctaggacagctgcgcttcttctttcagctgttcgttcaaggctatgccctgcaactgcaccagttacagggaaggacaccactggtaccagctgcgccaggctctgaaccagcggttgctgaagccagcggaagcagcgctctatacggatgctttcaatgaggtgattgatgactttatgactcgactggaccagctgcgggcagagagtgcttcggggaaccaggtgtcggacatggctcaactcttctactactttgccttggaagctatttgctacatcctgttcgagaaacgcattggctgcctgcagcgatccatccccgaggacaccgtgaccttcgtcagatccatcgggttaatgttccagaactcactctatgccaccttcctccccaagtggactcgccccgtgctgcctttctggaagcgatacctggatggttggaatgccatcttttcctttgggaagaagctgattgatgagaagctcgaagatatggaggcccaactgcaggcagcagggccagatggcatccaggtgtctggctacctgcacttcttactggccagtggacagctcagtcctcgggaggccatgggcagcctgcctgagctgctcatggctggagtggacacgacatccaacacgctgacatgggccctgtaccacctctcaaaggaccctgagatccaggaggccttgcacgaggaagtggtgggtgtggtgccagccgggcaagtgccccagcacaaggactttgcccacatgccgttgctcaaagctgtgcttaaggagactctgcgtctctaccctgtggtccccacaaactcccggatcatagaaaaggaaattgaagttgatggcttcctcttccccaagaacacccagtttgtgttctgccactatgtggtgtcccgggaccccactgccttctctgagcctgaaagcttccagccccaccgctggctgagaaacagccagcctgctacccccaggatccagcacccatttggctctgtgccctttggctatggggtccgggcctgcctgggccgcaggattgcagagctggagatgcagctactcctcgcaaggctgatccagaagtacaaggtggtcctggccccggagacgggggagttgaagagtgtggcccgcattgtcctggttcccaataagaaagtgggcctgcagttcctgcagagacagtgctgagctgagtctccgccttgctggggcttgtcctagaggctccagctctggcacagtggttcctggctgctgccatgtctcagatgaggagggagagaaggaggccgccagactcgagaggtgggaggaactccttgcacacaccctgagcttttgccacttctatcatttttgagcaactccctctcagctaaaaggccacccctttatcgcattgctgtccttgggtagaatataaaataaagggacttttatttctta

SEQ ID NO: 375728 - DNA, 2228 bp, Homo sapiens
gggagaagccgagggcagcttagccacggccggttcccgttccctccaggacgcgagggtcgccttgggtggggaacccgcgaccgggcgaggacctatcccggtgtggggcttcccgatttcgaaagaatctcgctgcacccccgcccagagttcagaccaagcgaaaagttatttgagaggcctcgggggcgcggggtgaggagtcgtggcggaggccttggtcggggcgccgtggatatccccgagtcaccgcgtccctctcctgcagctcccgcgtcgctgggaggagcgagggagcgagcgggaaggggtctagctggcctttgctcggccctccccagcgcccggctttgaacccgccctgcactgctgtctgggcgggtccggggactcagcactcgacccaaaggtgcaggcgcgcgagcacaacccatggctgcgctgggctgcgcgaggctgaggtgggcgctgcgaggggccggccgtggcctctgcccccacggggccagagccaaggccgcgatccctgccgccctcccctcggacaaggccaccggagctcccggagccgggcctggtgtccggcggcggcaacggagcttagaggagattccacgtctaggacagctgcgcttcttctttcagctgttcgttcaaggctatgccctgcaactgcaccagttacagggaaggacaccactggtaccagctgcgccaggctctgaaccagcggttgctgaagccagcggaagcagcgctctatacggatgctttcaatgaggtgattgatgactttatgactcgactggaccagctgcgggcagagagtgcttcggggaaccaggtgtcggacatggctcaactcttctactactttgccttggaaggtacccttgctgggagaggggctggggaagggaatgggtcagggagaggttgtgctccctctcctcaagggctcctggattccatatgtcctggttctgcctcctgtgatggcctctgtgcactactcagctatttgctacatcctgttcgagaaacgcattggctgcctgcagcgatccatccccgaggacaccgtgaccttcgtcagatccatcgggttaatgttccagaactcactctatgccaccttcctccccaagtggactcgccccgtgctgcctttctggaagcgatacctggatggttggaatgccatcttttcctttgggaagaagctgattgatgagaagctcgaagatatggaggcccaactgcaggcagcagggccagatggcatccaggtgtctggctacctgcacttcttactggccagtggacagctcagtcctcgggaggccatgggcagcctgcctgagctgctcatggctggagtggacacgacatccaacacgctgacatgggccctgtaccacctctcaaaggaccctgagatccaggaggccttgcacgaggaagtggtgggtgtggtgccagccgggcaagtgccccagcacaaggactttgcccacatgccgttgctcaaagctgtgcttaaggagactctgcgtctctaccctgtggtccccacaaactcccggatcatagaaaaggaaattgaagttgatggcttcctcttccccaagaacacccagtttgtgttctgccactatgtggtgtcccgggaccccactgccttctctgagcctgaaagcttccagccccaccgctggctgagaaacagccagcctgctacccccaggatccagcacccatttggctctgtgccctttggctatggggtccgggcctgcctgggccgcaggattgcagagctggagatgcagctactcctcgcaaggctgatccagaagtacaaggtggtcctggccccggagacgggggagttgaagagtgtggcccgcattgtcctggttcccaataagaaagtgggcctgcagttcctgcagagacagtgctgagctgagtctccgccttgctggggcttgtcctagaggctccagctctggcacagtggttcctggctgctgccatgtctcagatgaggagggagagaaggaggccgccagactcgagaggtgggaggaactccttgcacacaccctgagcttttgccacttctatcatttttgagcaactccctctcagctaaaaggccacccctttatcgcattgctgtccttgggtagaatataaaataaagggacttttatttctta

SEQ ID NO: 375729 - DNA, 905 bp, Homo sapiens
  misc_feature (44)..(44): n is a, c, g, or t
tagggatagctcagtcttctgtagtcttgggcatctttttttanttgctcattgctggagtggtcacgacatccaacacgctgacatgggccctgtaccacctctcaaaggaccctgagatccaggaggccttgcacgaggaagtggtgggtgtggtgccagccgggcaagtgccccagcacaaggactttgcccacatgccgttgctcaaagctgtgcttaaggagactctgcgtctctaccctgtggtccccacaaactcccggatcatagaaaaggaaattgaagttgatggcttcctcttccccaagaacacccagtttgtgttctgccactatgtggtgtcccgggaccccactgccttctctgagcctgaaagcttccagccccaccgctggctgagaaacagccagcctgctacccccaggatccagcacccatttggctctgtgccctttggctatggggtccgggcctgcctgggccgcaggattgcagagctggagatgcagctactcctcgcaaggctgatccagaagtacaaggtggtcctggccccggagacgggggagttgaagagtgtggcccgcattgtcctggttcccaataagaaagtgggcctgcagttcctgcagagacagtgctgagctgagtctccgccttgctggggcttgtcctagaggctccagctctggcacagtggttcctggctgctgccatgtctcagatgaggagggagagaaggaggccgccagactcgagaggtgggaggaactccttgcacacaccctgagcttttgccacttctatcatttttgagcaactccctctcagctaaaaggccacccctttatcgcattgctgtccttgggtagaatataaaataaagggacttttatttctta

SEQ ID NO: 375730 - DNA, 1096 bp, Homo sapiens
gggagaagccgagggcagcttagccacggccggttcccgttccctccaggacgcgagggtcgccttgggtggggaacccgcgaccgggcgaggacctatcccggtgtggggcttcccgatttcgaaagaatctcgctgcacccccgcccagagttcagaccaagcgaaaagttatttgagaggcctcgggggcgcggggtgaggagtcgtggcggaggccttggtcggggcgccgtggatatccccgagtcaccgcgtccctctcctgcagctcccgcgtcgctgggaggagcgagggagcgagcgggaaggggtctagctggcctttgctcggccctccccagcgcccggctttgaacccgccctgcactgctgtctgggcgggtccggggactcagcactcgacccaaaggtgcaggcgcgcgagcacaacccatggctgcgctgggctgcgcgaggctgaggtgggcgctgcgaggggccggccgtggcctctgcccccacggggccagagccaaggccgcgatccctgccgccctcccctcggacaaggccaccggagctcccggagccgggcctggtgtccggcggcggcaacggagcttagaggagattccacgtctaggacagctgcgcttcttctttcagctgttcgttcaaggctatgccctgcaactgcaccagttacaggtgctttacaaggccaagtacggtccaatgtggatgtcctacttagggcctcagatgcacgtgaacctggccagtgccccgctcttggagcaagtgatgcggcaagagggcaagtacccagtacggaacgacatggagctatggaaggagcaccgggaccagcacgacctgacctatgggccgttcaccacggaaggacaccactggtaccagctgcgccaggctctgaaccagcggttgctgaagccagcggaagcagcgctctatacggatgctttcaatgaggtgattgatgactttatgactcgactggaccagctgcgggcagccaatgcgtttctggaacaggatgtagcaaatagcttccaaggcaaagtagtagaagagttgagccatgtccgacagt

SEQ ID NO: 375731 - DNA, 241 bp, Homo sapiens
ctgtctttctaaaataacttcttacataagtagatccttgttaagttccactaagtaaactaactgaggagcatgaaggaagaaggcatggcttagctaaaaggagaaatgtcccagaaacctccatactgacagccaggaagtagtctcagaggctttggattccaggaaagaagctggtattgtttttctactttaaaaatataactttttttctgctgattccaagaacgtggcaaaa

SEQ ID NO: 375732 - DNA, 2737 bp, Homo sapiens
gggagaagccgagggcagcttagccacggccggttcccgttccctccaggacgcgagggtcgccttgggtggggaacccgcgaccgggcgaggacctatcccggtgtggggcttcccgatttcgaaagaatctcgctgcacccccgcccagagttcagaccaagcgaaaagttatttgagaggcctcgggggcgcggggtgaggagtcgtggcggaggccttggtcggggcgccgtggatatccccgagtcaccgcgtccctctcctgcagctcccgcgtcgctgggaggagcgagggagcgagcgggaaggggtctagctggcctttgctcggccctccccagcgcccggctttgaacccgccctgcactgctgtctgggcgggtccggggactcagcactcgacccaaaggtgcaggcgcgcgagcacaacccatggctgcgctgggctgcgcgaggctgaggtgggcgctgcgaggggccggccgtggcctctgcccccacggggccagagccaaggccgcgatccctgccgccctcccctcggacaaggccaccggagctcccggagccgggcctggtgtccggcggcggcaacggagcttagaggagattccacgtctaggacagctgcgcttcttctttcagctgttcgttcaaggctatgccctgcaactgcaccagttacaggtgctttacaaggccaagtacggtccaatgtggatgtcctacttagggcctcagatgcacgtgaacctggccagtgccccgctcttggagcaagtgatgcggcaagagggcaagtacccagtacggaacgacatggagctatggaaggagcaccgggaccagcacgacctgacctatgggccgttcaccacggaaggacaccactggtaccagctgcgccaggctctgaaccagcggttgctgaagccagcggaagcagcgctctatacggatgctttcaatgaggtgattgatgactttatgactcgactggaccagctgcgggcagagagtgcttcggggaaccaggtgtcggacatggctcaactcttctactactttgccttggaagctatttgctacatcctgttcgagaaacgcattggctgcctgcagcgatccatccccgaggacaccgtgaccttcgtcagatccatcgggttaatgttccagaactcactctatgccaccttcctccccaagtggactcgccccgtgctgcctttctggaagcgatacctggatggttggaatgccatcttttcctttgggaagaagctgattgatgagaagctcgaagatatggaggcccaactgcaggcagcagggccagatggcatccaggtgtctggctacctgcacttcttactggccagtggacagctcagtcctcgggaggccatgggcagcctgcctgagctgctcatggctggagtggacacgacatccaacacgctgacatgggccctgtaccacctctcaaaggaccctgagatccaggaggccttgcacgaggaagtggtgggtgtggtgccagccgggcaagtgccccagcacaaggactttgcccacatgccgttgctcaaagctgtgcttaaggagactctgcgtctctaccctgtggtccccacaaactcccggatcatagaaaaggaaattgaagttgatggcttcctcttccccaagaacacccagtttgtgttctgccactatgtggtgtcccgggaccccactgccttctctgagcctgaaagcttccagccccaccgctggctgagaaacagccagcctgctacccccaggatccagcacccatttggctctgtgccctttggctatggggtccgggcctgcctgggccgcaggattgcagagctggagatgcagctactcctcgcaaggctgatccagaagtacaaggtggtcctggccccggagacgggggagttgaagagtgtggcccgcattgtcctggttcccaataagaaagtgggcctgcagttcctgcagagacagtgctgagctgagtctccgccttgctggggcttgtcctagaggctccagctctggcacagtggttcctggctgctgccatgtctcagatgaggagggagagaaggaggccgccagactcgagaggtgggaggaactccttgcacacaccctgagcttttgccacttctatcatttttgagcaactccctctcagctaaaaggccacccctttatcgcattgctgtccttgggtagaatataaaataaagggacttttatttcttaaaaaaaaaaaaaaaagaaaaaaaaaaaaaaacaaaacaccaacaacaataaaaataagaatcacacgcaataccaaccaacaccacaaggaggcgcgcgcgctaaaagtccaccgcacgggggcagccacactgtgcgaccgcaacgaggcgcggcgcacagacgaccccacgaagagcgccgacactaaaaaaatgaaccaagtcgtgcgcgagttgacacaaacacaggagtggcgtgagaaaagactgccgagcagagtgaaaattataagtaagaccgacacaactagttgtaggggtagcacataatgtggggacaaacacaccaagaaggtaattagagccacaggagaaagataccacccactgcaggacatgtaatggtgactaagacagtggtctgattgcggtagaaaatgtgcgagtgaggttattagcacaattac

SEQ ID NO: 375733 - DNA, 1796 bp, Homo sapiens
gggagaagccgagggcagcttagccacggccggttcccgttccctccaggacgcgagggtcgccttgggtggggaacccgcgaccgggcgaggacctatcccggtgtggggcttcccgatttcgaaagaatctcgctgcacccccgcccagagttcagaccaagcgaaaagttatttgagaggcctcgggggcgcggggtgaggagtcgtggcggaggccttggtcggggcgccgtggatatccccgagtcaccgcgtccctctcctgcagctcccgcgtcgctgggaggagcgagggagcgagcgggaaggggtctagctggcctttgctcggccctccccagcgcccggctttgaacccgccctgcactgctgtctgggcgggtccggggactcagcactcgacccaaaggtgcaggcgcgcgagcacaacccatggctgcgctgggctgcgcgaggctgaggtgggcgctgcgaggggccggccgtggcctctgcccccacggggccagagccaaggccgcgatccctgccgccctcccctcggacaaggccaccggagctcccggagccgggcctggtgtccggcggcggcaacggagcttagaggagattccacgtctaggacagctgcgcttcttctttcagctgttcgttcaaggctatgccctgcaactgcaccagttacaggtgctttacaaggccaagtacggtccaatgtggatgtcctacttagggcctcagatgcacgtgaacctggccagtgccccgctcttggagcaagtgatgcggcaagagggcaagtacccagtacggaacgacatggagctatggaaggagcaccgggaccagcacgacctgacctatgggccgttcaccacggaaggacaccactggtaccagctgcgccaggctctgaaccagcggttgctgaagccagcggaagcagcgctctatacggatgctttcaatgaggtgattgatgactttatgactcgactggaccagctgcgggcagagagtgcttcggggaaccaggtgtcggacatggctcaactcttctactactttgccttggaagctatttgctacatcctgttcgagaaacgcattggctgcctgcagcgatccatccccgaggacaccgtgaccttcgtcagatccatcgggttaatgttccagaactcactctatgccaccttcctccccaagtggactcgccccgtgctgcctttctggaagcgatacctggatggttggaatgccatcttttcctttgggaagaagctgattgatgagaagctcgaagatatggaggcccaactgcaggcagcagggccagatggcatccaggtgtctggctacctgcacttcttactggccagtggacagctcagtcctcgggaggccatgggcagcctgcctgagctgctcatggctggagtggacacgacatccaacacgctgacatgggccctgtaccacctctcaaaggaccctgagatccaggaggccttgcacgaggaagtggtgggtgtggtgccagccgggcaagtgccccagcacaaggactttgcccacatgccgttgctcaaagctgtgcttaaggagactctgcgtctctaccctgtggtccccacaaactcccggatcatagaaaaggaactccttgcacacaccctgagcttttgccacttctatcatttttgagcaactccctctcagctaaaaggccacccctttatcgcattgctgtccttgggtagaatataaaataaagggacttttatttctta

SEQ ID NO: 375734 - DNA, 1707 bp, Homo sapiens
catgaaggaagaaggcatggcttagctaaaaggagaaatgtcccagaaacctccatactgacagccaggaagtagtctcagaggctttggattccaggaaagaagctggtgctttacaaggccaagtacggtccaatgtggatgtcctacttagggcctcagatgcacgtgaacctggccagtgccccgctcttggagcaagtgatgcggcaagagggcaagtacccagtacggaacgacatggagctatggaaggagcaccgggaccagcacgacctgacctatgggccgttcaccacggaaggacaccactggtaccagctgcgccaggctctgaaccagcggttgctgaagccagcggaagcagcgctctatacggatgctttcaatgaggtgattgatgactttatgactcgactggaccagctgcgggcagagagtgcttcggggaaccaggtgtcggacatggctcaactcttctactactttgccttggaagctatttgctacatcctgttcgagaaacgcattggctgcctgcagcgatccatccccgaggacaccgtgaccttcgtcagatccatcgggttaatgttccagaactcactctatgccaccttcctccccaagtggactcgccccgtgctgcctttctggaagcgatacctggatggttggaatgccatcttttcctttgggaagaagctgattgatgagaagctcgaagatatggaggcccaactgcaggcagcagggccagatggcatccaggtgtctggctacctgcacttcttactggccagtggacagctcagtcctcgggaggccatgggcagcctgcctgagctgctcatggctggagtggacacgacatccaacacgctgacatgggccctgtaccacctctcaaaggaccctgagatccaggaggccttgcacgaggaagtggtgggtgtggtgccagccgggcaagtgccccagcacaaggactttgcccacatgccgttgctcaaagctgtgcttaaggagactctgcgtctctaccctgtggtccccacaaactcccggatcatagaaaaggaaattgaagttgatggcttcctcttccccaagaacacccagtttgtgttctgccactatgtggtgtcccgggaccccactgccttctctgagcctgaaagcttccagccccaccgctggctgagaaacagccagcctgctacccccaggatccagcacccatttggctctgtgccctttggctatggggtccgggcctgcctgggccgcaggattgcagagctggagatgcagctactcctcgcaaggctgatccagaagtacaaggtggtcctggccccggagacgggggagttgaagagtgtggcccgcattgtcctggttcccaataagaaagtgggcctgcagttcctgcagagacagtgctgagctgagtctccgccttgctggggcttgtcctagaggctccagctctggcacagtggttcctggctgctgccatgtctcagatgaggagggagagaaggaggccgccagactcgagaggtgggaggaactccttgcacacaccctgagcttttgccacttctatcatttttgagcaactccctctcagctaaaaggccacccctttatcgcattgctgtccttgggtagaatataaaataaagggacttttatttctta

SEQ ID NO: 375735 - DNA, 1501 bp, Homo sapiens
gggagaagccgagggcagcttagccacggccggttcccgttccctccaggacgcgagggtcgccttgggtggggaacccgcgaccgggcgaggacctatcccggtgtggggcttcccgatttcgaaagaatctcgctgcacccccgcccagagttcagaccaagcgaaaagttatttgagaggcctcgggggcgcggggtgaggagtcgtggcggaggccttggtcggggcgccgtggatatccccgagtcaccgcgtccctctcctgcagctcccgcgtcgctgggaggagcgagggagcgagcgggaaggggtctagctggcctttgctcggccctccccagcgcccggctttgaacccgccctgcactgctgtctgggcgggtccggggactcagcactcgacccaaaggtgcaggcgcgcgagcacaacccatggctgcgctgggctgcgcgaggctgaggtgggcgctgcgaggggccggccgtggcctctgcccccacggggccagagccaaggccgcgatccctgccgccctcccctcggacaaggccaccggagctcccggagccgggcctggtgtccggcggcggcaacggagcttagaggagattccacgtctaggacagctgcgcttcttctttcagctgttcgttcaaggctatgccctgcaactgcaccagttacaggtgctttacaaggccaagtacggtccaatgtggatgtcctacttagggcctcagatgcacgtgaacctggccagtgccccgctcttggagcaagtgatgcggcaagagggcaagtacccagtacggaacgacatggagctatggaaggagcaccgggaccagcacgacctgacctatgggccgttcaccacggaaggacaccactggtaccagctgcgccaggctctgaaccagcggttgctgaagccagcggaagcagcgctctatacggatgctttcaatgaggtgattgatgactttatgactcgactggaccagctgcgggcagagagtgcttcggggaaccaggtgtcggacatggctcaactcttctactactttgccttggaagctatttgctacatcctgttcgagaaacgcattggctgcctgcagcgatccatccccgaggacaccgtgaccttcgtcagatccatcgggttaatgttccagaactcactctatgccaccttcctccccaatgggcctgcagttcctgcagagacagtgctgagctgagtctccgccttgctggggcttgtcctagaggctccagctctggcacagtggttcctggctgctgccatgtctcagatgaggagggagagaaggaggccgccagactcgagaggtgggaggaactccttgcacacaccctgagcttttgccacttctatcatttttgagcaactccctctcagctaaaaggccacccctttatcgcattgctgtccttgggtagaatataaaataaagggacttttatttctta

SEQ ID NO: 375736 - DNA, 1167 bp, Homo sapiens
gggagaagccgagggcagcttagccacggccggttcccgttccctccaggacgcgagggtcgccttgggtggggaacccgcgaccgggcgaggacctatcccggtgtggggcttcccgatttcgaaagaatctcgctgcacccccgcccagagttcagaccaagcgaaaagttatttgagaggcctcgggggcgcggggtgaggagtcgtggcggaggccttggtcggggcgccgtggatatccccgagtcaccgcgtccctctcctgcagctcccgcgtcgctgggaggagcgagggagcgagcgggaaggggtctagctggcctttgctcggccctccccagcgcccggctttgaacccgccctgcactgctgtctgggcgggtccggggactcagcactcgacccaaaggtgcaggcgcgcgagcacaacccatggctgcgctgggctgcgcgaggctgaggtgggcgctgcgaggggccggccgtggcctctgcccccacggggccagagccaaggccgcgatccctgccgccctcccctcggacaaggccaccggagctcccggagccgggcctggtgtccggcggcggcaacggagcttagaggagattccacgtctaggacagctgcgcttcttctttcagctgttcgttcaaggctatgccctgcaactgcaccagttacaggtaacccgcgggggcatcgcgtcctggggatgggagtgggcaccggaacagagaggctagaggtgagaagacgttggacagaaagtgaaggctgcaggaactcagctggggacccactgaggctatggtcataaactggaaatcagtagggagaatgggcaaagtgcagacagagccctttgagctgagataaacaggacgaggaagggcttaaatcaggacggcaccagtaagggggggatctggacgccggacttacagtgagcagaggttgaggagggagctgtcttgggaagagagtggcagatgcaaatgtgtaagctaacagatattatggaatcactaattctgggctgatattggctaccacagacttcttccaaacgaaataacttcaggaggattatagaaacctcttggttatttgcaaggtaatttcctcttaggggatacacgatcgcgaggacctcagatcgt

SEQ ID NO: 375737 - DNA, 644 bp, Homo sapiens
gtgtaagtctcatatgccatctattaatttttgaaacttttatcaactgggcgtagtggctcatgcctgtaatcccagaactttgggaggcagaggcgggcagatcacctgaggtcgggagttcgactccagcctgggtgacagagcaagaccctgtctctttaaaaaaaaagaaaaagaaaaagaaaaagcccgcttcagaaaagcttgtcattatccataggatacgatacttaattttacgcttccttatttcttaggtggtccacaattagtgaaaatctgtttgcaaccactggttatcctggcaaaatggcaagccagtttcaaattcatcatttaggacaccctcaggtaatgtggaaatgttttgtaacatacgtgctttttttttttaatttgtgtttttgacttttccactcatagcccccaatttgtaatttgttgactgaagacatttacgtttgttatctgcttaaattgcaagaaatggtggttcatttgtttttgttttttgtgtggtttttttttgatgtttacattaccagtgacacaggtttttttggccagtattcatataagaagctttttattctgttgcttttatattttcttctttagtttaaatacataacgttgcttgt

SEQ ID NO: 375738 - DNA, 485 bp, Homo sapiens
ctgtaccagttattcatagatggattgtatcccatgtttcagctgcgtatcaataatgtgtatttcacctgtaagggagcatatttttaaattttgtttatgctacaaagataaatcatcaatgcatttcatatttttgaaagtcatttttatttattaattttggggacttactgtgcttctttaattcttcacatattttatagcccatcctcatgggttctgtagccgttggatctggactgtcctggcatcgaactctccctctgtgtgtaattggaggagaccacaagctgttgttttgggtgactgaagtataaagtgttttctgtaccttagattcacaaactttgtatttttagtacatattttgaagaatttctatagtacatattttgaagaatttttatatcaaatataccgtatactttagaaaatgtctcagttgcttttattaaataaaatgttgatggtttgaaaaatta

SEQ ID NO: 375739 - DNA, 1279 bp, Homo sapiens
gcgacagcgcgtcgcggcagcccccaaggaagaccagcctgcctctggtcggttcctggcgctctgcgtttcgtgaccttgtccagtagaaggctatttaattttcacaactgcttgaattttgacatacaagatgaagcaagatgcctcaagaaatgctgcctacactgtggattgtgaagattatgtgcatgtggtagaatttaatccctttgagaatggggattcaggaaacctaattgcatatggtggcaataattatgtggtcattggcacgtgtacgtttcaggaagaagaagcagacgttgaaggcattcagtataaaacacttcgaacatttcaccatggagtcagggttgatggcatagcttggagcccagagactagacttgattcattgcctccagtaatcaaattttgtacttcagctgctgatatgaaaattagattatttacttcagatcttcaggataaaaatgaatataaggttttagagggccataccgatttcattaatggtttggtgtttgatcccaaagaaggccaagaaattgcaagtgtgagtgacgatcacacctgcaggatttggaacttggaaggagtgcaaacagctcattttgttcttcattctcctggcatgagtgtgtgctggcatcctgaggagacttttaagctaatggttgcagagaagaatggaacaatccggttttatgatcttttggcccaacaggctattttatctcttgaatcagaacaagtgccattaatgtcagcacactggtgcttaaaaaacaccttcaaagttggagccgttgcaggaaatgattggttaatttgggatattactcggtccagttatcctcaaaataagagacctgttcacatggatcgagcctgcttattcaggtggtccacaattagtgaaaatctgtttgcaaccactggttatcctggcaaaatggcaagccagtttcaaattcatcatttaggacaccctcagcccatcctcatgggttctgtagccgttggatctggactgtcctggcatcgaactctccctctgtgtgtaattggaggagaccacaagctgttgttttgggtgactgaagtataaagtgttttctgtaccttagattcacaaactttgtatttttagtacatattttgaagaatttctatagtacatattttgaagaatttttatatcaaatataccgtatactttagaaaatgtctcagttgcttttattaaataaaatgttgatggtttgaaaaatta

SEQ ID NO: 375740 - DNA, 2021 bp, Homo sapiens
  misc_feature (29)..(30): n is a, c, g, or t
aatataggctaggtagcgaggcgggtggnncaggaagaccagcctgcctctggtcggttcctggcgctctgcgtttcgtgaccttgtccagtagaaggctatttaattttcacaactgcttgaattttgacatacaagatgaagcaagatgcctcaagaaatgctgcctacactgtggattgtgaagattatgtgcatgtggtagaatttaatccctttgagaatggggattcaggaaacctaattgcatatggtggcaataattatgtggtcattggcacgtgtacgtttcaggaagaagaagcagacgttgaaggcattcagtataaaacacttcgaacatttcaccatggagtcagggttgatggcatagcttggagcccagagactagacttgattcattgcctccagtaatcaaattttgtacttcagctgctgatatgaaaattagattatttacttcagatcttcaggataaaaatgaatataaggttttagagggccataccgatttcattaatggtttggtgtttgatcccaaagaaggccaagaaattgcaagtgtgagtgacgatcacacctgcaggatttggaacttggaaggagtgcaaacagctcattttgttcttcattctcctggcatgagtgtgtgctggcatcctgaggagacttttaagctaatggttgcagagaagaatggaacaatccggttttatgatcttttggcccaacaggctattttatctcttgaatcagaacaagtgccattaatgtcagcacactggtgcttaaaaaacaccttcaaagttggagccgttgcaggaaatgattggttaatttgggatattactcggtccagttatcctcaaaataagagacctgttcacatggatcgagcctgcttattcaggtggtccacaattagtgaaaatctgtttgcaaccactggttatcctggcaaaatggcaagccagtttcaaattcatcatttaggacaccctcagcccatcctcatgggttctgtagccgttggatctggactgtcctggcatcgaactctccctctgtgtgtaattggaggagaccacaagctgttgttttgggtgactgaagtataaagtgttttctgtaccttagattcacaaactttgtatttttagtacatattttgaagaatttctatagtacatattttgaagaatttttatatcaaatataccgtatactttagaaaatgtctcagttgcttttattaaataaaatgttgatggtttgaaaaattaaaaaaaaaaaaaaaaaaaaaaaaaaaaaaaaaaaaaaaaaaaaaaaaaaaaaaaaaaaaaaaaaaaaaaaaaaaaaggaggggggggggcgaaaaaatttcccggggggggggcgcatgcccttttttgtgtaaggggggccccaaaggggggtttaaaaaacaaaggagcaggcgccgacttaaacacaacacgccggcgggacgaaaaccacgtccgctggccgggcacacttgggggagaaaccccccctctcgcgggcgggcggccaaattagtgggagacaaccacccaggcagagaaatatgccccccagaggtaaaaaacaacctcagacggatcaacgctgggtacccagctgctatagccgcgccggtggagaaaaatggctcagcgcgttcgtttttgtccaactatctacacggacggcgcggcacaaaacacatgcggagaacacggtaagcagacgaagccaacggcagcaaacagaccaaagaggaaagacgaaaggccatcacgactaacagacaagcaaggaacgactcagacgccgacgaaaacacaaaagacaacacacagacacggagaccaacgccaccgacaccagcaccgtacgcaaacagaaaagccaatcgaacagctagaagcggtcaagacagacaagaacgacgacaagcacgagagcacaagcacaaccgaaacggaggccagacgagcgagaacagcacaagcgacat

SEQ ID NO: 375741 - DNA, 1437 bp, Homo sapiens
gcgacagcgcgtcgcggcagcccccaaggaagaccagcctgcctctggtcggttcctggcgctctgcgtttcgtgaccttgtccagtagaaggctatttaattttcacaactgcttgaattttgacatacaagatgaagcaagatgcctcaagaaatgctgcctacactgtggattgtgaagattatgtgcatgtggtagaatttaatccctttgagaatggggattcaggaaacctaattgcatatggtggcaataattatgtggtcattggcacgtgtacgtttcaggaagaagaagcagacgttgaaggcattcagtataaaacacttcgaacatttcaccatggagtcagggttgatggcatagcttggagcccagagactagacttgattcattgcctccagtaatcaaattttgtacttcagctgctgatatgaaaattagattatttacttcagatcttcaggataaaaatgaatataaggttttagagggccataccgatttcattaatggtttggtgtttgatcccaaagaaggccaagaaattgcaagtgtgagtgacgatcacacctgcaggatttggaacttggaaggagtgcaaacagctcattttgttcttcattctcctggcatgagtgtgtgctggcatcctgaggagacttttaagatatgaaagataactccaggtcactcaacaggtttaaatggtacagctcaggagttttgatgccaaatcccacattcttgccaatctaccactactatttacaccttcaaggatttttcaacttaatagaaccagaattaaaagaacactgcttaaaactaatggttgcagagaagaatggaacaatccggttttatgatcttttggcccaacaggctattttatctcttgaatcagaacaagtgccattaatgtcagcacactggtgcttaaaaaacaccttcaaagttggagccgttgcaggaaatgattggttaatttgggatattactcggtccagttatcctcaaaataagagacctgttcacatggatcgagcctgcttattcaggtggtccacaattagtgaaaatctgtttgcaaccactggttatcctggcaaaatggcaagccagtttcaaattcatcatttaggacaccctcagcccatcctcatgggttctgtagccgttggatctggactgtcctggcatcgaactctccctctgtgtgtaattggaggagaccacaagctgttgttttgggtgactgaagtataaagtgttttctgtaccttagattcacaaactttgtatttttagtacatattttgaagaatttctatagtacatattttgaagaatttttatatcaaatataccgtatactttagaaaatgtctcagttgcttttattaaataaaatgttgatggtttgaaaaatta

SEQ ID NO: 375742 - DNA, 2083 bp, Homo sapiens
  misc_feature (29)..(30): n is a, c, g, or t
aatataggctaggtagcgaggcgggtggnncaggaagaccagcctgcctctggtcggttcctggcgctctgcgtttcgtgaccttgtccagtagaaggctatttaattttcacaactgcttgaattttgacatacaagatgaagcaagatgcctcaagaaatgctgcctacactgtggattgtgaagattatgtgcatgtggtagaatttaatccctttgagaatggggattcaggaaacctaattgcatatggtggcaataattatgtggtcattggcacgtgtacgtttcagaaccttcaagttccattgcacccagtttcatgcctcttgtcttgagagaaaactaagtaaaggaagaagaagcagacgttgaaggcattcagtataaaacacttcgaacatttcaccatggagtcagggttgatggcatagcttggagcccagagactagacttgattcattgcctccagtaatcaaattttgtacttcagctgctgatatgaaaattagattatttacttcagatcttcaggataaaaatgaatataaggttttagagggccataccgatttcattaatggtttggtgtttgatcccaaagaaggccaagaaattgcaagtgtgagtgacgatcacacctgcaggatttggaacttggaaggagtgcaaacagctcattttgttcttcattctcctggcatgagtgtgtgctggcatcctgaggagacttttaagctaatggttgcagagaagaatggaacaatccggttttatgatcttttggcccaacaggctattttatctcttgaatcagaacaagtgccattaatgtcagcacactggtgcttaaaaaacaccttcaaagttggagccgttgcaggaaatgattggttaatttgggatattactcggtccagttatcctcaaaataagagacctgttcacatggatcgagcctgcttattcaggtggtccacaattagtgaaaatctgtttgcaaccactggttatcctggcaaaatggcaagccagtttcaaattcatcatttaggacaccctcagcccatcctcatgggttctgtagccgttggatctggactgtcctggcatcgaactctccctctgtgtgtaattggaggagaccacaagctgttgttttgggtgactgaagtataaagtgttttctgtaccttagattcacaaactttgtatttttagtacatattttgaagaatttctatagtacatattttgaagaatttttatatcaaatataccgtatactttagaaaatgtctcagttgcttttattaaataaaatgttgatggtttgaaaaattaaaaaaaaaaaaaaaaaaaaaaaaaaaaaaaaaaaaaaaaaaaaaaaaaaaaaaaaaaaaaaaaaaaaaaaaaaaaaggaggggggggggcgaaaaaatttcccggggggggggcgcatgcccttttttgtgtaaggggggccccaaaggggggtttaaaaaacaaaggagcaggcgccgacttaaacacaacacgccggcgggacgaaaaccacgtccgctggccgggcacacttgggggagaaaccccccctctcgcgggcgggcggccaaattagtgggagacaaccacccaggcagagaaatatgccccccagaggtaaaaaacaacctcagacggatcaacgctgggtacccagctgctatagccgcgccggtggagaaaaatggctcagcgcgttcgtttttgtccaactatctacacggacggcgcggcacaaaacacatgcggagaacacggtaagcagacgaagccaacggcagcaaacagaccaaagaggaaagacgaaaggccatcacgactaacagacaagcaaggaacgactcagacgccgacgaaaacacaaaagacaacacacagacacggagaccaacgccaccgacaccagcaccgtacgcaaacagaaaagccaatcgaacagctagaagcggtcaagacagacaagaacgacgacaagcacgagagcacaagcacaaccgaaacggaggccagacgagcgagaacagcacaagcgacat

SEQ ID NO: 375743 - DNA, 1222 bp, Homo sapiens
ctgtaccagttattcatagatggattgtatcccatgtttcagctgcgtatcaataatgtgtatttcacctgtaagggagcatatttttaaattttgtttatgctacaaagataaatcatcaatgcatttcatatttttgaaagtcatttttatttattaattttggggacttactgtgcttctttaattcttcacatattttatagcccatcctcatgggttctgtagccgttggatctggactgtcctggcatcgaactctccctctgtgtgtaattggaggagaccacaagctgttgttttgggtgactgaagtataaagtgttttctgtaccttagattcacaaactttgtatttttagtacatattttgaagaatttctatagtacatattttgaagaatttttatatcaaatataccgtatactttagaaaatgtctcagttgcttttattaaataaaatgttgatggtttgaaaaattaaaaaaaaaaaaaaaaaaaaaaaaaaaaaaaaaaaaaaaaaaaaaaaaaaaaaaaaaaaaaaaaaaaaaaaaaaaaaggaggggggggggcgaaaaaatttcccggggggggggcgcatgcccttttttgtgtaaggggggccccaaaggggggtttaaaaaacaaaggagcaggcgccgacttaaacacaacacgccggcgggacgaaaaccacgtccgctggccgggcacacttgggggagaaaccccccctctcgcgggcgggcggccaaattagtgggagacaaccacccaggcagagaaatatgccccccagaggtaaaaaacaacctcagacggatcaacgctgggtacccagctgctatagccgcgccggtggagaaaaatggctcagcgcgttcgtttttgtccaactatctacacggacggcgcggcacaaaacacatgcggagaacacggtaagcagacgaagccaacggcagcaaacagaccaaagaggaaagacgaaaggccatcacgactaacagacaagcaaggaacgactcagacgccgacgaaaacacaaaagacaacacacagacacggagaccaacgccaccgacaccagcaccgtacgcaaacagaaaagccaatcgaacagctagaagcggtcaagacagacaagaacgacgacaagcacgagagcacaagcacaaccgaaacggaggccagacgagcgagaacagcacaagcgacat

SEQ ID NO: 375744 - DNA, 419 bp, Homo sapiens
acttaaagtatgagaaaatatttatggaatattttcctggaattcccggtctaattgtaaagacatattaacaaatttaggattattaaaatcactggttttatacaaaaagaaacctgtttctgtctaggtgctatggctcatacctataatcccagcacttcaggagaccaaggcaggaggatcacttgaggccaggagtttgagacctgcctgggcaagatagcaagaccccattcctacaaaaaacaaaaaattaaaacttacctgggcatcgtagtacacacctgtagtcccagctactagggaggctgaggtgggaagatcacttgagcccaggaatttgaggctacagtgagttttgttagcacttctgcactccagcctgggtgacagagcaagaccctgtctctttaaaa

SEQ ID NO: 375745 - DNA, 1284 bp, Homo sapiens
  misc_feature (29)..(30): n is a, c, g, or t
aatataggctaggtagcgaggcgggtggnncaggaagaccagcctgcctctggtcggttcctggcgctctgcgtttcgtgaccttgtccagtagaaggctatttaattttcacaactgcttgaattttgacatacaagatgaagcaagatgcctcaagaaatgctgcctacactgtggattgtgaagattatgtgcatgtggtagaatttaatccctttgagaatggggattcaggaaacctaattgcatatggtggcaataattatgtggtcattggcacgtgtacgtttcaggaagaagaagcagacgttgaaggcattcagtataaaacacttcgaacatttcaccatggagtcagggttgatggcatagcttggagcccagagactagacttgattcattgcctccagtaatcaaattttgtacttcagctgctgatatgaaaattagattatttacttcagatcttcaggataaaaatgaatataaggttttagagggccataccgatttcattaatggtttggtgtttgatcccaaagaaggccaagaaattgcaagtgtgagtgacgatcacacctgcaggatttggaacttggaaggagtgcaaacagctcattttgttcttcattctcctggcatgagtgtgtgctggcatcctgaggagacttttaagctaatggttgcagagaagaatggaacaatccggttttatgatcttttggcccaacaggctattttatctcttgaatcagaacaagtgccattaatgtcagcacactggtgcttaaaaaacaccttcaaagttggagccgttgcaggaaatgattggttaatttgggatattactcggtccagttatcctcaaaataagagacctgttcacatggatcgagcctgcttattcaggtggtccacaattagtgaaaatctgtttgcaaccactggttatcctggcaaaatggcaagccagtttcaaattcatcatttaggacaccctcagcccatcctcatgggttctgtagccgttggatctggactgtcctggcatcgaactctccctctgtgtgtaattggaggagaccacaagctgttgttttgggtgactgaagtataaagtgttttctgtaccttagattcacaaactttgtatttttagtacatattttgaagaatttctatagtacatattttgaagaatttttatatcaaatataccgtatactttagaaaatgtctcagttgcttttattaaataaaatgttgatggtttgaaaaatta

SEQ ID NO: 375746 - DNA, 1258 bp, Homo sapiens
cacctctgaccgagttccacctctgaccgagttcctggcgctctgcgtttcgtgaccttgtccagtagaaggctatttaattttcacaactgcttgaattttgacatacaagatgaagcaagatgcctcaagaaatgctgcctacactgtggattgtgaagattatgtgcatgtggtagaatttaatccctttgagaatggggattcaggaaacctaattgcatatggtggcaataattatgtggtcattggcacgtgtacgtttcaggaagaagaagcagacgttgaaggcattcagtataaaacacttcgaacatttcaccatggagtcagggttgatggcatagcttggagcccagagactagacttgattcattgcctccagtaatcaaattttgtacttcagctgctgatatgaaaattagattatttacttcagatcttcaggataaaaatgaatataaggttttagagggccataccgatttcattaatggtttggtgtttgatcccaaagaaggccaagaaattgcaagtgtgagtgacgatcacacctgcaggatttggaacttggaaggagtgcaaacagctcattttgttcttcattctcctggcatgagtgtgtgctggcatcctgaggagacttttaagctaatggttgcagagaagaatggaacaatccggttttatgatcttttggcccaacaggctattttatctcttgaatcagaacaagtgccattaatgtcagcacactggtgcttaaaaaacaccttcaaagttggagccgttgcaggaaatgattggttaatttgggatattactcggtccagttatcctcaaaataagagacctgttcacatggatcgagcctgcttattcaggtggtccacaattagtgaaaatctgtttgcaaccactggttatcctggcaaaatggcaagccagtttcaaattcatcatttaggacaccctcagcccatcctcatgggttctgtagccgttggatctggactgtcctggcatcgaactctccctctgtgtgtaattggaggagaccacaagctgttgttttgggtgactgaagtataaagtgttttctgtaccttagattcacaaactttgtatttttagtacatattttgaagaatttctatagtacatattttgaagaatttttatatcaaatataccgtatactttagaaaatgtctcagttgcttttattaaataaaatgttgatggtttgaaaaatta

SEQ ID NO: 375747 - DNA, 2010 bp, Homo sapiens
  misc_feature (594)..(594): n is a, c, g, or t
  misc_feature (606)..(606): n is a, c, g, or t
  misc_feature (624)..(624): n is a, c, g, or t
  misc_feature (633)..(633): n is a, c, g, or t
  misc_feature (653)..(653): n is a, c, g, or t
  misc_feature (656)..(656): n is a, c, g, or t
  misc_feature (680)..(680): n is a, c, g, or t
  misc_feature (698)..(698): n is a, c, g, or t
  misc_feature (710)..(710): n is a, c, g, or t
  misc_feature (725)..(725): n is a, c, g, or t
  misc_feature (735)..(735): n is a, c, g, or t
  misc_feature (777)..(777): n is a, c, g, or t
  misc_feature (779)..(779): n is a, c, g, or t
  misc_feature (782)..(782): n is a, c, g, or t
  misc_feature (788)..(788): n is a, c, g, or t
  misc_feature (812)..(813): n is a, c, g, or t
  misc_feature (839)..(839): n is a, c, g, or t
  misc_feature (848)..(848): n is a, c, g, or t
  misc_feature (859)..(861): n is a, c, g, or t
  misc_feature (867)..(868): n is a, c, g, or t
  misc_feature (882)..(882): n is a, c, g, or t
  misc_feature (885)..(887): n is a, c, g, or t
  misc_feature (901)..(901): n is a, c, g, or t
  misc_feature (908)..(908): n is a, c, g, or t
  misc_feature (914)..(915): n is a, c, g, or t
  misc_feature (917)..(918): n is a, c, g, or t
  misc_feature (923)..(924): n is a, c, g, or t
  misc_feature (932)..(932): n is a, c, g, or t
  misc_feature (935)..(935): n is a, c, g, or t
  misc_feature (949)..(950): n is a, c, g, or t
  misc_feature (962)..(962): n is a, c, g, or t
  misc_feature (977)..(977): n is a, c, g, or t
gcgacagcgcgtcgcggcagcccccaaggaagaccagcctgcctctggtcggttcctggcgctctgcgtttcgtgaccttgtccagtagaaggctatttaattttcacaactgcttgaattttgacatacaagatgaagcaagatgcctcaagaaatgctgcctacactgtggattgtgaagattatgtgcatgtggtagaatttaatccctttgagaatggggattcaggaaacctaattgcatatggtggcaataattatgtggtcattggcacgtgtacgtttcaggaagaagaagcagacgttgaaggcattcagtataaaacacttcgaacatttcaccatggagtcagggttgatggcatagcttggagcccagagactagacttgattcattgcctccagtaatcaaattttgtacttcagctgctgatatgaaaattagattatttacttcagatcttcaggataaaaatgaatataaggttttagagggccataccgatttcattaatggtttggtgtttgatcccaaagaaggccaagaaattgcaagtgtgagtgacgatcacacctgcaggaacatggaagnagagcaaacagnacaatatgaacaacaatnacctagcangagtgtgagctggcaaccanagnaaaaaaaaaaacaaaaggaagcanagaagaaaggaaaaaacnaaaaaaaaaaanaaatagcccaacaanaaaaaaaaanacaaaaaacagaacaagaaccaaaaaacccagcacacaggancnccnaaaacncccccaaagccggagccgtcgcannaaaaaaacgccccacccccccccccnccccccccncccaccccccnnnccacanncccccccacacggnccnnncccccccacccagncggcccncaaccnncnnaaacnngcgggcanccnccggccggcccggnngaagggcaagcngggggggaaggcggnaggtaggacacccgcagcccatcctcatgggttctgtagccgttggatctggactgtcctggcatcgaactctccctctgtgtgtaattggaggagaccacaagctgttgttttgggtgactgaagtataaagtgttttctgtaccttagattcacaaactttgtatttttagtacatattttgaagaatttctatagtacatattttgaagaatttttatatcaaatataccgtatactttagaaaatgtctcagttgcttttattaaataaaatgttgatggtttgaaaaattaaaaaaaaaaaaaaaaaaaaaaaaaaaaaaaaaaaaaaaaaaaaaaaaaaaaaaaaaaaaaaaaaaaaaaaaaaaaaggaggggggggggcgaaaaaatttcccggggggggggcgcatgcccttttttgtgtaaggggggccccaaaggggggtttaaaaaacaaaggagcaggcgccgacttaaacacaacacgccggcgggacgaaaaccacgtccgctggccgggcacacttgggggagaaaccccccctctcgcgggcgggcggccaaattagtgggagacaaccacccaggcagagaaatatgccccccagaggtaaaaaacaacctcagacggatcaacgctgggtacccagctgctatagccgcgccggtggagaaaaatggctcagcgcgttcgtttttgtccaactatctacacggacggcgcggcacaaaacacatgcggagaacacggtaagcagacgaagccaacggcagcaaacagaccaaagaggaaagacgaaaggccatcacgactaacagacaagcaaggaacgactcagacgccgacgaaaacacaaaagacaacacacagacacggagaccaacgccaccgacaccagcaccgtacgcaaacagaaaagccaatcgaacagctagaagcggtcaagacagacaagaacgacgacaagcacgagagcacaagcacaaccgaaacggaggccagacgagcgagaacagcacaagcgacat

SEQ ID NO: 375748 - DNA, 459 bp, Homo sapiens
  misc_feature (15)..(15): n is a, c, g, or t
  misc_feature (22)..(22): n is a, c, g, or t
cgttctgtaggaatncggcacnagggcggcgttggcggcttgtgcagcaatggccaagatcaaggctcgagatcttcgcgggaagaagaaggaggagctgctgaaacagctggacgacctgaaggtggagctgtcccagctgcgcgtcgccaaagtgacaggcggtgcggcctccaagctctctaagatccgagtcgtccggaaatccattgcccgtgttctcacagttattaaccagactcagaaagaaaacctcaggaaattctacaagggcaagaagtacaagcccctggacctgcggcctaagaagacacgtgccatgcgccgccggctcaacaagcacgaggagaacctgaagaccaagaagcagcagcggaaggagcggctgtacccgctgcggaagtacgcggtcaaggcctgaggggcgcattgtcaataaagcacagctggctgagaaaa

SEQ ID NO: 375749 - DNA, 460 bp, Homo sapiens
tactactaaattcgcggcccgtcgacgcggcgttggcggcttgtgcagcaatggccaagatcaaggctcgagatcttcgcgggaagaagaaggaggagctgctgaaacagctggacgacctgaaggtggagctgtcccagctgcgcgtcgccaaagtgacaggcggtgcggcctccaagctctctaagatccgagtcgtccggaaatccattgcccgtgttctcacagttattaaccagactcagaaagaaaacctcaggaaattctacaagggcaagaagtacaagcccctggacctgcggcctaagaagacacgtgccatgcgccgccggctcaacaagcacgaggagaacctgaagaccaagaagcagcagcggaaggagcggctgtacccgctgcggaagtacgcggtcaaggcctgaggggcgcattgtcaataaagcacagctggctgagaaaa

SEQ ID NO: 375750 - DNA, 502 bp, Homo sapiens
ctcaaggatccttaattatattaatcccccccccccccccccccccgctctttccctcggagcgggcggcggcgttggcggcttgtgcagcaatggccaagatcaaggctcgagatcttcgcgggaagaagaaggaggagctgctgaaacagctggacgacctgaaggtggagctgtcccagctgcgcgtcgccaaagtgacaggcggtgcggcctccaagctctctaagatccgagtcgtccggaaatccattgcccgtgttctcacagttattaaccagactcagaaagaaaacctcaggaaattctacaagggcaagaagtacaagcccctggacctgcggcctaagaagacacgtgccatgcgccgccggctcaacaagcacgaggagaacctgaagaccaagaagcagcagcggaaggagcggctgtacccgctgcggaagtacgcggtcaaggcctgaggggcgcattgtcaataaagcacagctggctgagaaaa

SEQ ID NO: 375751 - DNA, 460 bp, Homo sapiens
ggacgcgtgggtcgcccacgcgtccggcggcgttggcggcttgtgcagcaatggccaagatcaaggctcgagatcttcgcgggaagaagaaggaggagctgctgaaacagctggacgacctgaaggtggagctgtcccagctgcgcgtcgccaaagtgacaggcggtgcggcctccaagctctctaagatccgagtcgtccggaaatccattgcccgtgttctcacagttattaaccagactcagaaagaaaacctcaggaaattctacaagggcaagaagtacaagcccctggacctgcggcctaagaagacacgtgccatgcgccgccggctcaacaagcacgaggagaacctgaagaccaagaagcagcagcggaaggagcggctgtacccgctgcggaagtacgcggtcaaggcctgaggggcgcattgtcaataaagcacagctggctgagaaaa

SEQ ID NO: 375752 - DNA, 468 bp, Homo sapiens
tatggctagtacgaggctgggtggttagcgggcggcggcgttggcggcttgtgcagcaatggccaagatcaaggctcgagatcttcgcgggaagaagaaggaggagctgctgaaacagctggacgacctgaaggtggagctgtcccagctgcgcgtcgccaaagtgacaggcggtgcggcctccaagctctctaagatccgagtcgtccggaaatccattgcccgtgttctcacagttattaaccagactcagaaagaaaacctcaggaaattctacaagggcaagaagtacaagcccctggacctgcggcctaagaagacacgtgccatgcgccgccggctcaacaagcacgaggagaacctgaagaccaagaagcagcagcggaaggagcggctgtacccgctgcggaagtacgcggtcaaggcctgaggggcgcattgtcaataaagcacagctggctgagaaaa

SEQ ID NO: 375753 - DNA, 721 bp, Homo sapiens
  misc_feature (18)..(18): n is a, c, g, or t
  misc_feature (554)..(554): n is a, c, g, or t
  misc_feature (556)..(556): n is a, c, g, or t
aattcgcggccgacacgnctgcgagaagacgacagaaggggggagcgggcggcggcgttggcggcttgtgcagcaatggccaagatcaaggctcgagatcttcgcgggaagaagaaggaggagctgctgaaacagctggacgacctgaaggtggagctgtcccagctgcgcgtcgccaaagtgacaggcggtgcggcctccaagctctctaagatccgagtcgtccggaaatccattgcccgtgttctcacagttattaaccagactcagaaagaaaacctcaggaaattctacaagggcaagaagtacaagcccctggacctgcggcctaagaagacacgtgccatgcgccgccggctcaacaagcacgaggagaacctgaagaccaagaagcagcagcggaaggagcggctgtacccgctgcggaagtacgcggtcaaggcctgaggggcgcattgtcaataaagcacagctggctgagaaaaaaaaaaaaaaaaaaaaaaaaaaaaaaaaaaaaaaaaaaaaaaaaaaaaaaaaaaacggggggggttatntntggggggggggaaacaaaaagggtgttttgaaaggggcgcgggtggccacaaggtgtgtttcccgcaggacaccccttttttgtttaaccaggggggaacatcgggggggaccccaaaataggggggggcaaaaattgtaaacccgggttatgtgttattttttt

SEQ ID NO: 375754 - DNA, 681 bp, Homo sapiens
  misc_feature (493)..(493): n is a, c, g, or t
  misc_feature (508)..(508): n is a, c, g, or t
tatggctagtacgaggctgggtggttagcgggcggcggcgttggcggcttgtgcagcaatggccaagatcaaggctcgagatcttcgcgggaagaagaaggaggagctgctgaaacagctggacgacctgaaggtggagctgtcccagctgcgcgtcgccaaagtgacaggcggtgcggcctccaagctctctaagatccgagtcgtccggaaatccattgcccgtgttctcacagttattaaccagactcagaaagaaaacctcaggaaattctacaagggcaagaagtacaagcccctggacctgcggcctaagaagacacgtgccatgcgccgccggctcaacaagcacgaggagaacctgaagaccaagaagcagcagcggaaggagcggctgtacccgctgcggaagtacgcggtcaaggcctgaggggcgcattgtcaataaagcacagctggctgagaaaaaaaaaaaaaaaaaaaaaaaaaaaanaaaaaaaaaaaaaanaaaaaaaagaaacaaaagaaaaccccggagcgacacaaagagagagacgacgcacacaaagaggaacaaagacgcggcaaatagaaaacaagagaccacgacacacaaatctatagcaacaaagggggagaaaccgcggggaacccataaaggggacacaaaaaacgcgaaag

SEQ ID NO: 375755 - DNA, 1217 bp, Homo sapiens
tgagtgacgacagtacaaaagtctggagaaagccccaaagtagtcccctgttcccagagccccaagaataaacagatgggagaacaagaccctcctcttccgtttcccccacagagagatccctgtgacacatctaccgggacccctcgaaatattcctgggaacttcgggaccaaaaagaacatagcgcaccaagagaccccaggttcccaggttattcccccagttgggtaggggacaggcctgctctcggggagggtagcggcgttggcggcttgtgcagcaatggccaagatcaaggctcgagatcttcgcgggaagaagaaggaggagctgctgaaacagctggacgacctgaaggtggagctgtcccagctgcgcgtcgccaaagtgacaggcggtgcggcctccaagctctctaagatccgagtcgtccggaaatccattgcccgtgttctcacagttattaaccagactcagaaagaaaacctcaggaaattctacaagggcaagaagtacaagcccctggacctgcggcctaagaagacacgtgccatgcgccgccggctcaacaagcacgaggagaacctgaagaccaagaagcagcagcggaaggagcggctgtacccgctgcggaagtacgcggtcaaggcctgaggggcgcattgtcaataaagcacagctggctgagaaaaaaaaaacacccaacaacaaacaaaaaaaaaagacgaggggggggcgcgcctcaaagaagatatcccgcgcgcgaggggggcgcccagagtttagcagcgcgtcacgccgaggttttgcgtgtggaacagaggggggcgccccaaagagaggagagagcgcgcgaaataaagaagagccgaaagagcaccgtgggccgcagcagttgataaacacaacgacctgggagacgtggggaaaacacggtgcgaaccaggggcgaacccgtgggagaagaggaacccttaactcggggggggcgggcgaaccatatagggggggggcacaaaagattacactctaagcggaaggattttgaagagggcgccacaaaggggggaaacattatttatcaaattttagagaggggggtataacagcggggggtttaaaaccacatggagcggatattatggtatagggaggagagtaaaaaaagtgtggcgataacaggggaggaatatgcacaatggcacacattcttt

SEQ ID NO: 375756 - DNA, 296 bp, Homo sapiens
ggacgcgtgggtcgcccacgcgtccgccgagtcgtccggaaatccattgcccgtgttctcacagttattaaccagactcagaaagaaaacctcaggaaattctacaagggcaagaagtacaagcccctggacctgcggcctaagaagacacgtgccatgcgccgccggctcaacaagcacgaggagaacctgaagaccaagaagcagcagcggaaggagcggctgtacccgctgcggaagtacgcggtcaaggcctgaggggcgcattgtcaataaagcacagctggctgagaaaa

SEQ ID NO: 375757 - DNA, 342 bp, Homo sapiens
tactactaaattcgcggcccgtcgacgcggcgttggcggcttgtgcagcaatggccaagatcaaggctcgagatcttcgcgggaagaagaaggaggagctgctgaaacagctggacgacctgaaggtggagctgtcccagctgcgcgtcgccaaagtgacaggcggtgcggcctccaagctctctaagatccgagtcgtccggaaatccattgcccgtgttctcacagttattaaccagactcagaaagaaaacctcaggaaattctacaagggcaagaagtacaagcccctggacaaaaaaagtcgacgcggccgcgaatttagtagtagtaggcggccgc

SEQ ID NO: 375758 - DNA, 409 bp, Homo sapiens
aaatcagctcggtaccactcttcttcagcgggaagaagaaggaggagctgctgaaacagctggacgacctgaaggtggagctgtcccagctgcgcgtcgccaaagtgacaggcggtgcggcctccaagctctctaagatccgagtcgtccggaaatccattgcccgtgttctcacagttattaaccagactcagaaagaaaacctcaggaaattctacaagggcaagaagtacaagcccctggacctgcggcctaagaagacacgtgccatgcgccgccggctcaacaagcacgaggagaacctgaagaccaagaagcagcagcggaaggagcggctgtacccgctgcggaagtacgcggtcaaggcctgaggggcgcattgtcaataaagcacagctggctgagaaaa

SEQ ID NO: 375759 - DNA, 503 bp, Homo sapiens
gcccgccgccacccggcagtagttgcggaggtcagccccgcctacttcctctttccctcggagcgggcggcggcgttggcggcttgtgcagcaatggccaagatcaaggctcgagatcttcgcgggaagaagaaggaggagctgctgaaacagctggacgacctgaaggtggagctgtcccagctgcgcgtcgccaaagtgacaggcggtgcggcctccaagctctctaagatccgagtcgtccggaaatccattgcccgtgttctcacagttattaaccagactcagaaagaaaacctcaggaaattctacaagggcaagaagtacaagcccctggacctgcggcctaagaagacacgtgccatgcgccgccggctcaacaagcacgaggagaacctgaagaccaagaagcagcagcggaaggagcggctgtacccgctgcggaagtacgcggtcaaggcctgaggggcgcattgtcaataaagcacagctggctgagaaaa

SEQ ID NO: 375760 - DNA, 293 bp, Homo sapiens
gtcccttcgcgggaaggccgcaggtccaggggcttgtacttcttgcccttgtagaatttcctgaggttttctttctgagtctggttaataactgtgagaacacagggcaagaagtacaagcccctggacctgcggcctaagaagacacgtgccatgcgccgccggctcaacaagcacgaggagaacctgaagaccaagaagcagcagcggaaggagcggctgtacccgctgcggaagtacgcggtcaaggcctgaggggcgcattgtcaataaagcacagctggctgagaaaa

SEQ ID NO: 375761 - DNA, 533 bp, Homo sapiens
atgtgactgtcctcgtgactgggaatcgggcagtggaaggagcactgagttgggagtcacttgactgagatgcaagccccggctcttccacagctttgccaagacttggacactcagcccagtaggtcagcagacttacatgaaatgaggatggtcccaccagccttagatttggggggattaattgagttagtgacatgtgtggcctgctggcagtcccatggtggcagcctcctcctgagtggctctggatggccctccccagcccccttagctgctgcagtagctcctcagccctgggtccttggattcaccctgccgtctgtctcccaggaattctacaagggcaagaagtacaagcccctggacctgcggcctaagaagacacgtgccatgcgccgccggctcaacaagcacgaggagaacctgaagaccaagaagcagcagcggaaggagcggctgtacccgctgcggaagtacgcggtcaaggcctgaggggcgcattgtcaataaagcacagctggctgagaaaa

SEQ ID NO: 375762 - DNA, 231 bp, Homo sapiens
tagcctctcaatagatggagacatacagaaatagtcaaccacatctacaaatgccagtatcaggcggcgcttcgaagccaaaaaacacgtgccatgcggccggctcaacaagcacgaggagaacctgaagaccaagaagcagcagcggaaggagcggctgtacccgctgcggaagtacgcggtcaaggcctgaggggcgcattgtcaataaagcacagctggctgagaaaa

SEQ ID NO: 375763 - DNA, 462 bp, Homo sapiens
tggcgaattcggcacgagggagcgggcggcggcgttggcggcttgtgcagcaatggccaagatcaaggctcgagatcttcgcgggaagaagaaggaggagctgctgaaacagctggacgacctgaaggtggagctgtcccagctgcgcgtcgccaaagtgacaggcggtgcggcctccaagctctctaagatccgagtcgtccggaaatccattgcccgtgttctcacagttattaaccagactcagaaagaaaacctcaggaaattctacaagggcaagaagtacaagcccctggacctgcggcctaagaagacacgtgccatgcgccgccggctcaacaagcacgaggagaacctgaagaccaagaagcagcagcggaaggagcggctgtacccgctgcggaagtacgcggtcaaggcctgaggggcgcattgtcaataaagcacagctggctgagaaaa

SEQ ID NO: 375764 - DNA, 257 bp, Homo sapiens
gtcccttcgcgggaaggccgcaggtccaggggcttgtacttcttgcccttgtagaatttcctgaggttttctttctgagtctggttaataactgtgagaacacgggcaatggatttccggacgactcggatcttagagagcttggagaacctgaagaccaagaagcagcagcggaaggagcggctgtacccgctgcggaagtacgcggtcaaggcctgaggggcgcattgtcaataaagcacagctggctgagaaaa

SEQ ID NO: 375765 - DNA, 1166 bp, Homo sapiens
  misc_feature (1)..(1): n is a, c, g, or t
ncgagctgctgactaatatgatgttaacatcaatgataaatttatatgtatacttagttatatatatatcatgtgaagcttattactacagcctcggttacaacactttgtttttaacacattatggcgatggtcgccccctggttgttgttgtgtgttttacggtcatcattttattaaacatgttggccattcagtgctctcttttataatcactttttttcgtgtggattgttccttcacaccaggatgttctcctcccccgggaataatcttggtggtaatttgtcttcccccggcttataaagggggtatattatgggcgagagtaacccgagggcgcaaacagtcccccaaaaaaggtgggactggccatttcgggaaccccacgttccgtgcccacagtgtaaatggactggatgttccagaagcccttcaaagacccagaaattttgtgggcctctaaaaggcaacatctcaaggttctaaaggaaacagggataccgtccttccagttaagacgggattaactgggcttggtgttcaagtcccccccaggtcctccggatctaccgggtttcccaggggaggaatgaaaggttttttggcatacaaaagtataaatgtagtgacagctgaccatttagtagaacgagcctcgcctttacacagctttatattacaactaggaaaaggctatgttttctctctccccacccccaagcctactccgcggcgttggcggcttgtgcagcaatggccaagatcaaggctcgagatcttcgcgggaagaagaaggaggagctgctgaaacagctggacgacctgaaggtggagctgtcccagctgcgcgtcgccaaagtgacaggcggtgcggcctccaagctctctaagatccgagtcgtccggaaatccattgcccgtgttctcacagttattaaccagactcagaaagaaaacctcaggaaattctacaagggcaagaagtacaagcccctggacctgcggcctaagaagacacgtgccatgcgccgccggctcaacaagcacgaggagaacctgaagaccaagaagcagcagcggaaggagcggctgtacccgctgcggaagtacgcggtcaaggcctgaggggcgcattgtcaataaagcacagctggctgagaaaa

SEQ ID NO: 375766 - DNA, 459 bp, Homo sapiens
ctgaggtgctctagaggatccccaggcggcgttggcggcttgtgcagcaatggccaagatcaaggctcgagatcttcgcgggaagaagaaggaggagctgctgaaacagctggacgacctgaaggtggagctgtcccagctgcgcgtcgccaaagtgacaggcggtgcggcctccaagctctctaagatccgagtcgtccggaaatccattgcccgtgttctcacagttattaaccagactcagaaagaaaacctcaggaaattctacaagggcaagaagtacaagcccctggacctgcggcctaagaagacacgtgccatgcgccgccggctcaacaagcacgaggagaacctgaagaccaagaagcagcagcggaaggagcggctgtacccgctgcggaagtacgcggtcaaggcctgaggggcgcattgtcaataaagcacagctggctgagaaaa

SEQ ID NO: 375767 - DNA, 857 bp, Homo sapiens
ctcaaggatccttaattatattaatcccccccccccccccccccccgctctttccctcggagcgggcggcggcgttggcggcttgtgcagcaatggccaagatcaaggctcgagatcttcgcgggaagaagaaggaggagctgctgaaacagctggacgacctgaaggtggagctgtcccagctgcgcgtcgccaaagtgacaggcggtgcggcctccaagctctctaagatccgagtcgtccggaaatccattgcccgtgttctcacagttattaaccagactcagaaagaaaacctcaggaaattctacaagggcaagaagtacaagcccctggacctgcggcctaagaagacacgtgccatgcgccgccggctcaacaagcacgaggagaacctgaagaccaagaagcagcagcggaaggagcggctgtacccgctgcggaagtacgcggtcaaggcctgaggggcgcattgtcaataaagcacagctggctgagaaaaaaaaaaaaaaaaaaaaaaaaaaacaaaaaaaaaaaaaacaaaaaaaaaaaaaaaaaaaaaaaaaaaagggggggggggggcataaaataattccccgggggggggcaatttgggcccctttttttagaaaaaggggggcccacataatgaggggggagcgtatattaaaaacacagaagcggcgggcgcgggttaaacaacacgctggtggagagaaaaatggttgcaggcgatttaggaagaaaacccatttcgggggggggaatatgggaccacaactagaaatatacgtgaggagaaaatactaggagagagtggacccgtattttcgggaaactgtaggtatagtaattag

SEQ ID NO: 375768 - DNA, 814 bp, Homo sapiens
  misc_feature (15)..(15): n is a, c, g, or t
  misc_feature (22)..(22): n is a, c, g, or t
cgttctgtaggaatncggcacnagggcggcgttggcggcttgtgcagcaatggccaagatcaaggctcgagatcttcgcgggaagaagaaggaggagctgctgaaacagctggacgacctgaaggtggagctgtcccagctgcgcgtcgccaaagtgacaggcggtgcggcctccaagctctctaagatccgagtcgtccggaaatccattgcccgtgttctcacagttattaaccagactcagaaagaaaacctcaggaaattctacaagggcaagaagtacaagcccctggacctgcggcctaagaagacacgtgccatgcgccgccggctcaacaagcacgaggagaacctgaagaccaagaagcagcagcggaaggagcggctgtacccgctgcggaagtacgcggtcaaggcctgaggggcgcattgtcaataaagcacagctggctgagaaaaaaaaaaaaaaaaaaaaaaaaaaacaaaaaaaaaaaaaacaaaaaaaaaaaaaaaaaaaaaaaaaaaagggggggggggggcataaaataattccccgggggggggcaatttgggcccctttttttagaaaaaggggggcccacataatgaggggggagcgtatattaaaaacacagaagcggcgggcgcgggttaaacaacacgctggtggagagaaaaatggttgcaggcgatttaggaagaaaacccatttcgggggggggaatatgggaccacaactagaaatatacgtgaggagaaaatactaggagagagtggacccgtattttcgggaaactgtaggtatagtaattag

SEQ ID NO: 375769 - DNA, 792 bp, Homo sapiens
  misc_feature (18)..(18): n is a, c, g, or t
aattcgcggccgacacgnctgcgagaagacgacagaaggggggagcgggcggcggcgttggcggcttgtgcagcaatggccaagatcaaggctcgagatcttcgcgggaagaagaaggaggagctgctgaaacagctggacgacctgaaggtggagctgtcccagctgcgcgtcgccaaagtgacaggcggtgcggcctccaagctctctaagatccgagtcgtccggaaatccattgcccgtgttctcacagttattaaccagactcagaaagaaaacctcaggaaattctacaagggcaagaagtacaagcccctggacctgcggcctaagaagacacgtgccatgcgccgccggctcaacaagcacgaggagaacctgaagaccaagaagcagcagcggaaggagcggctgtacccgctgcggaagtacgcggtcaaggcctgaggggcgcattgtcaataaagcacagctggctgagaaaaaaaaaaaaaaaaaaaaaaaaaaaaaaaaaaaaaaaaaaaaaaaaaaacaacaccccctcccattcactaacactcccactaatccccctatttccccccttttcctcatcatcttaccttttttttttttttttttgcgggccccttgggccccatgtttttttattttgggagagttttttgttggggcgccaatttgaggtcatttggccaattgccccttatggggagggttaaacaattccggccggtgttttaaaagggggagtggaaaaccccgggggttccccaataaatagcgtggggg

SEQ ID NO: 375770 - DNA, 855 bp, Homo sapiens
  misc_feature (18)..(18): n is a, c, g, or t
  misc_feature (644)..(644): n is a, c, g, or t
  misc_feature (855)..(855): n is a, c, g, or t
aattcgcggccgacacgnctgcgagaagacgacagaaggggggagcgggcggcggcgttggcggcttgtgcagcaatggccaagatcaaggctcgagatcttcgcgggaagaagaaggaggagctgctgaaacagctggacgacctgaaggtggagctgtcccagctgcgcgtcgccaaagtgacaggcggtgcggcctccaagctctctaagatccgagtcgtccggaaatccattgcccgtgttctcacagttattaaccagactcagaaagaaaacctcaggaaattctacaagggcaagaagtacaagcccctggacctgcggcctaagaagacacgtgccatgcgccgccggctcaacaagcacgaggagaacctgaagaccaagaagcagcagcggaaggagcggctgtacccgctgcggaagtacgcggtcaaggcctgaggggcgcattgtcaataaagcacagctggctgagaaaaaaaaaaaaaaaaaaaaaaaaaaacaaacacctttgtgggcgccgcgccttgggcccttgagaaaagttttaaagagcccattttcgttgggggcgcgggggccccagtaacggatacgggagaccctggcgccacaagcggggctcccaaaagggaagncgtccgggcggcaagcgagacaaagggcggcggggggatctctcccccacaaaataaaaaaagccgcccggggggggacaacagagcggcgtctcggagaacacaactctcacaaagggagacccgggagggaccaaagcggcgacgctcactacacacggagggctcaagggacgccgaaatataaattagggggcccgcggggggaagn

SEQ ID NO: 375771 - DNA, 872 bp, Homo sapiens
  misc_feature (661)..(661): n is a, c, g, or t
  misc_feature (872)..(872): n is a, c, g, or t
ctcaaggatccttaattatattaatcccccccccccccccccccccgctctttccctcggagcgggcggcggcgttggcggcttgtgcagcaatggccaagatcaaggctcgagatcttcgcgggaagaagaaggaggagctgctgaaacagctggacgacctgaaggtggagctgtcccagctgcgcgtcgccaaagtgacaggcggtgcggcctccaagctctctaagatccgagtcgtccggaaatccattgcccgtgttctcacagttattaaccagactcagaaagaaaacctcaggaaattctacaagggcaagaagtacaagcccctggacctgcggcctaagaagacacgtgccatgcgccgccggctcaacaagcacgaggagaacctgaagaccaagaagcagcagcggaaggagcggctgtacccgctgcggaagtacgcggtcaaggcctgaggggcgcattgtcaataaagcacagctggctgagaaaaaaaaaaaaaaaaaaaaaaaaaaacaaacacctttgtgggcgccgcgccttgggcccttgagaaaagttttaaagagcccattttcgttgggggcgcgggggccccagtaacggatacgggagaccctggcgccacaagcggggctcccaaaagggaagncgtccgggcggcaagcgagacaaagggcggcggggggatctctcccccacaaaataaaaaaagccgcccggggggggacaacagagcggcgtctcggagaacacaactctcacaaagggagacccgggagggaccaaagcggcgacgctcactacacacggagggctcaagggacgccgaaatataaattagggggcccgcggggggaagn

SEQ ID NO: 375772 - DNA, 814 bp, Homo sapiens
tactactaaattcgcggcccgtcgacgcggcgttggcggcttgtgcagcaatggtgagagctgcggaatcgggcgccatccgagcgctgtgaggcgcgggggttggggaaggcggtgcgggctgagcccgcggattctatctgccacctaggcctgtggggcgccgcgcagaatggtctggcgccaccacaacccgcctcttcgcttggcgccgggagaggcgcgcggcccgggcctgggttactctgcccaaggcacggccggcgagggagactgtcctgagccctggttggggctccggcgcactcgtagtcgatggcgagtcgcgcgcctttgggggctggccacgcaggtgaaggggatatggccccgcggcctggctgaggcacactctctcttgcgcgcaggccaagatcaaggctcgagatcttcgcgggaagaagaaggaggagctgctgaaacagctggacgacctgaaggtggagctgtcccagctgcgcgtcgccaaagtgacaggcggtgcggcctccaagctctctaagatccgagtcgtccggaaatccattgcccgtgttctcacagttattaaccagactcagaaagaaaacctcaggaaattctacaagggcaagaagtacaagcccctggacctgcggcctaagaagacacgtgccatgcgccgccggctcaacaagcacgaggagaacctgaagaccaagaagcagcagcggaaggagcggctgtacccgctgcggaagtacgcggtcaaggcctgaggggcgcattgtcaataaagcacagctggctgagaaaa

SEQ ID NO: 375773 - DNA, 767 bp, Homo sapiens
ggacgcgtgggtcgcccacgcgtccggcggcgttggcggcttgtgcagcaatggccaagatcaaggctcgagatcttcgcgggaagaagaaggaggagctgctgaaacagctggacgacctgaaggtggagctgtcccagctgcgcgtcgccaaagtgacaggcggtgcggcctccaagctctctaagatccgagtcgtccggaaatccattgcccgtgttctcacagttattaaccagactcagaaagaaaacctcaggaaattctacaagggcaagaagtacaagcccctggacctgcggcctaagaagacacgtgccatgcgccgccggctcaacaagcacgaggagaacctgaagaccaagaagcagcagcggaaggagcggctgtacccgctgcggaagtacgcggtcaaggcctgaggggcgcattgtcaataaagcacagctggctgagaaaaaaaaaaaaaaaaaaaaaaaaaaaaaaaaaaaaaaaaaaaaaaaaaaacaacaccccctcccattcactaacactcccactaatccccctatttccccccttttcctcatcatcttaccttttttttttttttttttgcgggccccttgggccccatgtttttttattttgggagagttttttgttggggcgccaatttgaggtcatttggccaattgccccttatggggagggttaaacaattccggccggtgttttaaaagggggagtggaaaaccccgggggttccccaataaatagcgtggggg

SEQ ID NO: 375774 - DNA, 1007 bp, Homo sapiens
  misc_feature (18)..(18): n is a, c, g, or t
aattcgcggccgacacgnctgcgagaagacgacagaaggggggagcgggcggcggcgttggcggcttgtgcagcaatggccaagatcaaggctcgagatcttcgcgggaagaagaaggaggagctgctgaaacagctggacgacctgaaggtggagctgtcccagctgcgcgtcgccaaagtgacaggcggtgcggcctccaagctctctaagatccgagtcgtccggaaatccattgcccgtgttctcacagttattaaccagactcagaaagaaaacctcaggaaattctacaagggcaagaagtacaagcccctggacctgcggcctaagaagacacgtgccatgcgccgccggctcaacaagcacgaggagaacctgaagaccaagaagcagcagcggaaggagcggctgtacccgctgcggaagtacgcggtcaaggcctgaggggcgcattgtcaataaagcacagctggctgagaaaaaaaaaacacccaacaacaaacaaaaaaaaaagacgaggggggggcgcgcctcaaagaagatatcccgcgcgcgaggggggcgcccagagtttagcagcgcgtcacgccgaggttttgcgtgtggaacagaggggggcgccccaaagagaggagagagcgcgcgaaataaagaagagccgaaagagcaccgtgggccgcagcagttgataaacacaacgacctgggagacgtggggaaaacacggtgcgaaccaggggcgaacccgtgggagaagaggaacccttaactcggggggggcgggcgaaccatatagggggggggcacaaaagattacactctaagcggaaggattttgaagagggcgccacaaaggggggaaacattatttatcaaattttagagaggggggtataacagcggggggtttaaaaccacatggagcggatattatggtatagggaggagagtaaaaaaagtgtggcgataacaggggaggaatatgcacaatggcacacattcttt

SEQ ID NO: 375775 - DNA, 777 bp, Homo sapiens
  misc_feature (18)..(18): n is a, c, g, or t
aattcgcggccgacacgnctgcgagaagacgacagaaggggggagcgggcggcggcgttggcggcttgtgcagcaatggccaagatcaaggctcgagatcttcgcgggaagaagaaggaggagctgctgaaacagctggacgacctgaaggtggagctgtcccagctgcgcgtcgccaaagtgacaggcggtgcggcctccaagctctctaagatccgagtcgtccggaaatccattgcccgtgttctcacagttattaaccagactcagaaagaaaacctcaggaaattctacaagggcaagaagtacaagcccctggacctgcggcctaagaagacacgtgccatgcgccgccggctcaacaagcacgaggagaacctgaagaccaagaagcagcagcggaaggagcggctgtacccgctgcggaagtacgcggtcaaggcctgaggggcgcattgtcaataaagcacagctggctgagaaaaaaaaaaaaaaaaaaaaaaaaaaaaaaaacaaaaaccgcggggccaatatggggggggggggaaacaaggggtaaaaatgggcatggggctgaacggggcgttccggaggacccgagttctttgttgaccaaggggcgggaaacctgggggggcaccccaaatgggagggggacgccaaaaatgtggcataaaccgcccggggaagcccgctttaaagactctggccggcaagaaccggaatcctggagtacgatgcatgatcttggagcacaggggcacttagactgtagac

SEQ ID NO: 375776 - DNA, 1133 bp, Homo sapiens
  misc_feature (18)..(18): n is a, c, g, or t
  misc_feature (496)..(496): n is a, c, g, or t
  misc_feature (1118)..(1118): n is a, c, g, or t
aattcgcggccgacacgnctgcgagaagacgacagaaggggggagcgggcggcggcgttggcggcttgtgcagcaatggccaagatcaaggctcgagatcttcgcgggaagaagaaggaggagctgctgaaacagctggacgacctgaaggtggagctgtcccagctgcgcgtcgccaaagtgacaggcggtgcggcctccaagctctctaagatccgagtcgtccggaaatccattgcccgtgttctcacagttattaaccagactcagaaagaaaacctcaggaaattctacaagggcaagaagtacaagcccctggacctgcggcctaagaagacacgtgccatgcgccgccggctcaacaagcacgaggagaacctgaagaccaagaagcagcagcggaaggagcggctgtacccgctgcggaagtacgcggtcaaggcctgaggggcgcattgtcaataaagcacagctggctgagaaaaaaaaaaaaaanaaaaaaaaaaaaagggggggccccccatacccttttttataagcccttttaaaaaatttacccttgcaagcttccccgtcccgggggttccccccttcttaaatctcaccaggatcagacgggggacaaagcttcaacgcacaagcagccagggcgaggctcaaaacggtttaagcatagccaaacccccagggggaacaacaacgcagcgtgataaacccgtttggcactaaacccgaaacgttacccaaaggcatattagctaacccccgaggggtgggccaattctgggtgcacagccaccgggggtcaccggatttaaccccagggtcaaatagaacggccgggggaacaacggtgggtgttagatagcccccctccccaaataaaggctaaaagccctcaccctcggagttggtaaaaacacctcccagcgtttgaccccaacaagtaggactaccgacaaagggggtttcacccatcttctggacccccagttagcgtaagaccccaacggggatttagatacccccgtatggttaagccctaaccctgcacggtaattcaccaaaattgtccgccagaaacttacgaccacgttaacccaacggcgcggcgcgtncaatccctaaaggcg

SEQ ID NO: 375777 - DNA, 870 bp, Homo sapiens
  misc_feature (18)..(18): n is a, c, g, or t
aattcgcggccgacacgnctgcgagaagacgacagaaggggggagcgggcggcggcgttggcggcttgtgcagcaatggccaagatcaaggctcgagatcttcgcgggaagaagaaggaggagctgctgaaacagctggacgacctgaaggtggagctgtcccagctgcgcgtcgccaaagtgacaggcggtgcggcctccaagctctctaagatccgagtcgtccggaaatccattgcccgtgttctcacagttattaaccagactcagaaagaaaacctcaggaaattctacaagggcaagaagtacaagcccctggacctgcggcctaagaagacacgtgccatgcgccgccggctcaacaagcacgaggagaacctgaagaccaagaagcagcagcggaaggagcggctgtacccgctgcggaagtacgcggtcaaggcctgaggggcgcattgtcaataaagcacagctggctgagaaaacaaaaaaaaaaaaaacaaaaaaaaaaaaaaaccccggggccttttttgcgcagggggggagaaacacgagggtcattaaattggcgagcattggcacaaagtggttcccaggaacccacgtttttttgtgccacaggtgggagaaacagacggggccccccaataaagagggagcgcccaaaataatatgcgaaaagcgacgggttacctgtagaattcagtgggcaatgaaaattcggcgagaaataacaccgcagaaatgcgcagaggctaattaggaagcacacaaaagatctctcaaagcagctttgcgcgagagaactcgtggttctaaaaaacaaccgaacccagcgggtgttttcgcgcaaagacacacacttctcgc

SEQ ID NO: 375778 - DNA, 1186 bp, Homo sapiens
  misc_feature (18)..(18): n is a, c, g, or t
aattcgcggccgacacgnctgcgagaagacgacagaaggggggagcgggcggcggcgttggcggcttgtgcagcaatggccaagatcaaggctcgagatcttcgcgggaagaagaaggaggagctgctgaaacagctggacgacctgaaggtggagctgtcccagctgcgcgtcgccaaagtgacaggcggtgcggcctccaagctctctaagatccgagtcgtccggaaatccattgcccgtgttctcacagttattaaccagactcagaaagaaaacctcaggaaattctacaagggcaagaagtacaagcccctggacctgcggcctaagaagacacgtgccatgcgccgccggctcaacaagcacgaggagaacctgaagaccaagaagcagcagcggaaggagcggctgtacccgctgcggaagtacgcggtcaaggcctgaggggcgcattgtcaataaagcacagctggctgagaaaaaaaaaaaaaaaaaaaaaaaaaaaaaaaaaaaaaaaaaaaaaaaaaaaagaaagaaaaaaaaaaccacctcaaatgacgcgcaccaacagccactcacgtgacacgctggtgaccctaaggcacggggcgccgtgcatccctggtgtgagtcaagacgagagtaggaatgaggttgggggaggtgggaaggggagaggctaggggcgcggtgggccgctagcgagaccgtatcgtgggtgcaggtggggtagggtggagagagcagcgagcgcccgtcagaagaagagacgcgcgcagcaggagcgcacggctgaagattagtagacggtcgcatattgacaaaatggagttgatttgcctgagcatgagttctgcagcgctgtgcgtcgttgtgagaacaggacacgagcggttattatagatatataagatgtataagaccgatcgattgcattgcgtctcatgctcgagctacacagcctcgtactcttgtagggaggcggagtaggagggaggaggggttgctgtgcgtcgtattgcacaggtgctcggtcgtgtcgagctggggggatgaggagtgagagtggaaggatcggagttgcggcagggagagagaggtgggtaggaggtggtgggagggagggtggaggaggtgggcctgggggggagctaggtgaagctagaagcaggggcgagacggt

SEQ ID NO: 375779 - DNA, 775 bp, Homo sapiens
  misc_feature (18)..(18): n is a, c, g, or t
aattcgcggccgacacgnctgcgagaagacgacagaaggggggagcgggcggcggcgttggcggcttgtgcagcaatggccaagatcaaggctcgagatcttcgcgggaagaagaaggaggagctgctgaaacagctggacgacctgaaggtggagctgtcccagctgcgcgtcgccaaagtgacaggcggtgcggcctccaagctctctaagatccgagtcgtccggaaatccattgcccgtgttctcacagttattaaccagactcagaaagaaaacctcaggaaattctacaagggcaagaagtacaagcccctggacctgcggcctaagaagacacgtgccatgcgccgccggctcaacaagcacgaggagaacctgaagaccaagaagcagcagcggaaggagcggctgtacccgctgcggaagtacgcggtcaaggcctgaggggcgcattgtcaataaagcacagctggctgagaaaaacacaacaaaaaaggggggggaccggtagccaattcgccctatagagagtcgaatcacaattcactggccgtcagttacaccgtcgtgactgggacaacctggggtatcccagttaatcggactggagaaaatcccgtattggcaggtagagtaataagcacatggccgacagatagcattccagggttgcgcacctaatggcgatggaacttgacggtatatttgggaacacgcgtaaatttgatcgcgatattcacactggcacatcgacaccatgacaccatgtgcg

SEQ ID NO: 375780 - DNA, 590 bp, Homo sapiens
  misc_feature (18)..(18): n is a, c, g, or t
aattcgcggccgacacgnctgcgagaagacgacagaaggggggagcgggcggcggcgttggcggcttgtgcagcaatggccaagatcaaggctcgagatcttcgcgggaagaagaaggaggagctgctgaaacagctggacgacctgaaggtggagctgtcccagctgcgcgtcgccaaagtgacaggcggtgcggcctccaagctctctaagatccgagtcgtccggaaatccattgcccgtgttctcacagttattaaccagactcagaaagaaaacctcaggaaattctacaagggcaagaagtacaagcccctggacctgcggcctaagaagacacgtgccatgcgccgccggctcaacaagcacgaggagaacctgaagaccaagaagcagcagcggaaggagcggctgtacccgctgcggaagtacgcggtcaaggcctgaggggcgcattgtcaataaagcacagctggctgagaaaaatataataactttatttgtgttttacctacctctgtaaataaatatactatttttttttttccttgggggggggcccgtcccacaattccccttattgggttgtt

SEQ ID NO: 375781 - DNA, 638 bp, Homo sapiens
  misc_feature (518)..(518): n is a, c, g, or t
ctcaaggatccttaattatattaatcccccccccccccccccccccgctctttccctcggagcgggcggcggcgttggcggcttgtgcagcaatggccaagatcaaggctcgagatcttcgcgggaagaagaaggaggagctgctgaaacagctggacgacctgaaggtggagctgtcccagctgcgcgtcgccaaagtgacaggcggtgcggcctccaagctctctaagatccgagtcgtccggaaatccattgcccgtgttctcacagttattaaccagactcagaaagaaaacctcaggaaattctacaagggcaagaagtacaagcccctggacctgcggcctaagaagacacgtgccatgcgccgccggctcaacaagcacgaggagaacctgaagaccaagaagcagcagcggaaggagcggctgtacccgctgcggaagtacgcggtcaaggcctgaggggcgcattgtcaataaagcacagctggctgagaaaaaaaaaaaaaaagaatnataataatatttattataatttaacatttaatatatttttacttatatcttttttatatattttatttattttaatttttactaatccccttcttttacaccttccccctcctcttccct

SEQ ID NO: 375782 - DNA, 541 bp, Homo sapiens
tactactaaattcgcggcccgtcgacgcggcgttggcggcttgtgcagcaatggtgagagctgcggaatcgggcgccatccgagcgctgccaagatcaaggctcgagatcttcgcgggaagaagaaggaggagctgctgaaacagctggacgacctgaaggtggagctgtcccagctgcgcgtcgccaaagtgacaggcggtgcggcctccaagctctctaagatccgagtcgtccggaaatccattgcccgtgttctcacagttattaaccagactcagaaagaaaacctcaggaaattctacaagggcaagaagtacaagcccctggacctgcggcctaagaagacacgtgccatgcgccgccggctcaacaagcacgaggagaacctgaagaccaagaagcagcagcggaaggagcggctgtacccgctgcggaagtacgcggtcaaggcctgaggggcgcattgtcaataaagcacagctggctgagaaaaaaaaaaagtcgacgcggccgcgaatttagtagtagtaggcggccgc

SEQ ID NO: 375783 - DNA, 793 bp, Homo sapiens
ctcaaggatccttaattatattaatcccccccccccccccccccccgctctttccctcggagcgggcggcggcgttggcggcttgtgcagcaatggccaagatcaaggctcgagatcttcgcgggaagaagaaggaggagctgctgaaacagctggacgacctgaaggtggagctgtcccagctgcgcgtcgccaaagtgacaggcggtgcggcctccaagctctctaagatgtaagtgaggcggccggatcacagccctcgtgggtggggagcacgtgtgcatcgggatcgtcggaggatttcaaagttggcttaaggagctggccgcttagatgcccactccgtgcatcctggcgcgcatgggagacccgttgtgtgcttagcctcttacctgccttgaccttgcggtccttgtgcctggaatgcatccccggagacccatcttaatgctgccttcaaagcctacccggaccccttccttccgcttcccaccaacacttgagtttttaacccccttggcagccgagtcgtccggaaatccattgcccgtgttctcacagttattaaccagactcagaaagaaaacctcaggaaattctacaagggcaagaagtacaagcccctggacctgcggcctaagaagacacgtgccatgcgccgccggctcaacaagcacgaggagaacctgaagaccaagaagcagcagcggaaggagcggctgtacccgctgcggaagtacgcggtcaaggcctgaggggcgcattgtcaataaagcacagctggctgagaaaa

SEQ ID NO: 375784 - DNA, 493 bp, Homo sapiens
ctcaaggatccttaattatattaatcccccccccccccccccccccgctctttccctcggagcgggcggcggcgttggcggcttgtgcagcaatggccaagatcaaggctcgagatcttcgcgggaagaagaaggaggagctgctgaaacagctggacgacctgaaggtggagctgtcccagctgcgcgtcgccaaagtgacaggcggtgcggcctccaagctctctaagatccgagtcgtccggaaatccattgcccgtgttctcacagttattaaccagactcagaaagaaaacctcaggaagggcaagaagtacaagcccctggacctgcggcctaagaagacacgtgccatgcgccgccggctcaacaagcacgaggagaacctgaagaccaagaagcagcagcggaaggagcggctgtacccgctgcggaagtacgcggtcaaggcctgaggggcgcattgtcaataaagcacagctggctgagaaaa

SEQ ID NO: 375785 - DNA, 441 bp, Homo sapiens
ctcaaggatccttaattatattaatcccccccccccccccccccccgctctttccctcggagcgggcggcggcgttggcggcttgtgcagcaatggccaagatcaaggctcgagatcttcgcgggaagaagaaggaggagctgctgaaacagctggacgacctgaaggtggagctgtcccagctgcgcgtcgccaaagtgacaggcggtgcggcctccaagctctctaagatccgagtcgtccggaaatccattgcccgtgttctcacagttattaaccagactcagaaagaaaacctcaggaagggcaagaagtacaagcccctggacctgcggcctaagaagacacgtgccatgcgccgccggctcaacaagcacgagagaacctgaagaccagaacagcacggaagacgctgtaccctgcgaatacaggtcagcctga

SEQ ID NO: 375786 - DNA, 472 bp, Homo sapiens
ctcaaggatccttaattatattaatcccccccccccccccccccccgctctttccctcggagcgggcggcggcgttggcggcttgtgcagcaatggccaagatcaaggctcgagatcttcgcgggaagaagaaggaggagctgctgaaacagctggacgacctgaaggtggagctgtcccagctgcgcgtcgccaaagtgacaggcggtgcggcctccaagctctctaagatccgagtcgtccggaaatccattgcccgtgttctcacagttattaaccagactcagaaagaaaacctcaggagccggcgcgttgggggggacaggaagacactgggctttccaggatagcttgcttcagctcgtagaacacagcagagtcctcttttgtgaggaaggtgatggccaccccactcttgcctgctcgtcccgtgcggccaatgcggtggatgtaatcttcaatatttttggcc

SEQ ID NO: 375787 - DNA, 390 bp, Homo sapiens
ctcaaggatccttaattatattaatcccccccccccccccccccccgctctttccctcggagcgggcggcggcgttggcggcttgtgcagcaatggccaagatcaaggctcgagatcttcgcgggaagaagaaggaggagctgctgaaacagctggacgacctgaaggtggagctgtcccagctgcgcgtcgccaaagtgacaggcggtgcggcctccaagctctctaagatccgagtcgtccggaaatccattgcccgtgttctcacagttattaaccagactcagaaagaaaacctcaggaaattctacaagggcaagaagtacaagcccctggacctgggcctaagagacaggcccttgggcgcggttcacagcacgggggacctga

SEQ ID NO: 375788 - DNA, 485 bp, Homo sapiens
  misc_feature (18)..(18): n is a, c, g, or t
aattcgcggccgacacgnctgcgagaagacgacagaaggggggagcgggcggcggcgttggcggcttgtgcagcaatggccaagatcaaggctcgagatcttcgcgggaagaagaaggaggagctgctgaaacagctggacgacctgaaggtggagctgtcccagctgcgcgtcgccaaagtgacaggcggtgcggcctccaagctctctaagatccgagtcgtccggaaatccattgcccgtgttctcacagttattaaccagactcagaaagaaaacctcaggaaattctacaagggcaagaagtacaagcccctggacctgcggcctaagaagacacgtgccatgcgccgccggctcaacaagcacgaggagaacctgaagaccaagaagcagcagcggaaggagcggctgtacccgctgcggaagtacgcggtcaaggcctgaggggcgcattgtcaataaagcacagctggctgagaaaa

SEQ ID NO: 375789 - DNA, 531 bp, Homo sapiens
cagcacgttcttcctctgaggacctttatataagccccctatacccccagaggaatgcatccagaactttaaacaggctgggtcaacaacaaggggcgcggcgttggcggcttgtgcagcaatggccaagatcaaggctcgagatcttcgcgggaagaagaaggaggagctgctgaaacagctggacgacctgaaggtggagctgtcccagctgcgcgtcgccaaagtgacaggcggtgcggcctccaagctctctaagatccgagtcgtccggaaatccattgcccgtgttctcacagttattaaccagactcagaaagaaaacctcaggaaattctacaagggcaagaagtacaagcccctggacctgcggcctaagaagacacgtgccatgcgccgccggctcaacaagcacgaggagaacctgaagaccaagaagcagcagcggaaggagcggctgtacccgctgcggaagtacgcggtcaaggcctgaggggcgcattgtcaataaagcacagctggctgagaaaa

SEQ ID NO: 375790 - DNA, 722 bp, Homo sapiens
  misc_feature (542)..(542): n is a, c, g, or t
cagcacgttcttcctctgaggacctttatataagccccctatacccccagaggaatgcatccagaactttaaacaggctgggtcaacaacaaggggcgcggcgttggcggcttgtgcagcaatggccaagatcaaggctcgagatcttcgcgggaagaagaaggaggagctgctgaaacagctggacgacctgaaggtggagctgtcccagctgcgcgtcgccaaagtgacaggcggtgcggcctccaagctctctaagatccgagtcgtccggaaatccattgcccgtgttctcacagttattaaccagactcagaaagaaaacctcaggaaattctacaagggcaagaagtacaagcccctggacctgcggcctaagaagacacgtgccatgcgccgccggctcaacaagcacgaggagaacctgaagaccaagaagcagcagcggaaggagcggctgtacccgctgcggaagtacgcggtcaaggcctgaggggcgcattgtcaataaagcacagctggctgagaaaaaaaaaaaaaanaaaaaaaaaaaaacccctgttgggccgccttggcccaatcgattctttactccgacaaacttttgccttgcggcccgaatttgagcccacttgggccattcgccctataggggggcgtattaaaaatacttggccgccggttaaaacccgtggcggggaaaacacccggggtgccccact

SEQ ID NO: 375791 - DNA, 673 bp, Homo sapiens
gcccgccgccacccggcagtagttgcggaggtcagccccgcctacttcctctttccctcggagcgggcggcggcgttggcggcttgtgcagcaatggccaagatcaaggctcgagatcttcgcgggaagaagaaggaggagctgctgaaacagctggacgacctgaaggtggagctgtcccagctgcgcgtcgccaaagtgacaggcggtgcggcctccaagctctctaagatgtaagtgaggcggccggatcacagccctcgtgggtggggagcacgtgtgcatcgggatcgtcggaggatttcaaagttggcttaaggagctggccgcttagatgcccactccgtgcatcctggcgcgcatgggagacccgttgtgtgcttagcctcttacctgccttgaccttgcggtccttgtgcctggaatgcatccccggagacccatcttaatgctgccttcaaagcctacccggaccccttccttccgcttcccaccaacacttgagtttttaacccccttggcaggtgggtggcttgcaccctggagtggcagcgtaagttattttacatggctaagagtgcgggagacttgtgaaaggaacatgggtttggagttcatcaacctgggtacaaagtccacttctcaaaaaaaaattagatgggtgtggtggtac

SEQ ID NO: 375792 - DNA, 274 bp, Homo sapiens
agagagagagagagagagagagagagagagagagagagagagagagagagagagagcaatggactcagaaagaaaacctcaggaagggcaagaagtacaagcccctggacctgcggcctaagaagacacgtgccatgcgccgccggctcaacaagcacgaggagaacctgaagaccaagaagcagcagcggaaggagcggctgtacccgctgcggaagtacgcggtcaaggcctgaggggcgcattgtcaataaagcacagctggctgagaaaa

SEQ ID NO: 375793 - DNA, 812 bp, Homo sapiens
agagagagagagagagagagagagagagagagagagagagagagagagagagagagcaatggccaagatcaaggctcgagatcttcgcgggaagaagaaggaggagctgctgaaacagctggacgacctgaaggtggagctgtcccagctgcgcgtcgccaaagtgacaggcggtgcggcctccaagctctctaagatccgagtcgtccggaaatccattgcccgtgttctcacagttattaaccagactcagaaagaaaacctcaggaaggcagcagctggtgggccctgcatacagatggacagagtactgcctcagcccccagcatgctcttgctaaccagagccgaggaattctacaagggcaagaagtacaagcccctggacctgcggcctaagaagacacgtgccatgcgccgccggctcaacaagcacgaggagaacctgaagaccaagaagcagcagcggaaggagcggctgtacccgctgcggaagtacgcggtcaaggcctgaggggcgcattgtcaataaagcacagctggctgagaaaaaaaaaaaaaaaaaaaaaaaaaaaaaaaaaaaaccgggggatcatggggggggggggacacaaaggcgacttcggaagggcccctggggccatcagagtgtttccgggaacacaactttccgttgctcacaagcgggcgaaactcgggcgggggcccaaataggggggcgacaaacatacgcaaaccccggtaccgggataatgcacgtcctcgaaacacaccaagaaacaaaacaaacacacaccacaacacaacaaagag

SEQ ID NO: 375794 - DNA, 840 bp, Homo sapiens
  misc_feature (18)..(18): n is a, c, g, or t
aattcgcggccgacacgnctgcgagaagacgacagaaggggggagcgggcggcggcgttggcggcttgtgcagcaatggccaagatcaaggctcgagatcttcgcgggaagaagaaggaggagctgctgaaacagctggacgacctgaaggtggagctgtcccagctgcgcgtcgccaaagtgacaggcggtgcggcctccaagctctctaagatccgagtcgtccggaaatccattgcccgtgttctcacagttattaaccagactcagaaagaaaacctcaggaaattctacaagggcaagaagtacaagcccctggacctgcggcctaagaagacacgtgccatgcgccgccggctcaacaagcacgaggagaacctgaagaccaagaagcagcagcggaaggagcggctgtacccgctgcggaagtacgcggtcaaggcctgaggggcgcattgtcaataaagcacagctggctgagaaaaaaaaaaaaaaaaaaaaaaaaaaacaaaaaaaaaaaaaacaaaaaaaaaaaaaaaaaaaaaaaaaaaagggggggggggggcataaaataattccccgggggggggcaatttgggcccctttttttagaaaaaggggggcccacataatgaggggggagcgtatattaaaaacacagaagcggcgggcgcgggttaaacaacacgctggtggagagaaaaatggttgcaggcgatttaggaagaaaacccatttcgggggggggaatatgggaccacaactagaaatatacgtgaggagaaaatactaggagagagtggacccgtattttcgggaaactgtaggtatagtaattag

SEQ ID NO: 375795 - DNA, 913 bp, Homo sapiens
  misc_feature (18)..(18): n is a, c, g, or t
aattcgcggccgacacgnctgcgagaagacgacagaaggggggagcgggcggcggcgttggcggcttgtgcagcaatggccaagatcaaggctcgagatcttcgcgggaagaagaaggaggagctgctgaaacagctggacgacctgaaggtggagctgtcccagctgcgcgtcgccaaagtgacaggcggtgcggcctccaagctctctaagatccgagtcgtccggaaatccattgcccgtgttctcacagttattaaccagactcagaaagaaaacctcaggaaattctacaagggcaagaagtacaagcccctggacctgcggcctaagaagacacgtgccatgcgccgccggctcaacaagcacgaggagaacctgaagaccaagaagcagcagcggaaggagcggctgtacccgctgcggaagtacgcggtcaaggcctgaggggcgcattgtcaataaagcacagctggctgagaaaaaaaaaaaaaaaaaaaaaaaaaaacaaaaaaaaaaaaaacaaaaaaaaaaaaaggggggggcggcaaaaaaaaaattcccccggggggccccaaatcggcgccccccgttttttgggcacaaggggccccccaaaaggggaccgccgaaaataaacaagccagaccaccaggggggagcgggtttatacacacgcgctggcggccgtgggaaacactcgtcactgctgtgacgaacattcgtggagaacagcgaccccatactcgcgggcgggggggcccaatttggtggcacacttctctccatacgaagaattataaaccctctagcggaagaattaaaacctttagctgttttatgggttgacaaccaacgccgatattgtgtcggcgagtaagagttgtgtccacgaaatagtttgaaatttcag

SEQ ID NO: 375796 - DNA, 721 bp, Homo sapiens
  misc_feature (18)..(18): n is a, c, g, or t
aattcgcggccgacacgnctgcgagaagacgacagaaggggggagcgggcggcggcgttggcggcttgtgcagcaatggccaagatcaaggctcgagatcttcgcgggaagaagaaggaggagctgctgaaacagctggacgacctgaaggtggagctgtcccagctgcgcgtcgccaaagtgacaggcggtgcggcctccaagctctctaagatccgagtcgtccggaaatccattgcccgtgttctcacagttattaaccagactcagaaagaaaacctcaggaaattctacaagggcaagaagtacaagcccctggacctgcggcctaagaagacacgtgccatgcgccgccggctcaacaagcacgaggagaacctgaagaccaagaagcagcagcggaaggagcggctgtacccgctgcggaagtacgcggtcaaggcctgaggggcgcattgtcaataaagcacagctggctgagaaaaaaaaaaaaaaaaaaaaaaaaaaatctggtcaagtggagatttttaagaacttcctttttaagttgtaaaccttttattacaaatttaacacatgaagttcttaaaaatctcaattgaccagattatgacacagtttaacaacttcatttgtaattctgtactaacaagtttacaacctggattttttgcacaccaagtcaacaaatctgcaagccacctgttaatacggtcttaac

SEQ ID NO: 375797 - DNA, 698 bp, Homo sapiens
  misc_feature (18)..(18): n is a, c, g, or t
  misc_feature (510)..(510): n is a, c, g, or t
  misc_feature (525)..(525): n is a, c, g, or t
aattcgcggccgacacgnctgcgagaagacgacagaaggggggagcgggcggcggcgttggcggcttgtgcagcaatggccaagatcaaggctcgagatcttcgcgggaagaagaaggaggagctgctgaaacagctggacgacctgaaggtggagctgtcccagctgcgcgtcgccaaagtgacaggcggtgcggcctccaagctctctaagatccgagtcgtccggaaatccattgcccgtgttctcacagttattaaccagactcagaaagaaaacctcaggaaattctacaagggcaagaagtacaagcccctggacctgcggcctaagaagacacgtgccatgcgccgccggctcaacaagcacgaggagaacctgaagaccaagaagcagcagcggaaggagcggctgtacccgctgcggaagtacgcggtcaaggcctgaggggcgcattgtcaataaagcacagctggctgagaaaaaaaaaaaaaaaaaaaaaaaaaaaanaaaaaaaaaaaaaanaaaaaaaagaaacaaaagaaaaccccggagcgacacaaagagagagacgacgcacacaaagaggaacaaagacgcggcaaatagaaaacaagagaccacgacacacaaatctatagcaacaaagggggagaaaccgcggggaacccataaaggggacacaaaaaacgcgaaag

SEQ ID NO: 375798 - DNA, 730 bp, Homo sapiens
  misc_feature (18)..(18): n is a, c, g, or t
aattcgcggccgacacgnctgcgagaagacgacagaaggggggagcgggcggcggcgttggcggcttgtgcagcaatggccaagatcaaggctcgagatcttcgcgggaagaagaaggaggagctgctgaaacagctggacgacctgaaggtggagctgtcccagctgcgcgtcgccaaagtgacaggcggtgcggcctccaagctctctaagatccgagtcgtccggaaatccattgcccgtgttctcacagttattaaccagactcagaaagaaaacctcaggaaattctacaagggcaagaagtacaagcccctggacctgcggcctaagaagacacgtgccatgcgccgccggctcaacaagcacgaggagaacctgaagaccaagaagcagcagcggaaggagcggctgtacccgctgcggaagtacgcggtcaaggcctgaggggcgcattgtcaataaagcacagctggctgagaaaaaaaaaaaaaaaaaaaaaaaaaaaacaaaaaaaaaaaaaacaaaaaaaaaaaaacccgcgagagagcctatctattggcgcggggcgggagaaaaaagagaggacaagaaaggggcgaagagggcgccaaagggtggtccccggagaccccattttctttgggcacaaggggggaaaacttcggcggggccccccaaaaagagagggcgtaatattccgaaaaccccggggaaacccggttaaggt

SEQ ID NO: 375799 - DNA, 531 bp, Homo sapiens
  misc_feature (18)..(18): n is a, c, g, or t
aattcgcggccgacacgnctgcgagaagacgacagaaggggggagcgggcggcggcgttggcggcttgtgcagcaatggccaagatcaaggctcgagatcttcgcgggaagaagaaggaggagctgctgaaacagctggacgacctgaaggtggagctgtcccagctgcgcgtcgccaaagtgacaggcggtgcggcctccaagctctctaagatccgagtcgtccggaaatccattgcccgtgttctcacagttattaaccagactcagaaagaaaacctcaggaaattctacaagggcaagaagtacaagcccctggacctgcggcctaagaagacacgtgccatgcgccgccggctcaacaagcacgaggagaacctgaagaccaagaagcagcagcggaaggagcggctgtacccgctgcggaagtacgcggtcaaggcctgaggggcgcattgtcaataaagcacagctggctgagaaaaaaaaaaagtcgacgcggccgcgaatttagtagtagtaggcggccgc

SEQ ID NO: 375800 - DNA, 655 bp, Homo sapiens
  misc_feature (18)..(18): n is a, c, g, or t
aattcgcggccgacacgnctgcgagaagacgacagaaggggggagcgggcggcggcgttggcggcttgtgcagcaatggccaagatcaaggctcgagatcttcgcgggaagaagaaggaggagctgctgaaacagctggacgacctgaaggtggagctgtcccagctgcgcgtcgccaaagtgacaggcggtgcggcctccaagctctctaagatccgagtcgtccggaaatccattgcccgtgttctcacagttattaaccagactcagaaagaaaacctcaggaaattctacaagggcaagaagtacaagcccctggacctgcggcctaagaagacacgtgccatgcgccgccggctcaacaagcacgaggagaacctgaagaccaagaagcagcagcggaaggagcggctgtacccgctgcggaagtacgcggtcaaggcctgaggggcgcattgtcaataaagcacagctggctgagaaaatgtcgacccctttggccacattaatttagactccgccaaggctaaccaaggcggcccatttccacaaaacttgtttcgcccaattttgggcggggcccaaatacgggccattgtgccaatgccctattggggaacctttcaatccccggccgagttttcggccgcccggc

SEQ ID NO: 375801 - DNA, 663 bp, Homo sapiens
  misc_feature (18)..(18): n is a, c, g, or t
aattcgcggccgacacgnctgcgagaagacgacagaaggggggagcgggcggcggcgttggcggcttgtgcagcaatggccaagatcaaggctcgagatcttcgcgggaagaagaaggaggagctgctgaaacagctggacgacctgaaggtggagctgtcccagctgcgcgtcgccaaagtgacaggcggtgcggcctccaagctctctaagatccgagtcgtccggaaatccattgcccgtgttctcacagttattaaccagactcagaaagaaaacctcaggaaattctacaagggcaagaagtacaagcccctggacctgcggcctaagaagacacgtgccatgcgccgccggctcaacaagcacgaggagaacctgaagaccaagaagcagcagcggaaggagcggctgtacccgctgcggaagtacgcggtcaaggcctgaggggcgcattgtcaataaagcacagctggctgagaaaactaccactctacctctcttttctctcctcacacctctatcatcccttccccctcaatccaccatcctggggttttacacaattcccctaatcataacaattgttgtctccctctggccacccttattttacctccgccactctttcctttgggccgccatttggggcctttctgctcc

SEQ ID NO: 375802 - DNA, 845 bp, Homo sapiens
  misc_feature (18)..(18): n is a, c, g, or t
  misc_feature (508)..(508): n is a, c, g, or t
  misc_feature (673)..(673): n is a, c, g, or t
  misc_feature (833)..(833): n is a, c, g, or t
aattcgcggccgacacgnctgcgagaagacgacagaaggggggagcgggcggcggcgttggcggcttgtgcagcaatggccaagatcaaggctcgagatcttcgcgggaagaagaaggaggagctgctgaaacagctggacgacctgaaggtggagctgtcccagctgcgcgtcgccaaagtgacaggcggtgcggcctccaagctctctaagatccgagtcgtccggaaatccattgcccgtgttctcacagttattaaccagactcagaaagaaaacctcaggaaattctacaagggcaagaagtacaagcccctggacctgcggcctaagaagacacgtgccatgcgccgccggctcaacaagcacgaggagaacctgaagaccaagaagcagcagcggaaggagcggctgtacccgctgcggaagtacgcggtcaaggcctgaggggcgcattgtcaataaagcacagctggctgagaaaagaagcagcagcggaaggagcggntgtacccgctgcggaagtacgcggcaaggcctgaggggcgcattgtcaataaagcacagctggctgagaaaacaaaaactacacgacacatacaaacaccaactaatccctccatatatatcaacccaaacaccaaacctgttggggggggcccggccaaaaagntttacacacatttttggcggggccgcccatgtatgatgatcgtctcactgtgtccagaaacgtcggcctgaacggggtgtggttccacaaaaaaacggggggccggcgtgaaaaacaggggtgggctttgctccacgcccgctaccccccgcgcgtcggntaattcgctgat

SEQ ID NO: 375803 - DNA, 1028 bp, Homo sapiens
tactactaaattcgcggcccgtcgacgcggcgttggcggcttgtgcagcaatggtgagagctgcggaatcgggcgccatccgagcgctgtgaggcgcgggggttggggaaggcggtgcgggctgagcccgcggattctatctgccacctaggcctgtggggcgccgcgcagaatggtctggcgccaccacaacccgcctcttcgcttggcgccgggagaggcgcgcggcccgggcctgggttactctgcccaaggcacggccggcgagggagactgtcctgagccctggttggggctccggcgcactcgtagtcgatggcgagtcgcgcgcctttgggggctggccacgcaggtgaaggggatatggccccgcggcctggctgaggcacactctctcttgcgcgcaggccaagatcaaggctcgagatcttcgcgggaagaagaaggaggagctgctgaaacagctggacgacctgaaggtggagctgtcccagctgcgcgtcgccaaagtgacaggcggtgcggcctccaagctctctaagatccgagtcgtccggaaatccattgcccgtgttctcacagttattaaccagactcagaaagaaaacctcaggaaattctacaagggcaagaagtacaagcccctggacctgcggcctaagaagacacgtgccatgcgccgccggctcaacaagcacgaggagaacctgaagaccaagaagcagcagcggaaggagcggctgtacccgctgcggaagtacgcggtcaaggcctgaggggcgcattgtcaataaagcacagctggctgagaaaaaccaaacccaacacaacaacaagcaagaaacaaacacccagagtcaatagaggccgagcaagctttcatgggcggatcaagctcttgtgcaatcgccttgggagcgatacaatcagtgcgagtacaacgtcggactggaacctgggtacaataacgctgcagaatccctttgcgcgggtatcaaaggcgagaggccttcaagttgcactaagaa

SEQ ID NO: 375804 - DNA, 460 bp, Homo sapiens
ctcaaggatccttaattatattaatcccccccccccccccccccccgctctttccctcggagcgggcggcggcgttggcggcttgtgcagcaatggccaagatcaaggctcgagatcttcgcgggaagaagaaggaggagctgctgaaacagctggacgacctgaaggtggagctgtcccagctgcgcgtcgccaaagtgacaggcggtgcggcctccaagctctctaagatccgagtcgtccggaaatccattgcccgtgttctcacagttattaaccagactcagaaagaaaacctcaggactaagaagacacgtgccatgcgccgccggctcaacaagcacgaggagaacctgaagaccaagaagcagcagcggaaggagcggctgtacccgctgcggaagtacgcggtcaaggcctgaggggcgcattgtcaataaagcacagctggctgagaaaa

SEQ ID NO: 375805 - DNA, 873 bp, Homo sapiens
  misc_feature (536)..(536): n is a, c, g, or t
  misc_feature (701)..(701): n is a, c, g, or t
  misc_feature (861)..(861): n is a, c, g, or t
ctcaaggatccttaattatattaatcccccccccccccccccccccgctctttccctcggagcgggcggcggcgttggcggcttgtgcagcaatggccaagatcaaggctcgagatcttcgcgggaagaagaaggaggagctgctgaaacagctggacgacctgaaggtggagctgtcccagctgcgcgtcgccaaagtgacaggcggtgcggcctccaagctctctaagatccgagtcgtccggaaatccattgcccgtgttctcacagttattaaccagactcagaaagaaaacctcaggaagggcaagaagtccaagcccctgacctgagtgtttcttctgagtccggaaatccattggcccgtgttctcacagttattaaccagactcagaaagaaaacctcaggaaattctacaagggcaagaagtacaagcccctggacctgcggctaagaagacacgtgccagtggccgcgggttcaacaagcacgagggagaacctgaagaccaagaagcagcagcggaaggagcggntgtacccgctgcggaagtacgcggcaaggcctgaggggcgcattgtcaataaagcacagctggctgagaaaacaaaaactacacgacacatacaaacaccaactaatccctccatatatatcaacccaaacaccaaacctgttggggggggcccggccaaaaagntttacacacatttttggcggggccgcccatgtatgatgatcgtctcactgtgtccagaaacgtcggcctgaacggggtgtggttccacaaaaaaacggggggccggcgtgaaaaacaggggtgggctttgctccacgcccgctaccccccgcgcgtcggntaattcgctgat

SEQ ID NO: 375806 - DNA, 1066 bp, Homo sapiens
ctcaaggatccttaattatattaatcccccccccccccccccccccgctctttccctcggagcgggcggcggcgttggcggcttgtgcagcaatggccaagatcaaggctcgagatcttcgcgggaagaagaaggaggagctgctgaaacagctggacgacctgaaggtggagctgtcccagctgcgcgtcgccaaagtgacaggcggtgcggcctccaagctctctaagatccgagtcgtccggaaatccattgcccgtgttctcacagtaagaagacacgtgccatgcgccgccgggtcaacaagccaccgagggagaacctggagaaccaagaagcagacagacggaaggagacggggtgtgacccgcgtgtgcggggagtgatacgccgggtaagggcctgagggggcgcaattggtcaattaaaggcaccagctgggcttgagaaaacaaaaacacaacaaaaacaacacacaaagtcacaaacaaactaacaaaaaacaaccaaacaaaaaaaaaaccaaaacccgcggccgagacctaccctacaagcgacggggcaacaacaagaaagagagctgacacgagaaagcgcgccgacccgcggcgaaccagatgacgagctgcggcacagacccacacatgcttgcttctggacgacccacgggtgctcaaacaacaagccgggcctccaccaatcatagtggagtgaggcgacgaatgatatgacccgataatgcaccgaggagtaccagcccgagtatagaataagagggggcggcgcacaagcccacagccgacgccgacgacccggcatcaccgaccgagcgccaggcaaagcgagaggaccctacagacgcacacacacaaaccgatgccagacggacgaagacaacacacgcagaagccacgacacgcgaagctcagtcatgcaccacacctacgtgagcacacgaccactcactatggtaagtcaccacgcgggccaagctatgtctacacgatcaacgcagcaagacgccaccgacatcaacacaggacactacccgacaatagctaccagg

SEQ ID NO: 375807 - DNA, 672 bp, Homo sapiens
ctcaaggatccttaattatattaatcccccccccccccccccccccgctctttccctcggagcgggcggcggcgttggcggcttgtgcagcaatggccaagatcaaggctcgagatcttcgcgggaagaagaaggaggagctgctgaaacagctggacgacctgaaggtggagctgtcccagctgcgcgtcgccaaagtgacaggcggtgcggcctccaagctctctaagatgtaagtgaggcggccggatcacagccctcgtgggtggggagcacgtgtgcatcgggatcgtcggaggatttcaaagttggcttaaggagctggccgcttagatgcccactccgtgcatcctggcgcgcatgggagacccgttgtgtgcttagcctcttacctgccttgaccttgcggtccttgtgcctggaatgcatccccggagacccatcttaatgctgccttcaaagcctacccggaccccttccttccgcttcccaccaacacttgagtttttaacccccttggcaggtgggtggcttgcaccctggagtggcagcgtaagttattttacatggctaagagtgcgggagacttgtgaaaggaacatgggtttggagttcatcaacctgggtacaaagtccacttctcaaaaaaaaattagatgggtgtggtggtac

SEQ ID NO: 375808 - DNA, 1871 bp, Homo sapiens
ccagcatcccacgggtataagatggccagaggcggctgcctgctgctctgcaggtaccatggagctgagctataggctcttcatctgcctcctgctctggggtagtactgagctgtgctacccccaacccctctggctcttgcagggtggagccagccatcctgagacgtccgtacagcccgtactggtggagtgtcaggaggccactctgatggtcatggtcagcaaagacctttttggcaccgggaagctcatcagggctgctgacctcaccttgggcccagaggcctgtgagcctctggtctccatggacacagaagatgtggtcaggtttgaggttggactccacgagtgtggcaacagcatgcaggtaactgacgatgccctggtgtacagcaccttcctgctccatgacccccgccccgtgggaaacctgtccatcgtgaggactaaccgcgcagagattcccatcgagtgccgctaccccaggcagggcaatgtgagcagccaggccatcctgcccacctggttgcccttcaggaccacggtgttctcagaggagaagctgactttctctctgcgtctgatggaggagaactggaacgctgagaagaggtcccccaccttccacctgggagatgcagcccacctccaggcagaaatccacactggcagccacgtgccactgcggttgtttgtggaccactgcgtggccacaccgacaccagaccagaatgcctccccttatcacaccatcgtggacttccatggctgtcttgtcgacggtctcactgatgcctcttctgcattcaaagttcctcgacccgggccagatacactccagttcacagtggatgtcttccactttgctaatgactccagaaacatgatatacatcacctgccacctgaaggtcaccctagctgagcaggacccagatgaactcaacaaggcctgttccttcagcaagccttccaacagctggttcccagtggaaggctcggctgacatctgtcaatgctgtaacaaaggtgactgtggcactccaagccattccaggaggcagcctcatgtcatgagccagtggtccaggtctgcttcccgtaaccgcaggcatgtgacagaagaagcagatgtcaccgtggggccactgatcttcctggacaggaggggtgaccatgaagtagagcagtgggctttgccttctgacacctcagtggtgctgctgggcgtaggcctggctgtggtggtgtccctgactctgactgctgttatcctggttctcaccaggaggtgtcgcactgcctcccaccctgtgtctgcttccgaataaaaaaaaagaagaaagcaatatctggtcgtggtgtggtggtcaggtggaaggtcagaattagtactgactgtgtcgggtggggacgactgtataccacccgccccgtgcactcacatagcatagtccagcaagcactactgtgtctctactgtaaacagggcagggttcatgtccttagacaactataatctatcacctccatgggaaccaacatggaaactcttagatgaaggtcagtctggctggacccaccttacttctaggctagcaaagaatcttatatctctggcccccatggatttgactctagacatgggagtggggaggagagagcttccaggcccacttctccaaggcaagcaggcaggcagctctgtccagatgctagaggccagaaggccagtcatgactgggccctcccagtagggcagtgatcagagcactgcttctgcctggtcttagctgtcaccttgggcttgaagctattcttgggacatgttggtatgaacttgtcaaagctgcagcaaggggtgactgg

SEQ ID NO: 375809 - DNA, 701 bp, Homo sapiens
  misc_feature (588)..(588): n is a, c, g, or t
  misc_feature (701)..(701): n is a, c, g, or t
ctctgcgtctgatggaggagaagaactggaacgctgagaagaggtcccccaccttccacctgggagatgcagcccacctccaggcagaaatccacactggcagccacgtgccactgcggttgtttgtggaccactgcgtggccacaccgacaccagaccagaatgcctccccttatcacaccatcgtggacttccatggctgtcttgtcgacggtctcactgatgcctcttctgcattcaaagttcctcgacccgggccagatacactccagttcacagtggatgtcttccactttgctaatgactccagaaacatgtgatatacatcacctgccacctgaaggtcaccctagctgagcaggacccagatgaactcaacaaggcctgttccttcagcaagccttccaacagctggttcccagtggaaggctcggctgacatctgtcaatgctgtaacaaaggtgactgtggcactccaagccattccaggaggcagcctcatgtcatgagccagtggtccaggtctgcttcccgtaaccgcaggcatgttgtgacagaagaacctaatgggccagcgaggctcctgancttcttgtaaggagggggagcactgattccacacttggctctgccttcgacccttatggcgctgtggacgttgcatggatgtggcgatgacctatttagcccgagatttaatn

SEQ ID NO: 375810 - DNA, 684 bp, Homo sapiens
ctctgcgtctgatggaggagaagaactggaacgctgagaagaggtcccccaccttccacctgggagatgcagcccacctccaggcagaaatccacactggcagccacgtgccactgcggttgtttgtggaccactgcgtggccacaccgacaccagaccagaatgcctccccttatcacaccatcgtggacttccatggctgtctcgtctacggtctcattgatgcctcttacgcatttaaagctcctcgacccgcgccgatccactcccttcacagcgtatgtcctccacttccctaacgactcccgaatcatgataccactcccctgcccactgaaggccactttttctgtgcctgcacctagatgacctacccaaggcccttgttctctcctacgcctttcaccatgtcgttcccctgtgaagagtcgttgacaccctcttatgctttaacaacgcgtccgggacatcctcgaccataccataagcgatcttttgcaccagcccatgcattacattggttcctttatccgcggcttgtgcgtaaccagcttctctccccgtgtgtcacttttcccctggacaagccgttcaaccggatctaaccaccgcttttatcatactaactaatcgatgcgcttggacgtccaggcaggatgcggaatttccgcatactttctctct

SEQ ID NO: 375811 - DNA, 400 bp, Homo sapiens
ccagcatcccacgggtataagatggccagaggcggctgcctgctgctctgcaggtaccatggagctgagctataggctcttcatctgcctcctgctctggggtagtactgagctgtgctacccccaacccctctggctcttgcagggtggagccagccatcctgagacgtccgtacagcccgtactggtggagtgtcaggaggccactctgatggtcatggtcagcaaagacctttttggcaccgggaagctcatcagggctgctgacctcaccttgggcccagaggcctgtgagcctctggtctccatggacacagaagatgtggtcaggtttgaggttggactccacgagtgtggcaacagcatgcaggctagaatgcaatggcacgatctccgctca

SEQ ID NO: 375812 - DNA, 1558 bp, Homo sapiens
tcctcgtggtggccgcagttgtgcacaccccagcccaggctctggcaggctgccaggcggggctcgccgccttcgcagtgcacgttgtccagcaggatgtgtccggtgccatagccgaagaaggcgttggtggtggcggccatggccgccccgcagcccagctgacgacagaccacagcggcatccggcagcccccagtcgtcgtcacacacggtgccccacaggccactgtgcaggatctccactcggccctgacacagggtggagccagccatcctgagacgtccgtacagcccgtactggtggagtgtcaggaggccactctgatggtcatggtcagcaaagacctttttggcaccgggaagctcatcagggctgctgacctcaccttgggcccagaggcctgtgagcctctggtctccatggacacagaagatgtggtcaggtttgaggttggactccacgagtgtggcaacagcatgcaggtaactgacgatgccctggtgtacagcaccttcctgctccatgacccccgccccgtgggaaacctgtccatcgtgaggactaaccgcgcagagattcccatcgagtgccgctaccccaggcagggcaatgtgagcagccaggccatcctgcccacctggttgcccttcaggaccacggtgttctcagaggagaagctgactttctctctgcgtctgatggaggagaactggaacgctgagaagaggtcccccaccttccacctgggagatgcagcccacctccaggcagaaatccacactggcagccacgtgccactgcggttgtttgtggaccactgcgtggccacaccgacaccagaccagaatgcctccccttatcacaccatcgtggacttccatggctgtcttgtcgacggtctcactgatgcctcttctgcattcaaagttcctcgacccgggccagatacactccagttcacagtggatgtcttccactttgctaatgactccagaaacatgatatacatcacctgccacctgaaggtcaccctagctgagcaggacccagatgaactcaacaaggcctgttccttcagcaagccttccaacagctggttcccagtggaaggctcggctgacatctgtcaatgctgtaacaaaggtgactgtggcactccaagccattccaggaggcagcctcatgtcatgagccagtggtccaggtctgcttcccgtaaccgcaggcatgtgacagaagaagcagatgtcaccgtggggccactgatcttcctggacaggaggggtgaccatgaagtagagcagtgggctttgccttctgacacctcagtggtgctgctgggcgtaggcctggctgtggtggtgtccctgactctgactgctgttatcctggttctcaccaggaggtgtcgcactgcctcccaccctgtgtctgcttccgaataaaaaaaaagggataatgcggcgtttccttaaggagggttatttatgatcctcgttactgactcctgcctctggtttatggtggggaaactgttttacttactcaagggggt

SEQ ID NO: 375813 - DNA, 1155 bp, Homo sapiens
aaaggaacataatttttagggttcccccagcgcccccctcggcgaattacggccccgggcacagccgaagaccccaggtggcctctagtgtccaaacaaggtcccacgcggcgcatggaccgccagcctcctccccccggtgcccctggcccccgggtttcaaggacaactcactttctccgcctctgatgaggagaacggaccctcaaaaagaactggaacgctgagaagaggtcccccaccttccacctgggagatgcagcccacctccaggcagaaatccacactggcagccacgtgccactgcggttgtttgtggaccactgcgtggccacaccgacaccagaccagaatgcctccccttatcacaccatcgtggacttccatggctgtcttgtcgacggtctcactgatgcctcttctgcattcaaagttcctcgacccgggccagatacactccagttcacagtggatgtcttccactttgctaatgactccagaaacatgatatacatcacctgccacctgaaggtcaccctagctgagcaggacccagatgaactcaacaaggcctgttccttcagcaagccttccaacagctggttcccagtggaaggctcggctgacatctgtcaatgctgtaacaaaggtgactgtggcactccaagccattccaggaggcagcctcatgtcatgagccagtggtccaggtctgcttcccgtaaccgcaggcatgtgacagaagaagcagatgtcaccgtggggccactgatcttcctggacaggaggggtgaccatgaagtagagcagtgggctttgccttctgacacctcagtggtgctgctgggcgtaggcctggctgtggtggtgtccctgactctgactgctgttatcctggttctcaccaggaggtgtcgcactgcctcccaccctgtgtctgcttccgaataaaaaaaaagaaacagaaaaagaaacaaacgcaacacgagaaagaaacaagaagaaaaagggggggggtcaaaaaccccgggggcacaaatggacagccagtttgtaaaggggccataggggaaataaaacaagggggggaaaacaggggagggaaagccggggctggggacacctctggggggcaggacccaccagaaagcggga

SEQ ID NO: 375814 - DNA, 1110 bp, Homo sapiens
  misc_feature (1)..(1): n is a, c, g, or t
ncggggggtaggagatagtatgtggtcttttatttatctacaagtttctacagttctgtgggagagggatataataaaaatgttaactaccccacaaggtcactctccaatattattgcagacggactctctagcgattcgcatggttttatttgggtttgatgcacaagattgaatcactgagagatggtctcccccctcccatttgatagaatcagctcacctgctgaagaaatccacactggcagccacgtgccactgcggttgtttgtggaccactgcgtggccacaccgacaccagaccagaatgcctccccttatcacaccatcgtggacttccatggctgtcttgtcgacggtctcactgatgcctcttctgcattcaaagttcctcgacccgggccagatacactccagttcacagtggatgtcttccactttgctaatgactccagaaacatgatatacatcacctgccacctgaaggtcaccctagctgagcaggacccagatgaactcaacaaggcctgttccttcagcaagccttccaacagctggttcccagtggaaggctcggctgacatctgtcaatgctgtaacaaaggtgactgtggcactccaagccattccaggaggcagcctcatgtcatgagccagtggtccaggtctgcttcccgtaaccgcaggcatgtgacagaagaagcagatgtcaccgtggggccactgatcttcctggacaggaggggtgaccatgaagtagagcagtgggctttgccttctgacacctcagtggtgctgctgggcgtaggcctggctgtggtggtgtccctgactctgactgctgttatcctggttctcaccaggaggtgtcgcactgcctcccaccctgtgtctgcttccgaataaaaaaaaagaaacagaaaaagaaacaaacgcaacacgagaaagaaacaagaagaaaaagggggggggtcaaaaaccccgggggcacaaatggacagccagtttgtaaaggggccataggggaaataaaacaagggggggaaaacaggggagggaaagccggggctggggacacctctggggggcaggacccaccagaaagcggga

SEQ ID NO: 375815 - DNA, 1096 bp, Homo sapiens
tgggcgaaggagcaaggtatcagtgtgagctttcagctgcccaaaaagggatcacaggcggcgaatgtaacagcaggccttctgcccagctggtgccgttaggacccggtgttctaaaggagaagtgcacttctttttgcgtctgaggaggaagaactggaacgctgagaagaggtcccccaccttccacctgggagatgcagcccacctccaggcagaaatccacactggcagccacgtgccactgcggttgtttgtggaccactgcgtggccacaccgacaccagaccagaatgcctccccttatcacaccatcgtggacttccatggctgtcttgtcgacggtctcactgatgcctcttctgcattcaaagttcctcgacccgggccagatacactccagttcacagtggatgtcttccactttgctaatgactccagaaacatgatatacatcacctgccacctgaaggtcaccctagctgagcaggacccagatgaactcaacaaggcctgttccttcagcaagccttccaacagctggttcccagtggaaggctcggctgacatctgtcaatgctgtaacaaaggtgactgtggcactccaagccattccaggaggcagcctcatgtcatgagccagtggtccaggtctgcttcccgtaaccgcaggcatgtgacagaagaagcagatgtcaccgtggggccactgatcttcctggacaggaggggtgaccatgaagtagagcagtgggctttgccttctgacacctcagtggtgctgctgggcgtaggcctggctgtggtggtgtccctgactctgactgctgttatcctggttctcaccaggaggtgtcgcactgcctcccaccctgtgtctgcttccgaataaaaaaaaagaaacagaaaaagaaacaaacgcaacacgagaaagaaacaagaagaaaaagggggggggtcaaaaaccccgggggcacaaatggacagccagtttgtaaaggggccataggggaaataaaacaagggggggaaaacaggggagggaaagccggggctggggacacctctggggggcaggacccaccagaaagcggga

SEQ ID NO: 375816 - DNA, 1076 bp, Homo sapiens
cttctcctctccaaaaaagggatccccgccggtcaattggcaaccaggccaccttgccccctgtgggcccttcgggaccatggtgttctaaaaaaaaagcgtcctccctctttgcgtggagaggagaaagccagaactggaacgctgagaagaggtcccccaccttccacctgggagatgcagcccacctccaggcagaaatccacactggcagccacgtgccactgcggttgtttgtggaccactgcgtggccacaccgacaccagaccagaatgcctccccttatcacaccatcgtggacttccatggctgtcttgtcgacggtctcactgatgcctcttctgcattcaaagttcctcgacccgggccagatacactccagttcacagtggatgtcttccactttgctaatgactccagaaacatgatatacatcacctgccacctgaaggtcaccctagctgagcaggacccagatgaactcaacaaggcctgttccttcagcaagccttccaacagctggttcccagtggaaggctcggctgacatctgtcaatgctgtaacaaaggtgactgtggcactccaagccattccaggaggcagcctcatgtcatgagccagtggtccaggtctgcttcccgtaaccgcaggcatgtgacagaagaagcagatgtcaccgtggggccactgatcttcctggacaggaggggtgaccatgaagtagagcagtgggctttgccttctgacacctcagtggtgctgctgggcgtaggcctggctgtggtggtgtccctgactctgactgctgttatcctggttctcaccaggaggtgtcgcactgcctcccaccctgtgtctgcttccgaataaaaaaaaagaaacagaaaaagaaacaaacgcaacacgagaaagaaacaagaagaaaaagggggggggtcaaaaaccccgggggcacaaatggacagccagtttgtaaaggggccataggggaaataaaacaagggggggaaaacaggggagggaaagccggggctggggacacctctggggggcaggacccaccagaaagcggga

SEQ ID NO: 375817 - DNA, 1058 bp, Homo sapiens
ttcaattcccaaaaggatacctcggcgggggtagggagagcgagcattcccgcccctggtgcccttcgggccaggtgttttagaagaaagactacttctttctgtgttgaggagagaactggaacgctgagaagaggtcccccaccttccacctgggagatgcagcccacctccaggcagaaatccacactggcagccacgtgccactgcggttgtttgtggaccactgcgtggccacaccgacaccagaccagaatgcctccccttatcacaccatcgtggacttccatggctgtcttgtcgacggtctcactgatgcctcttctgcattcaaagttcctcgacccgggccagatacactccagttcacagtggatgtcttccactttgctaatgactccagaaacatgatatacatcacctgccacctgaaggtcaccctagctgagcaggacccagatgaactcaacaaggcctgttccttcagcaagccttccaacagctggttcccagtggaaggctcggctgacatctgtcaatgctgtaacaaaggtgactgtggcactccaagccattccaggaggcagcctcatgtcatgagccagtggtccaggtctgcttcccgtaaccgcaggcatgtgacagaagaagcagatgtcaccgtggggccactgatcttcctggacaggaggggtgaccatgaagtagagcagtgggctttgccttctgacacctcagtggtgctgctgggcgtaggcctggctgtggtggtgtccctgactctgactgctgttatcctggttctcaccaggaggtgtcgcactgcctcccaccctgtgtctgcttccgaataaaaaaaaagaaacagaaaaagaaacaaacgcaacacgagaaagaaacaagaagaaaaagggggggggtcaaaaaccccgggggcacaaatggacagccagtttgtaaaggggccataggggaaataaaacaagggggggaaaacaggggagggaaagccggggctggggacacctctggggggcaggacccaccagaaagcggga

SEQ ID NO: 375818 - DNA, 1587 bp, Homo sapiens
ggttggcgcggggccacgcccccgggcgggttcaaccgcctcccgcgcccttgggtcacactgcgaccgtctgtccccactcctctctcgaccctccggaggcttccccacggatcgtggactttaccagatcggtttgtaatacacgtcagagacgctatccgatccatcaggcccagtattcctgtctgggggtacttcccacagtgtgctggaatggttatcacaagaaggctgtgctgtcccctcgcaactccaggatggtgtgtagcccagtgactctgaggatcgcccctcctgacagaagattttcgcgttctgcgataccagagcagataatcagctcaacactgtcctcaccatcaagtaatgccccagacccatgtgcaaaggagactgtactgagtgccctcaaagagaagaagaagaaaaggacagtggaggaagaagaccaaatattccttgatggccaggaaaataaaagaagctgtcttgtcgacggtctcactgatgcctcttctgcattcaaagttcctcgacccgggccagatacactccagttcacagtggatgtcttccactttgctaatgactccagaaacatgatatacatcacctgccacctgaaggtcaccctagctgagcaggacccagatgaactcaacaaggcctgttccttcagcaagccttccaacagctggttcccagtggaaggctcggctgacatctgtcaatgctgtaacaaaggtgactgtggcactccaagccattccaggaggcagcctcatgtcatgagccagtggtccaggtctgcttcccgtaaccgcaggcatgtgacagaagaagcagatgtcaccgtggggccactgatcttcctggacaggaggggtgaccatgaagtagagcagtgggctttgccttctgacacctcagtggtgctgctgggcgtaggcctggctgtggtggtgtccctgactctgactgctgttatcctggttctcaccaggaggtgtcgcactgcctcccaccctgtgtctgcttccgaataaaaaaaaagaagaaagcaatatctggtcgtggtgtggtggtcaggtggaaggtcagaattagtactgactgtgtcgggtggggacgactgtataccacccgccccgtgcactcacatagcatagtccagcaagcactactgtgtctctactgtaaacagggcagggttcatgtccttagacaactataatctatcacctccatgggaaccaacatggaaactcttagatgaaggtcagtctggctggacccaccttacttctaggctagcaaagaatcttatatctctggcccccatggatttgactctagacatgggagtggggaggagagagcttccaggcccacttctccaaggcaagcaggcaggcagctctgtccagatgctagaggccagaaggccagtcatgactgggccctcccagtagggcagtgatcagagcactgcttctgcctggtcttagctgtcaccttgggcttgaagctattcttgggacatgttggtatgaacttgtcaaagctgcagcaaggggtgactgg

SEQ ID NO: 375819 - DNA, 1497 bp, Homo sapiens
ctcttgccgtctcctccccgcgcgtcctatagactatccactcggaactctgaatacttcatacaacacccttctttctcgctccgcccgcacacgccactcgcagctggctgcgcgacagccacccataccggccagacgcctggctctatcggtcagcggcgtcgcacgcccacgcccctattccttgtctcctatcaaacacccctcccgcacacagcaaggtcccgccgcctcccccccggcaaaccgagccacccactatgctgctaatccaccacggcaggccccggccctcctcggttcgcttgggacccctgtgggcccgacccgacacaaaaccaacaggcccccccttttccccccactatggacttccaaggcggttctggtagccctgtcttgtcgacggtctcactgatgcctcttctgcattcaaagttcctcgacccgggccagatacactccagttcacagtggatgtcttccactttgctaatgactccagaaacatgatatacatcacctgccacctgaaggtcaccctagctgagcaggacccagatgaactcaacaaggcctgttccttcagcaagccttccaacagctggttcccagtggaaggctcggctgacatctgtcaatgctgtaacaaaggtgactgtggcactccaagccattccaggaggcagcctcatgtcatgagccagtggtccaggtctgcttcccgtaaccgcaggcatgtgacagaagaagcagatgtcaccgtggggccactgatcttcctggacaggaggggtgaccatgaagtagagcagtgggctttgccttctgacacctcagtggtgctgctgggcgtaggcctggctgtggtggtgtccctgactctgactgctgttatcctggttctcaccaggaggtgtcgcactgcctcccaccctgtgtctgcttccgaataaaaaaaaagaagaaagcaatatctggtcgtggtgtggtggtcaggtggaaggtcagaattagtactgactgtgtcgggtggggacgactgtataccacccgccccgtgcactcacatagcatagtccagcaagcactactgtgtctctactgtaaacagggcagggttcatgtccttagacaactataatctatcacctccatgggaaccaacatggaaactcttagatgaaggtcagtctggctggacccaccttacttctaggctagcaaagaatcttatatctctggcccccatggatttgactctagacatgggagtggggaggagagagcttccaggcccacttctccaaggcaagcaggcaggcagctctgtccagatgctagaggccagaaggccagtcatgactgggccctcccagtagggcagtgatcagagcactgcttctgcctggtcttagctgtcaccttgggcttgaagctattcttgggacatgttggtatgaacttgtcaaagctgcagcaaggggtgactgg

SEQ ID NO: 375820 - DNA, 1398 bp, Homo sapiens
agtaatagaagggcttaccactacgggaggtgagcaccagcgccacatgccagcttggatcccgtgcgagcacgcggtattctgaagaaactttactatttttttgggctttgaggggggagtatgttaacccatagaacgctccccgcacgctcctctttgggcgatccagcccaccgctagtgcgaagtcccccttgcaatcatgtaccttgcggctgtttgtggaccataggaggggcacacctacccgaggcaagaatgcccccccttataacaccatgtggggaattccatggctgtcttgtcgacggtctcactgatgcctcttctgcattcaaagttcctcgacccgggccagatacactccagttcacagtggatgtcttccactttgctaatgactccagaaacatgatatacatcacctgccacctgaaggtcaccctagctgagcaggacccagatgaactcaacaaggcctgttccttcagcaagccttccaacagctggttcccagtggaaggctcggctgacatctgtcaatgctgtaacaaaggtgactgtggcactccaagccattccaggaggcagcctcatgtcatgagccagtggtccaggtctgcttcccgtaaccgcaggcatgtgacagaagaagcagatgtcaccgtggggccactgatcttcctggacaggaggggtgaccatgaagtagagcagtgggctttgccttctgacacctcagtggtgctgctgggcgtaggcctggctgtggtggtgtccctgactctgactgctgttatcctggttctcaccaggaggtgtcgcactgcctcccaccctgtgtctgcttccgaataaaaaaaaagaagaaagcaatatctggtcgtggtgtggtggtcaggtggaaggtcagaattagtactgactgtgtcgggtggggacgactgtataccacccgccccgtgcactcacatagcatagtccagcaagcactactgtgtctctactgtaaacagggcagggttcatgtccttagacaactataatctatcacctccatgggaaccaacatggaaactcttagatgaaggtcagtctggctggacccaccttacttctaggctagcaaagaatcttatatctctggcccccatggatttgactctagacatgggagtggggaggagagagcttccaggcccacttctccaaggcaagcaggcaggcagctctgtccagatgctagaggccagaaggccagtcatgactgggccctcccagtagggcagtgatcagagcactgcttctgcctggtcttagctgtcaccttgggcttgaagctattcttgggacatgttggtatgaacttgtcaaagctgcagcaaggggtgactgg

SEQ ID NO: 375821 - DNA, 1264 bp, Homo sapiens
cccttctcctggaaactgcggaatccttacaagcagagattacagtggcagcacggaccattctgtggatgtaaccattgattgaccaccgtgacaccagaccagaatgcttccccttacaatcccatcatgtacttccatgatgttctggttgacgatatcggctgtcttgtcgacggtctcactgatgcctcttctgcattcaaagttcctcgacccgggccagatacactccagttcacagtggatgtcttccactttgctaatgactccagaaacatgatatacatcacctgccacctgaaggtcaccctagctgagcaggacccagatgaactcaacaaggcctgttccttcagcaagccttccaacagctggttcccagtggaaggctcggctgacatctgtcaatgctgtaacaaaggtgactgtggcactccaagccattccaggaggcagcctcatgtcatgagccagtggtccaggtctgcttcccgtaaccgcaggcatgtgacagaagaagcagatgtcaccgtggggccactgatcttcctggacaggaggggtgaccatgaagtagagcagtgggctttgccttctgacacctcagtggtgctgctgggcgtaggcctggctgtggtggtgtccctgactctgactgctgttatcctggttctcaccaggaggtgtcgcactgcctcccaccctgtgtctgcttccgaataaaaaaaaagaagaaagcaatatctggtcgtggtgtggtggtcaggtggaaggtcagaattagtactgactgtgtcgggtggggacgactgtataccacccgccccgtgcactcacatagcatagtccagcaagcactactgtgtctctactgtaaacagggcagggttcatgtccttagacaactataatctatcacctccatgggaaccaacatggaaactcttagatgaaggtcagtctggctggacccaccttacttctaggctagcaaagaatcttatatctctggcccccatggatttgactctagacatgggagtggggaggagagagcttccaggcccacttctccaaggcaagcaggcaggcagctctgtccagatgctagaggccagaaggccagtcatgactgggccctcccagtagggcagtgatcagagcactgcttctgcctggtcttagctgtcaccttgggcttgaagctattcttgggacatgttggtatgaacttgtcaaagctgcagcaaggggtgactgg

SEQ ID NO: 375822 - DNA, 1331 bp, Homo sapiens
  misc_feature (1237)..(1237): n is a, c, g, or t
  misc_feature (1241)..(1241): n is a, c, g, or t
  misc_feature (1246)..(1246): n is a, c, g, or t
  misc_feature (1249)..(1249): n is a, c, g, or t
  misc_feature (1254)..(1254): n is a, c, g, or t
  misc_feature (1258)..(1258): n is a, c, g, or t
  misc_feature (1264)..(1265): n is a, c, g, or t
tcctcgtggtggccgcagttgtgcacaccccagcccaggctctggcaggctgccaggcggggctcgccgccttcgcagtgcacgttgtccagcaggatgtgtccggtgccatagccgaagaaggcgttggtggtggcggccatggccgccccgcagcccagctgacgacagaccacagcggcatccggcagcccccagtcgtcgtcacacacggtgccccacaggccactgtgcaggatctccactcggccctgacacagggtggagccagccatcctgagacgtccgtacagcccgtactggtggagtgtcaggaggccactctgatggtcatggtcagcaaagacctttttggcaccgggaagctcatcagggctgctgacctcaccttgggcccagaggcctgtgagcctctggtctccatggacacagaagatgtggtcaggtttgaggttggactccacgagtgtggcaacagcatgcaggtaactgacgatgccctggtgtacagcaccttcctgctccatgacccccgccccgtgggaaacctgtccatcgtgaggactaaccgcgcagagattcccatcgagtgccgctaccccaggcagggcaatgtgagcagccaggccatcctgcccacctggttgcccttcaggaccacggtgttctcagaggagaagctgactttctctctgcgtctgatggaggagaactggaacgctgagaagaggtcccccaccttccacctgggagatgcagcccacctccaggcagaaatccacactggcagccacgtgccactgcggttgtttgtggaccactgcgtggccacaccgacaccagaccagaatgcctccccttatcacaccatcgtggacttccatggctgtcttgtcgacggtctcactgatgcctcttctgcattcaaagttcctcgacccgggccagatacactccagttcacagtggatgtcttccactttgctaatgactccagaaacatgatatacatcacctgccacctgaaggtcaccctagctgagcaggacccagatgaactcaacaaggcctgttccttcagcaagccttccaacagctggttcccagtggaaggctcggctgacatctgtcaatgctgtaacaaaggtgactgtggcactccaagccattccaggaggcagcctcatgtcatgagccagtggtccaggtctgcttcccgtaaccgcaggcatgtgtnacanaagancanatgtnccgnggggcnntgacttctggacaggggggtgaccttgagtaaccagtggctttgcctttgacactagggggctgtg

SEQ ID NO: 375823 - DNA, 1351 bp, Homo sapiens
tcctcgtggtggccgcagttgtgcacaccccagcccaggctctggcaggctgccaggcggggctcgccgccttcgcagtgcacgttgtccagcaggatgtgtccggtgccatagccgaagaaggcgttggtggtggcggccatggccgccccgcagcccagctgacgacagaccacagcggcatccggcagcccccagtcgtcgtcacacacggtgccccacaggccactgtgcaggatctccactcggccctgacacagggtggagccagccatcctgagacgtccgtacagcccgtactggtggagtgtcaggaggccactctgatggtcatggtcagcaaagacctttttggcaccgggaagctcatcagggctgctgacctcaccttgggcccagaggcctgtgagcctctggtctccatggacacagaagatgtggtcaggtttgaggttggactccacgagtgtggcaacagcatgcaggtaactgacgatgccctggtgtacagcaccttcctgctccatgacccccgccccgtgggaaacctgtccatcgtgaggactaaccgcgcagagattcccatcgagtgccgctaccccaggcagggcaatgtgagcagccaggccatcctgcccacctggttgcccttcaggaccacggtgttctcagaggagaagctgactttctctctgcgtctgatggaggagaactggaacgctgagaagaggtcccccaccttccacctgggagatgcagcccacctccaggcagaaatccacactggcagccacgtgccactgcggttgtttgtggaccactgcgtggccacaccgacaccagaccagaatgcctccccttatcacaccatcgtggacttccatggctgtcttgtcgacggtctcactgatgcctcttctgcattcaaagttcctcgacccgggccagatacactccagttcacagtggatgtcttccactttgctaatgactccagaaacatgatatacatcacctgccacctgaaggtcaccctagctgagcaggacccagatgaactcaacaaggcctgttccttcagcaagccttccaacagctggttcccagtggaaggctcggctgacatctgtcaatgctgtaacaaaggtgactgtggcactccaagccattccaggaggcagcctcatgtcatgagccagtggtccaggtctgcttcccgtaaccgcaggcatgcgcagctttgacaaagaatcaatgtcaccggggaccctgatcttctggaaagatggtgacagaataaaccatggcttgctttgaacctacagtctttgggctagccgctgaggggttt

SEQ ID NO: 375824 - DNA, 1436 bp, Homo sapiens
tcctcgtggtggccgcagttgtgcacaccccagcccaggctctggcaggctgccaggcggggctcgccgccttcgcagtgcacgttgtccagcaggatgtgtccggtgccatagccgaagaaggcgttggtggtggcggccatggccgccccgcagcccagctgacgacagaccacagcggcatccggcagcccccagtcgtcgtcacacacggtgccccacaggccactgtgcaggatctccactcggccctgacacagggtggagccagccatcctgagacgtccgtacagcccgtactggtggagtgtcaggaggccactctgatggtcatggtcagcaaagacctttttggcaccgggaagctcatcagggctgctgacctcaccttgggcccagaggcctgtgagcctctggtctccatggacacagaagatgtggtcaggtttgaggttggactccacgagtgtggcaacagcatgcaggtaactgacgatgccctggtgtacagcaccttcctgctccatgacccccgccccgtgggaaacctgtccatcgtgaggactaaccgcgcagagattcccatcgagtgccgctaccccaggcagggcaatgtgagcagccaggccatcctgcccacctggttgcccttcaggaccacggtgttctcagaggagaagctgactttctctctgcgtctgatggaggagaactggaacgctgagaagaggtcccccaccttccacctgggagatgcagcccacctccaggcagaaatccacactggcagccacgtgccactgcggttgtttgtggaccactgcgtggccacaccgacaccagaccagaatgcctccccttatcacaccatcgtggacttccatggctgtcttgtcgacggtctcactgatgcctcttctgcattcaaagttcctcgacccgggccagatacactccagttcacagtggatgtcttccactttgctaatgactccagaaacatgtgatatacatcacctgccacctgaaggtcaccctagctgagcaggacccagatgaactcaacaaggcctgttccttcagcaagccttccaacagtgtttcccagtgtaaggctaggtttacatttggcaatggttttgcaaaggggactgtggcactgctagccatgcagtaggcggcctaatgactgagagcaatggaccagcgtcgttcccgaaaccgggggcatgtgcatgatatacaaggtttcccgagagcctcattcattctgacagcaggcgaacccgtaagcaaacaggtgctttccgctggacatctttattggtactctggctaaatcgccctttgtgcggacgcttccataacagtttccttctctgtgagacaaaggaacccgacgccggcgcccttgcctaagtgttatcaacaactct

SEQ ID NO: 375825 - DNA, 1263 bp, Homo sapiens
tcctcgtggtggccgcagttgtgcacaccccagcccaggctctggcaggctgccaggcggggctcgccgccttcgcagtgcacgttgtccagcaggatgtgtccggtgccatagccgaagaaggcgttggtggtggcggccatggccgccccgcagcccagctgacgacagaccacagcggcatccggcagcccccagtcgtcgtcacacacggtgccccacaggccactgtgcaggatctccactcggccctgacacagggtggagccagccatcctgagacgtccgtacagcccgtactggtggagtgtcaggaggccactctgatggtcatggtcagcaaagacctttttggcaccgggaagctcatcagggctgctgacctcaccttgggcccagaggcctgtgagcctctggtctccatggacacagaagatgtggtcaggtttgaggttggactccacgagtgtggcaacagcatgcaggtaactgacgatgccctggtgtacagcaccttcctgctccatgacccccgccccgtgggaaacctgtccatcgtgaggactaaccgcgcagagattcccatcgagtgccgctaccccaggcagggcaatgtgagcagccaggccatcctgcccacctggttgcccttcaggaccacggtgttctcagaggagaagctgactttctctctgcgtctgatggaggagaactggaacgctgagaagaggtcccccaccttccacctgggagatgcagcccacctccaggcagaaatccacactggcagccacgtgccactgcggttgtttgtggaccactgcgtggccacaccgacaccagaccagaatgcctccccttatcacaccatcgtggacttccatggctgtcttgtcgacggtctcactgatgcctcttctgcattcaaagttcctcgacccgggccagatacactccagttcacagtggatgtcttccactttgctaatgactccagaaacatgtgatatacatcacctgccacctgaaggtcaccctagctgagcaggacccagatgaactcaacaaggcctgttccttcagcaagccttccaacagcttgtttccagtagaaggatagggtcacatctcgttatgctgcacataagctactgtggttcttcagactttgcggaggcaccttctgtattagccactgtcacgtttttttcccttataatggcgacgcgcaaaaatagatgtctctcttggtctttgctctta

SEQ ID NO: 375826 - DNA, 1259 bp, Homo sapiens
tcctcgtggtggccgcagttgtgcacaccccagcccaggctctggcaggctgccaggcggggctcgccgccttcgcagtgcacgttgtccagcaggatgtgtccggtgccatagccgaagaaggcgttggtggtggcggccatggccgccccgcagcccagctgacgacagaccacagcggcatccggcagcccccagtcgtcgtcacacacggtgccccacaggccactgtgcaggatctccactcggccctgacacagggtggagccagccatcctgagacgtccgtacagcccgtactggtggagtgtcaggaggccactctgatggtcatggtcagcaaagacctttttggcaccgggaagctcatcagggctgctgacctcaccttgggcccagaggcctgtgagcctctggtctccatggacacagaagatgtggtcaggtttgaggttggactccacgagtgtggcaacagcatgcaggtaactgacgatgccctggtgtacagcaccttcctgctccatgacccccgccccgtgggaaacctgtccatcgtgaggactaaccgcgcagagattcccatcgagtgccgctaccccaggcagggcaatgtgagcagccaggccatcctgcccacctggttgcccttcaggaccacggtgttctcagaggagaagctgactttctctctgcgtctgatggaggagaactggaacgctgagaagaggtcccccaccttccacctgggagatgcagcccacctccaggcagaaatccacactggcagccacgtgccactgcggttgtttgtggaccactgcgtggccacaccgacaccagaccagaatgcctccccttatcacaccatcgtggacttccatggctgtcttgtcgacggtctcactgatgcctcttctgcattcaaagttcctcgacccgggccagatacactccagttcacagtggatgtcttccactttgctaatgactccagaaacatgtatttacttacctgccccccgaaggtacccctatcttacctatgattatagtacctcaacatgcccgatccttcaatagccttccaacatttgttcccggtgcaggctctgctgcatcatgaaatgcgcccctaaggtgaatgaagcctcaaactattacataaagatcgtctcgtttacacctagtacctctttatttttgactcgatacgagtataaatacagatttaccttttgtaccgcgcttgtcctacg

SEQ ID NO: 375827 - DNA, 1153 bp, Homo sapiens
cacccgacgctccgtcaagcgccgtatcaccactgctcaccagagcggcgcatgacatgcttcatgaacaacccggctacaatcacggacgcggatgacggccccacaagggctctctatcgacgcacactgggatactaccctgcttacaccactctcccgctgcagacctcacgcgccacaacgtgaacatcacctctcacacactctccggcaacccggactcctacggagagggacccccgcatacgggtgaggcacgtaagcatcctcagccaagaagccacacgggaacccgcgggcctcacagtcaattttgatacgcagtgtgcgcaaaccgcacgcggcccagaagcccccccttatcacaccatcgagcccctccagcgcgttcatgtcaacggactaatagaagcctccgggcataccaagttcttagacccggtcccgatacattccagttcccagtggaagtcctccctctgataatgatcccagtaacctgatatacatcacctgccacctgaaggtcaccctagctgagcaggacccagatgaactcaacaaggcctgttccttcagcaagccttccaacagctggttcccagtggaaggctcggctgacatctgtcaatgctgtaacaaaggtgactgtggcactccaagccattccaggaggcagcctcatgtcatgagccagtggtccaggtctgcttcccgtaaccgcaggcatgtgacagaagaagcagatgtcaccgtggggccactgatcttcctggacaggaggggtgaccatgaagtagagcagtgggctttgccttctgacacctcagtggtgctgctgggcgtaggcctggctgtggtggtgtccctgactctgactgctgttatcctggttctcaccaggaggtgtcgcactgcctcccaccctgtgtctgcttccgaataaaaaaaaagaaacagaaaaagaaacaaacgcaacacgagaaagaaacaagaagaaaaagggggggggtcaaaaaccccgggggcacaaatggacagccagtttgtaaaggggccataggggaaataaaacaagggggggaaaacaggggagggaaagccggggctggggacacctctggggggcaggacccaccagaaagcggga

SEQ ID NO: 375828 - DNA, 1063 bp, Homo sapiens
agggtgatgaggtgttgccacattggaccacgaactatgtctgcacaacgtacctactgctgacgatggcagcactcgctgcggaacatcactctactctgtgtcttgctgaccgagcaagtgttgcccgtaagcttcggtgtcttaacttcaccaatcgattaacagttagctttctggctgccattcagctattctttcatcccacccttaggtatactgtaggtacatatcgggccaaaacggcgtgttggcaagcaaagtctcccccttgcaaaccactgggagaattaatctgtttgtcttctccgtgtcaacttgaggcgttttatgctatgaaattctttgatcccggactagatatttcctagttctaaggggagttcttcaactctataatggttccagacgcatgatatacatcacctgccacctgaaggtcaccctagctgagcaggacccagatgaactcaacaaggcctgttccttcagcaagccttccaacagctggttcccagtggaaggctcggctgacatctgtcaatgctgtaacaaaggtgactgtggcactccaagccattccaggaggcagcctcatgtcatgagccagtggtccaggtctgcttcccgtaaccgcaggcatgtgacagaagaagcagatgtcaccgtggggccactgatcttcctggacaggaggggtgaccatgaagtagagcagtgggctttgccttctgacacctcagtggtgctgctgggcgtaggcctggctgtggtggtgtccctgactctgactgctgttatcctggttctcaccaggaggtgtcgcactgcctcccaccctgtgtctgcttccgaataaaaaaaaagaaacagaaaaagaaacaaacgcaacacgagaaagaaacaagaagaaaaagggggggggtcaaaaaccccgggggcacaaatggacagccagtttgtaaaggggccataggggaaataaaacaagggggggaaaacaggggagggaaagccggggctggggacacctctggggggcaggacccaccagaaagcggga

SEQ ID NO: 375829 - DNA, 1039 bp, Homo sapiens
cctgcgccatatcagtgccatcgcgcttatatcaaaccggatccagccggccacactttgcgggtcgcgacattatgcgtgacactatgggctttcttttaagatctcggaaagaaaactcacactataggaatcccccccccccacataaaaggaggggccctcgcgatcgtgactgcaagaaaaaaacggcacacccaacatgtttgacacctgggtggcaatgggtccatgcctcaatgctcctctgttctcactatataatcttccatgacgttatagatttgagtctcaaggagcctgttcgggaattaaaaatcctggacccgggcctggtcacccctgtttccaagtggagttttcccctctgccagtgggtccagtaaaaatgatatacatcacctgccacctgaaggtcaccctagctgagcaggacccagatgaactcaacaaggcctgttccttcagcaagccttccaacagctggttcccagtggaaggctcggctgacatctgtcaatgctgtaacaaaggtgactgtggcactccaagccattccaggaggcagcctcatgtcatgagccagtggtccaggtctgcttcccgtaaccgcaggcatgtgacagaagaagcagatgtcaccgtggggccactgatcttcctggacaggaggggtgaccatgaagtagagcagtgggctttgccttctgacacctcagtggtgctgctgggcgtaggcctggctgtggtggtgtccctgactctgactgctgttatcctggttctcaccaggaggtgtcgcactgcctcccaccctgtgtctgcttccgaataaaaaaaaagaaacagaaaaagaaacaaacgcaacacgagaaagaaacaagaagaaaaagggggggggtcaaaaaccccgggggcacaaatggacagccagtttgtaaaggggccataggggaaataaaacaagggggggaaaacaggggagggaaagccggggctggggacacctctggggggcaggacccaccagaaagcggga

SEQ ID NO: 375830 - DNA, 1087 bp, Homo sapiens
  misc_feature (79)..(79): n is a, c, g, or t
accggggcgcggaagtgacaacacaggccttccccccatattgggcaccacgagatgctagggatgaaagaagaaaggnaaatatccctcagggacgaaacaccgccgggcacgggtgaacagagccatccacctcccccggggcggagcatgccctccacagggtaaatcacccccggcgcccataggcacacggagagtgatttgcgccccacctggtggccagcccggcaaccaggacaagaaagccccccctttatcaaaccacgggaacttccaagggctttttatacgcgggtttcacagacggcctatttgcgaattaaaagttcccggacccgggccaagaaccatccagtttccaggggaagttttccccttgtgttaatgaccccaaaaacctgatatacatcacctgccacctgaaggtcaccctagctgagcaggacccagatgaactcaacaaggcctgttccttcagcaagccttccaacaggcaacaaaaatctaagctgcttctctttcatctcactggttcccagtggaaggctcggctgacatctgtcaatgctgtaacaaaggtgactgtggcactccaagccattccaggaggcagcctcatgtcatgagccagtggtccaggtctgcttcccgtaaccgcaggcatgtgacagaagaagcagatgtcaccgtggggccactgatcttcctggacaggaggggtgaccatgaagtagagcagtgggctttgccttctgacacctcagtggtgctgctgggcgtaggcctggctgtggtggtgtccctgactctgactgctgttatcctggttctcaccaggaggtgtcgcactgcctcccaccctgtgtctgcttccgaataaaaaaaaagaaacagaaaaagaaacaaacgcaacacgagaaagaaacaagaagaaaaagggggggggtcaaaaaccccgggggcacaaatggacagccagtttgtaaaggggccataggggaaataaaacaagggggggaaaacaggggagggaaagccggggctggggacacctctggggggcaggacccaccagaaagcggga

SEQ ID NO: 375831 - DNA, 1099 bp, Homo sapiens
tccacgttccatcacagtgctcccttgccggcacactttcgagctcacacacatccgcgtccttgtaggactgactggccctcttcattcctactgacactcagctttccttagcatagtgttctggacttcataactgacgctcacttaataagattgccctattcttcacactcttactattcctcgaaatttccggttcgctatcctcgcaccacagccatatctaccctccccgttctacttcggcactcattggtggctacacctctgctctcactgcccacgtgcccaccctctcaccccccctcgggatcttcccatgcctgtcacgacgtcggttataatgaacagctttcctcacagtccccagttccgtcaccacggcgcgcaatccccactggtgtatagatgaattgctacacatttgtttttgactcccctgacgatcgtttgtttcaccagcccgtgacaggtaaccctagttgagcaggccccggacgaatttaaaaaagcttgttctttaggcaagccttccaacagctggttcccagtggaaggctcggctgacatctgtcaatgctgtaacaaaggtgactgtggcactccaagccattccaggaggcagcctcatgtcatgagccagtggtccaggtctgcttcccgtaaccgcaggcatgtgacagaagaagcagatgtcaccgtggggccactgatcttcctggacaggaggggtgaccatgaagtagagcagtgggctttgccttctgacacctcagtggtgctgctgggcgtaggcctggctgtggtggtgtccctgactctgactgctgttatcctggttctcaccaggaggtgtcgcactgcctcccaccctgtgtctgcttccgaataaaaaaaaagaaacagaaaaagaaacaaacgcaacacgagaaagaaacaagaagaaaaagggggggggtcaaaaaccccgggggcacaaatggacagccagtttgtaaaggggccataggggaaataaaacaagggggggaaaacaggggagggaaagccggggctggggacacctctggggggcaggacccaccagaaagcggga

SEQ ID NO: 375832 - DNA, 1047 bp, Homo sapiens
  misc_feature (1)..(1): n is a, c, g, or t
  misc_feature (71)..(71): n is a, c, g, or t
  misc_feature (102)..(102): n is a, c, g, or t
ntttcttcgggtgttcaccagaggccccccgcggtttaatttcaggccaccaggcacaagctacaaggatncaggttgacctttcactttcacacaaaaggntccccaggcatggccagtgtaccatccggccatctccgccccctggtgccctttaggacccccggtgtttagaagagaagtcacttctctctttggttttgatggaggagaactggaacgctgagaagaggtcccccaccttccacctgggagatgcaaaatccacactggcagccacgtgccactgcggttgtttgtggaccactgcgtggccacaccgacaccagaccagaatgcctcccctctgtcttgtcgacggtctcactgatgcctcttctgcattcaaagttcctcgacccgggccagatacactccagttctgatatacatcacctgccacctgaaggtcaccctagctgagcaggacccagatgaactcaacaaggcctctggttcccagtggaaggctcggctgacatctgtcaatgctgtaacaaaggtgactgtggcactccaagccattccaggaggcagcctcatgtcatgagccagtggtccaggtctgcttcccgtaaccgcaggcatgtgacagaagaagcagatgtcaccgtggggccactgatcttcctggacaggaggggtgaccatgaagtagagcagtgggctttgccttctgacacctcagtggtgctgctgggcgtaggcctggctgtggtggtgtccctgactctgactgctgttatcctggttctcaccaggaggtgtcgcactgcctcccaccctgtgtctgcttccgaataaaaaaaaagaaacagaaaaagaaacaaacgcaacacgagaaagaaacaagaagaaaaagggggggggtcaaaaaccccgggggcacaaatggacagccagtttgtaaaggggccataggggaaataaaacaagggggggaaaacaggggagggaaagccggggctggggacacctctggggggcaggacccaccagaaagcggga

SEQ ID NO: 375833 - DNA, 1175 bp, Homo sapiens
gcaaacagtgctgctaccccaggcagggcaatgtgagcagccaggccatcctgcccacctggttgcccttcaggaccacggtgttctcagaggagaagctgactttctctctgcgtctgatggaggagaactggaacgctgagaagaggtcccccaccttccacctgggagatgcagcccacctccaggcagaaatccacactggcagccacgtgccactgcggttgtttgtggaccactgcgtggccacaccgacaccagaccagaatgcctccccttatcacaccatcgtggacttccatggctgtcttgtcgacggtctcactgatgcctcttctgcattcaaagttcctcgacccgggccagatacactccagttcacagtggatgtcttccactttgctaatgactccagaaacatgtgacagaagaagcagatgtcaccgtggggccactgatcttcctggacaggaggggtgaccatgaagtagagcagtgggctttgccttctgacacctcagtggtgctgctgggcgtaggcctggctgtggtggtgtccctgactctgactgctgttatcctggttctcaccaggaggtgtcgcactgcctcccaccctgtgtctgcttccgaataaaaaaaaagaagaaagcaatatctggtcgtggtgtggtggtcaggtggaaggtcagaattagtactgactgtgtcgggtggggacgactgtataccacccgccccgtgcactcacatagcatagtccagcaagcactactgtgtctctactgtaaacagggcagggttcatgtccttagacaactataatctatcacctccatgggaaccaacatggaaactcttagatgaaggtcagtctggctggacccaccttacttctaggctagcaaagaatcttatatctctggcccccatggatttgactctagacatgggagtggggaggagagagcttccaggcccacttctccaaggcaagcaggcaggcagctctgtccagatgctagaggccagaaggccagtcatgactgggccctcccagtagggcagtgatcagagcactgcttctgcctggtcttagctgtcaccttgggcttgaagctattcttgggacatgttggtatgaacttgtcaaagctgcagcaaggggtgactgg

SEQ ID NO: 375834 - DNA, 1358 bp, Homo sapiens
ggttggcgcggggccacgcccccgggcgggttcaaccgcctcccgcgcccttgggtcacactgcgaccgtctgtccccactcctctctcgaccctccggaggcttccccacggatcgtggactttaccagatcggtttgtaatacacgtcagagacgctatccgatccatcaggcccagtattcctgtctgggggtacttcccacagtgtgctggaatggttatcacaagaaggctgtgctgtcccctcgcaactccaggatggtgtgtagcccagtgactctgaggatcgcccctcctgacagaagattttcgcgttctgcgataccagagcagataatcagctcaacactgtcctcaccatcaagtaatgccccagacccatgtgcaaaggagactgtactgagtgccctcaaagagaagaagaagaaaaggacagtggaggaagaagaccaaatattccttgatggccaggaaaataaaagaagctgtcttgtcgacggtctcactgatgcctcttctgcattcaaagttcctcgacccgggccagatacactccagttcacagtggatgtcttccactttgctaatgactccagaaacatgtgacagaagaagcagatgtcaccgtggggccactgatcttcctggacaggaggggtgaccatgaagtagagcagtgggctttgccttctgacacctcagtggtgctgctgggcgtaggcctggctgtggtggtgtccctgactctgactgctgttatcctggttctcaccaggaggtgtcgcactgcctcccaccctgtgtctgcttccgaataaaaaaaaagaagaaagcaatatctggtcgtggtgtggtggtcaggtggaaggtcagaattagtactgactgtgtcgggtggggacgactgtataccacccgccccgtgcactcacatagcatagtccagcaagcactactgtgtctctactgtaaacagggcagggttcatgtccttagacaactataatctatcacctccatgggaaccaacatggaaactcttagatgaaggtcagtctggctggacccaccttacttctaggctagcaaagaatcttatatctctggcccccatggatttgactctagacatgggagtggggaggagagagcttccaggcccacttctccaaggcaagcaggcaggcagctctgtccagatgctagaggccagaaggccagtcatgactgggccctcccagtagggcagtgatcagagcactgcttctgcctggtcttagctgtcaccttgggcttgaagctattcttgggacatgttggtatgaacttgtcaaagctgcagcaaggggtgactgg

SEQ ID NO: 375835 - DNA, 523 bp, Homo sapiens
tcctcgtggtggccgcagttgtgcacaccccagcccaggctctggcaggctgccaggcggggctcgccgccttcgcagtgcacgttgtccagcaggatgtgtccggtgccatagccgaagaaggcgttggtggtggcggccatggccgccccgcagcccagctgacgacagaccacagcggcatccggcagcccccagtcgtcgtcacacacggtgcgttggcccaacggccaacgcaccgtgtcgtgtagtacgatgtctagtgatgagttggctaatacaatgccagtcaggccacctacggtgaaaagaaagatgaatcctagggctcagagcactgcagcagatcatttcatacggtgcgttggcccaacgttgggccaacgcaccgtcggaaatggtgaagggagactcgaagtactctgaggcttgtaggagggtaaaatagagacccagtaaaattgtaataagcagtgcttgaattatttggtttcggtagataactattagactatggtgagct

SEQ ID NO: 375836 - DNA, 150 bp, Homo sapiens
acctgccacctgaaggtcaccctagctgagcaggacccagatgaactcaacaaggcctgttccttcagcaagccttccaacaggtgaggaggacaggtgctccgtgactggagtagaaactgaatcggcgaccccttgtctatttccccc

SEQ ID NO: 375837 - DNA, 1054 bp, Homo sapiens
aaggcacctcctcttcgagggtctccaccaaggccacagccaggccaaattagtgtcacagggaaaaactacacgacccagtttggccgtccatgtcactgaaacggtcccccgcaggccaaggacgcaccaggccctccgccccctggtccctccagcccacgtttctaaaggaaacctacttctcctcgcgtctgatggaggagaactggaacgctgagaagaggtcccccaccttccacctgggagatgcagcccacctccaggcagaaatccacactggcagccacgtgccactgcggttgtttgtggaccactgcgtggccacaccgacaccagaccagaatgcctccccttatcacaccatcgtggacttccatggctgtcttgtcgacggtctcactgatgcctcttctgcattcaaagttcctcgacccgggccagatacactccagttcacagtggatgtcttccactttgctaatgactccagaaacatgatatacatcacctgccacctgaaggtcaccctagctgagcaggacccagatgaactcaacaaggcctgttccttcagcaagccttccaacagctggttcccagtggaaggctcggctgacatctgtcaatgctgtaacaaaggtgactgtggcactccaagccattccaggaggcagcctcatgtcatgagccagtggtccaggtctgcttcccgtaaccgcaggcatgtgacagaagaagcagatgtcaccgtggggccactgatcttcctggacaggaggggtgaccatgaagtagagcagtgggctttgccttctgacacctcagtggtgctgctgggcgtaggcctggctgtggtggtgtccctgactctgactgctgttatcctggttctcaccaggaggtgtcgcactgcctcccaccctgtgtctgcttccgaataaaaaaaaagggataatgcggcgtttccttaaggagggttatttatgatcctcgttactgactcctgcctctggtttatggtggggaaactgttttacttactcaagggggt

SEQ ID NO: 375838 - DNA, 712 bp, Homo sapiens
  misc_feature (712)..(712): n is a, c, g, or t
ctctgcgtctgatggaggagaagaactggaacgctgagaagaggtcccccaccttccacctgggagatgcagcccacctccaggcagaaatccacactggcagccacgtgccactgcggttgtttgtggaccactgcgtggccacaccgacaccagaccagaatgcctccccttatcacaccatcgtggacttccatggctgtcttgtcgacggtctcactgatgcctcttctgcattcaaagttcctcgacccgggccagatacactccagttcacagtggatgtcttccactttgctaatgactccagaaacatgtgatatacatcacctgccacctgaaggtcaccctagctgagcaggacccagatgaactcaacaaggcctgttccttcagcaagccttccaacagctggttcccagtggaaggctcggctgacatctgtcaatgctgtaacaaaggtgactgtggcactccaagccattccaggaggcagcgctctttgtattgacccaatgggttcagtttttcttctcgtatcccggaggacatgttataaaagaactcatctttcaccggtgaggcccctcttttttcgtgtatatgcagggtggcccactcacatgagatcagggggctttctctcttgacaccctcagtgtgctactcggaacaggcccatctgtagcggtataccttataatggatggtn

SEQ ID NO: 375839 - DNA, 1652 bp, Homo sapiens
tcctcgtggtggccgcagttgtgcacaccccagcccaggctctggcaggctgccaggcggggctcgccgccttcgcagtgcacgttgtccagcaggatgtgtccggtgccatagccgaagaaggcgttggtggtggcggccatggccgccccgcagcccagctgacgacagaccacagcggcatccggcagcccccagtcgtcgtcacacacggtgccccacaggccactgtgcaggatctccactcggccctgacacagggtggagccagccatcctgagacgtccgtacagcccgtactggtggagtgtcaggaggccactctgatggtcatggtcagcaaagacctttttggcaccgggaagctcatcagggctgctgacctcaccttgggcccagaggcctgtgagcctctggtctccatggacacagaagatgtggtcaggtttgaggttggactccacgagtgtggcaacagcatgcaggtaactgacgatgccctggtgtacagcaccttcctgctccatgacccccgccccgtgggaaacctgtccatcgtgaggactaaccgcgcagagattcccatcgagtgccgctaccccaggcagggcaatgtgagcagccaggccatcctgcccacctggttgcccttcaggaccacggtgttctcagaggagaagctgactttctctctgcgtctgatggaggagaactggaacgctgagaagaggtcccccaccttccacctgggagatgcagcccacctccaggcagaaatccacactggcagccacgtgccactgcggttgtttgtggaccactgcgtggccacaccgacaccagaccagaatgcctccccttatcacaccatcgtggacttccatggctgtcttgtcgacggtctcactgatgcctcttctgcattcaaagttcctcgacccgggccagatacactccagttcacagtggatgtcttccactttgctaatgactccagaaacatgatatacatcacctgccacctgaaggtcaccctagctgagcaggacccagatgaactcaacaaggcctgttccttcagcaagccttccaacagctggttcccagtggaaggctcggctgacatctgtcaatgctgtaacaaaggtgactgtggcactccaagccattccaggaggcagcctcatgtcatgagccagtggtccaggtctgcttcccgtaaccgcaggcatgtgacagaagaagcagatgtcaccgtggggccactgatcttcctggacaggaggggtgaccatgaagtagagcagtgggctttgccttctgacacctcagtggtgctgctgggcgtaggcctggctgtggtggtgtccctgactctgactgctgttatcctggttctcaccaggaggtgtcgcactgcctcccaccctgtgtctgcttccgaataaaaaaaaagaaacagaaaaagaaacaaacgcaacacgagaaagaaacaagaagaaaaagggggggggtcaaaaaccccgggggcacaaatggacagccagtttgtaaaggggccataggggaaataaaacaagggggggaaaacaggggagggaaagccggggctggggacacctctggggggcaggacccaccagaaagcggga

SEQ ID NO: 375840 - DNA, 1154 bp, Homo sapiens
  misc_feature (1)..(1): n is a, c, g, or t
  misc_feature (71)..(71): n is a, c, g, or t
  misc_feature (102)..(102): n is a, c, g, or t
ntttcttcgggtgttcaccagaggccccccgcggtttaatttcaggccaccaggcacaagctacaaggatncaggttgacctttcactttcacacaaaaggntccccaggcatggccagtgtaccatccggccatctccgccccctggtgccctttaggacccccggtgtttagaagagaagtcacttctctctttggttttgatggaggagaactggaacgctgagaagaggtcccccaccttccacctgggagatgcagcccacctccaggcagaaatccacactggcagccacgtgccactgcggttgtttgtggaccactgcgtggccacaccgacaccagaccagaatgcctccccttatcacaccatcgtggacttccatggctgtcttgtcgacggtctcactgatgcctcttctgcattcaaagttcctcgacccgggccagatacactccagttcacagtggatgtcttccactttgctaatgactccagaaacatgatatacatcacctgccacctgaaggtcaccctagctgagcaggacccagatgaactcaacaaggcctgttccttcagcaagccttccaacagctggttcccagtggaaggctcggctgacatctgtcaatgctgtaacaaaggtgactgtggcactccaagccattccaggaggcagcctcatgtcatgagccagtggtccaggtctgcttcccgtaaccgcaggcatgtgacagaagaagcagatgtcaccgtggggccactgatcttcctggacaggaggggtgaccatgaagtagagcagtgggctttgccttctgacacctcagtggtgctgctgggcgtaggcctggctgtggtggtgtccctgactctgactgctgttatcctggttctcaccaggaggtgtcgcactgcctcccaccctgtgtctgcttccgaataaaaaaaaagaaacagaaaaagaaacaaacgcaacacgagaaagaaacaagaagaaaaagggggggggtcaaaaaccccgggggcacaaatggacagccagtttgtaaaggggccataggggaaataaaacaagggggggaaaacaggggagggaaagccggggctggggacacctctggggggcaggacccaccagaaagcggga

SEQ ID NO: 375841 - DNA, 1130 bp, Homo sapiens
  misc_feature (94)..(94): n is a, c, g, or t
cctcatctagtacccccacgatacaacgttcgcacacaggtaagttacgcgcaaacgatccgccctctcgcttccaacaaagtaccctggaagnctttgggagacctggcctcctgccaccggtctggcctttaggtcgtggggtcaacaagcacaacataacttctccttgcgtcgcaggaggacagaactggaacgctgagaagaggtcccccaccttccacctgggagatgcagcccacctccaggcagaaatccacactggcagccacgtgccactgcggttgtttgtggaccactgcgtggccacaccgacaccagaccagaatgcctccccttatcacaccatcgtggacttccatggctgtcttgtcgacggtctcactgatgcctcttctgcattcaaagttcctcgacccgggccagatacactccagttcacagtggatgtcttccactttgctaatgactccagaaacatgatatacatcacctgccacctgaaggtcaccctagctgagcaggacccagatgaactcaacaaggcctgttccttcagcaagccttccaacagctggttcccagtggaaggctcggctgacatctgtcaatgctgtaacaaaggtgactgtggcactccaagccattccaggaggcagcctcatgtcatgagccagtggtccaggtctgcttcccgtaaccgcaggcatgtgacagaagaagcagatgtcaccgtggggccactgatcttcctggacaggaggggtgaccatgaagtagagcagtgggctttgccttctgacacctcagtggtgctgctgggcgtaggcctggctgtggtggtgtccctgactctgactgctgttatcctggttctcaccaggaggtgtcgcactgcctcccaccctgtgtctgcttccgaataaaaaaaaagaaacagaaaaagaaacaaacgcaacacgagaaagaaacaagaagaaaaagggggggggtcaaaaaccccgggggcacaaatggacagccagtttgtaaaggggccataggggaaataaaacaagggggggaaaacaggggagggaaagccggggctggggacacctctggggggcaggacccaccagaaagcggga

SEQ ID NO: 375842 - DNA, 1079 bp, Homo sapiens
ctttctcaaaaaggtccccggcaggaaatgtgggggcaggcattttgcgcccgtgtgtcccttaggaccgcggtttctccaaaggaaaggcggtattcttctggttttaagagggtaaactgctacaggaagaaaagaactggaacgctgagaagaggtcccccaccttccacctgggagatgcagcccacctccaggcagaaatccacactggcagccacgtgccactgcggttgtttgtggaccactgcgtggccacaccgacaccagaccagaatgcctccccttatcacaccatcgtggacttccatggctgtcttgtcgacggtctcactgatgcctcttctgcattcaaagttcctcgacccgggccagatacactccagttcacagtggatgtcttccactttgctaatgactccagaaacatgatatacatcacctgccacctgaaggtcaccctagctgagcaggacccagatgaactcaacaaggcctgttccttcagcaagccttccaacagctggttcccagtggaaggctcggctgacatctgtcaatgctgtaacaaaggtgactgtggcactccaagccattccaggaggcagcctcatgtcatgagccagtggtccaggtctgcttcccgtaaccgcaggcatgtgacagaagaagcagatgtcaccgtggggccactgatcttcctggacaggaggggtgaccatgaagtagagcagtgggctttgccttctgacacctcagtggtgctgctgggcgtaggcctggctgtggtggtgtccctgactctgactgctgttatcctggttctcaccaggaggtgtcgcactgcctcccaccctgtgtctgcttccgaataaaaaaaaagaaacagaaaaagaaacaaacgcaacacgagaaagaaacaagaagaaaaagggggggggtcaaaaaccccgggggcacaaatggacagccagtttgtaaaggggccataggggaaataaaacaagggggggaaaacaggggagggaaagccggggctggggacacctctggggggcaggacccaccagaaagcggga

SEQ ID NO: 375843 - DNA, 1079 bp, Homo sapiens
aaatttttgcattacggacgacctttagctgtcgaaaaaggaccaccacagtgacagctccaccagagtccttcgccacctgttgcctataagcccggggtttccaaagcaagaacccttcttttagtgcgaagggaaaaataagcacctaacaagaagccaccccctctccacattggaaaacagcccacctccaggcagaaatccacactggcagccacgtgccactgcggttgtttgtggaccactgcgtggccacaccgacaccagaccagaatgcctccccttatcacaccatcgtggacttccatggctgtcttgtcgacggtctcactgatgcctcttctgcattcaaagttcctcgacccgggccagatacactccagttcacagtggatgtcttccactttgctaatgactccagaaacatgatatacatcacctgccacctgaaggtcaccctagctgagcaggacccagatgaactcaacaaggcctgttccttcagcaagccttccaacagctggttcccagtggaaggctcggctgacatctgtcaatgctgtaacaaaggtgactgtggcactccaagccattccaggaggcagcctcatgtcatgagccagtggtccaggtctgcttcccgtaaccgcaggcatgtgacagaagaagcagatgtcaccgtggggccactgatcttcctggacaggaggggtgaccatgaagtagagcagtgggctttgccttctgacacctcagtggtgctgctgggcgtaggcctggctgtggtggtgtccctgactctgactgctgttatcctggttctcaccaggaggtgtcgcactgcctcccaccctgtgtctgcttccgaataaaaaaaaagaaacagaaaaagaaacaaacgcaacacgagaaagaaacaagaagaaaaagggggggggtcaaaaaccccgggggcacaaatggacagccagtttgtaaaggggccataggggaaataaaacaagggggggaaaacaggggagggaaagccggggctggggacacctctggggggcaggacccaccagaaagcggga

SEQ ID NO: 375844 - DNA, 965 bp, Homo sapiens
ctctgcgtctgatggaggagaagaactggaacgctgagaagaggtcccccaccttccacctgggagatgcagcccacctccaggcagaaatccacactggcagccacgtgccactgcggttgtttgtggaccactgcgtggccacaccgacaccagaccagaatgcctccccttatcacaccatcgtggacttccatggctgtcttgtcgacggtctcactgatgcctcttctgcattcaaagttcctcgacccgggccagatacactccagttcacagtggatgtcttccactttgctaatgactccagaaacatgatatacatcacctgccacctgaaggtcaccctagctgagcaggacccagatgaactcaacaaggcctgttccttcagcaagccttccaacagctggttcccagtggaaggctcggctgacatctgtcaatgctgtaacaaaggtgactgtggcactccaagccattccaggaggcagcctcatgtcatgagccagtggtccaggtctgcttcccgtaaccgcaggcatgtgacagaagaagcagatgtcaccgtggggccactgatcttcctggacaggaggggtgaccatgaagtagagcagtgggctttgccttctgacacctcagtggtgctgctgggcgtaggcctggctgtggtggtgtccctgactctgactgctgttatcctggttctcaccaggaggtgtcgcactgcctcccaccctgtgtctgcttccgaataaaaaaaaagaaacagaaaaagaaacaaacgcaacacgagaaagaaacaagaagaaaaagggggggggtcaaaaaccccgggggcacaaatggacagccagtttgtaaaggggccataggggaaataaaacaagggggggaaaacaggggagggaaagccggggctggggacacctctggggggcaggacccaccagaaagcggga

SEQ ID NO: 375845 - DNA, 1397 bp, Homo sapiens
ctttgacaggtgtttacgcatgtaaatgaacgccagccaaactgccaccaggagctataagaaatggtttctttaaggacatcacttttttttggttaatggaggacaaatgagagtaagaagtggacccaccttaccactgggacgtacgcacactttcaagcagaaattatccttgtaggtacgtcacatgcggatgattgtggacccttgggtggcaacacggcactaggccagaaagcttcccaatattcaacgaatgtggaacttccatggatgtttggaaagggtttcaaactgtcttgtcgacggtctcactgatgcctcttctgcattcaaagttcctcgacccgggccagatacactccagttcacagtggatgtcttccactttgctaatgactccagaaacatgatatacatcacctgccacctgaaggtcaccctagctgagcaggacccagatgaactcaacaaggcctgttccttcagcaagccttccaacagctggttcccagtggaaggctcggctgacatctgtcaatgctgtaacaaaggtgactgtggcactccaagccattccaggaggcagcctcatgtcatgagccagtggtccaggtctgcttcccgtaaccgcaggcatgtgacagaagaagcagatgtcaccgtggggccactgatcttcctggacaggaggggtgaccatgaagtagagcagtgggctttgccttctgacacctcagtggtgctgctgggcgtaggcctggctgtggtggtgtccctgactctgactgctgttatcctggttctcaccaggaggtgtcgcactgcctcccaccctgtgtctgcttccgaataaaaaaaaagaagaaagcaatatctggtcgtggtgtggtggtcaggtggaaggtcagaattagtactgactgtgtcgggtggggacgactgtataccacccgccccgtgcactcacatagcatagtccagcaagcactactgtgtctctactgtaaacagggcagggttcatgtccttagacaactataatctatcacctccatgggaaccaacatggaaactcttagatgaaggtcagtctggctggacccaccttacttctaggctagcaaagaatcttatatctctggcccccatggatttgactctagacatgggagtggggaggagagagcttccaggcccacttctccaaggcaagcaggcaggcagctctgtccagatgctagaggccagaaggccagtcatgactgggccctcccagtagggcagtgatcagagcactgcttctgcctggtcttagctgtcaccttgggcttgaagctattcttgggacatgttggtatgaacttgtcaaagctgcagcaaggggtgactgg

SEQ ID NO: 375846 - DNA, 1371 bp, Homo sapiens
ccgtaaaggacaccgcgcgggggagtataaagcaaaacgattctggggcgcgaaatcctgatggcaacggggttatacaggagaaggcattttcctttgtgtttaccaagcggacaggatctcaacaaatagtcccaccctcccccttgaaaaataaagccgcctccggggcgaatccacagcgagagcacaaacccctgggttgtatgtggacaccagggggcccccaccgtcgccagaccgaatgcccccccttatcgcaccatagggactgtcttgtcgacggtctcactgatgcctcttctgcattcaaagttcctcgacccgggccagatacactccagttcacagtggatgtcttccactttgctaatgactccagaaacatgatatacatcacctgccacctgaaggtcaccctagctgagcaggacccagatgaactcaacaaggcctgttccttcagcaagccttccaacagctggttcccagtggaaggctcggctgacatctgtcaatgctgtaacaaaggtgactgtggcactccaagccattccaggaggcagcctcatgtcatgagccagtggtccaggtctgcttcccgtaaccgcaggcatgtgacagaagaagcagatgtcaccgtggggccactgatcttcctggacaggaggggtgaccatgaagtagagcagtgggctttgccttctgacacctcagtggtgctgctgggcgtaggcctggctgtggtggtgtccctgactctgactgctgttatcctggttctcaccaggaggtgtcgcactgcctcccaccctgtgtctgcttccgaataaaaaaaaagaagaaagcaatatctggtcgtggtgtggtggtcaggtggaaggtcagaattagtactgactgtgtcgggtggggacgactgtataccacccgccccgtgcactcacatagcatagtccagcaagcactactgtgtctctactgtaaacagggcagggttcatgtccttagacaactataatctatcacctccatgggaaccaacatggaaactcttagatgaaggtcagtctggctggacccaccttacttctaggctagcaaagaatcttatatctctggcccccatggatttgactctagacatgggagtggggaggagagagcttccaggcccacttctccaaggcaagcaggcaggcagctctgtccagatgctagaggccagaaggccagtcatgactgggccctcccagtagggcagtgatcagagcactgcttctgcctggtcttagctgtcaccttgggcttgaagctattcttgggacatgttggtatgaacttgtcaaagctgcagcaaggggtgactgg

SEQ ID NO: 375847 - DNA, 1249 bp, Homo sapiens
caaccacacaggaaaatacagcacacctccaggcgaggagaccaccacttgcagccaaggaccatgcaggatgtgtgaggaccattgtggcgccacgcttacactggccaagaagcctccccgtagcacgccatagtggactcacaggactgtcttgtcgacggtctcactgatgcctcttctgcattcaaagttcctcgacccgggccagatacactccagttcacagtggatgtcttccactttgctaatgactccagaaacatgatatacatcacctgccacctgaaggtcaccctagctgagcaggacccagatgaactcaacaaggcctgttccttcagcaagccttccaacagctggttcccagtggaaggctcggctgacatctgtcaatgctgtaacaaaggtgactgtggcactccaagccattccaggaggcagcctcatgtcatgagccagtggtccaggtctgcttcccgtaaccgcaggcatgtgacagaagaagcagatgtcaccgtggggccactgatcttcctggacaggaggggtgaccatgaagtagagcagtgggctttgccttctgacacctcagtggtgctgctgggcgtaggcctggctgtggtggtgtccctgactctgactgctgttatcctggttctcaccaggaggtgtcgcactgcctcccaccctgtgtctgcttccgaataaaaaaaaagaagaaagcaatatctggtcgtggtgtggtggtcaggtggaaggtcagaattagtactgactgtgtcgggtggggacgactgtataccacccgccccgtgcactcacatagcatagtccagcaagcactactgtgtctctactgtaaacagggcagggttcatgtccttagacaactataatctatcacctccatgggaaccaacatggaaactcttagatgaaggtcagtctggctggacccaccttacttctaggctagcaaagaatcttatatctctggcccccatggatttgactctagacatgggagtggggaggagagagcttccaggcccacttctccaaggcaagcaggcaggcagctctgtccagatgctagaggccagaaggccagtcatgactgggccctcccagtagggcagtgatcagagcactgcttctgcctggtcttagctgtcaccttgggcttgaagctattcttgggacatgttggtatgaacttgtcaaagctgcagcaaggggtgactgg

SEQ ID NO: 375848 - DNA, 1246 bp, Homo sapiens
tcctcgtggtggccgcagttgtgcacaccccagcccaggctctggcaggctgccaggcggggctcgccgccttcgcagtgcacgttgtccagcaggatgtgtccggtgccatagccgaagaaggcgttggtggtggcggccatggccgccccgcagcccagctgacgacagaccacagcggcatccggcagcccccagtcgtcgtcacacacggtgccccacaggccactgtgcaggatctccactcggccctgacacagggtggagccagccatcctgagacgtccgtacagcccgtactggtggagtgtcaggaggccactctgatggtcatggtcagcaaagacctttttggcaccgggaagctcatcagggctgctgacctcaccttgggcccagaggcctgtgagcctctggtctccatggacacagaagatgtggtcaggtttgaggttggactccacgagtgtggcaacagcatgcaggtaactgacgatgccctggtgtacagcaccttcctgctccatgacccccgccccgtgggaaacctgtccatcgtgaggactaaccgcgcagagattcccatcgagtgccgctaccccaggcagggcaatgtgagcagccaggccatcctgcccacctggttgcccttcaggaccacggtgttctcagaggagaagctgactttctctctgcgtctgatggaggagaactggaacgctgagaagaggtcccccaccttccacctgggagatgcagcccacctccaggcagaaatccacactggcagccacgtgccactgcggttgtttgtggaccactgcgtggccacaccgacaccagaccagaatgcctccccttatcacaccatcgtggacttccatggctgtcttgtcgacggtctcactgatgcctcttctgcattcaaagttcctcgacccgggccagatacactccagttcacagtggatgtcttccactttgctaatgactccagaaacatgatatacatcacctgccacctgaaggtcaccctagctgagcaggacccagatgaactcaacaaggcctgttccttcagcaagccttccaacagcttgtttccacgtgaaacgctcggcttgacatcttgccatgctgcaaccaaagtgacttggggtctcccagcccattctagatggtatcttgctcgcttggatcactcgttcatctttttcttcccgtaccccccgccttggcaccaaag

SEQ ID NO: 375849 - DNA, 1033 bp, Homo sapiens
  misc_feature (34)..(34): n is a, c, g, or t
  misc_feature (38)..(38): n is a, c, g, or t
  misc_feature (40)..(40): n is a, c, g, or t
  misc_feature (48)..(48): n is a, c, g, or t
cgttgcctcaggccccgggtttagagagaagggncttntnttgggttnaggagaagaactggaacgctgagaagaggtcccccaccttccacctgggagatgcagcccacctccaggcagaaatccacactggcagccacgtgccactgcggttgtttgtggaccactgcgtggccacaccgacaccagaccagaatgcctccccttatcacaccatcgtggacttccatggctgtcttgtcgacggtctcactgatgcctcttctgcattcaaagttcctcgacccgggccagatacactccagttcacagtggatgtcttccactttgctaatgactccagaaacatgatatacatcacctgccacctgaaggtcaccctagctgagcaggacccagatgaactcaacaaggcctgttccttcagcaagccttccaacaggcaacaaaaatctaagctgcttctctttcatctcactggttcccagtggaaggctcggctgacatctgtcaatgctgtaacaaaggtgactgtggcactccaagccattccaggaggcagcctcatgtcatgagccagtggtccaggtctgcttcccgtaaccgcaggcatgtgacagaagaagcagatgtcaccgtggggccactgatcttcctggacaggaggggtgaccatgaagtagagcagtgggctttgccttctgacacctcagtggtgctgctgggcgtaggcctggctgtggtggtgtccctgactctgactgctgttatcctggttctcaccaggaggtgtcgcactgcctcccaccctgtgtctgcttccgaataaaaaaaaagaaacagaaaaagaaacaaacgcaacacgagaaagaaacaagaagaaaaagggggggggtcaaaaaccccgggggcacaaatggacagccagtttgtaaaggggccataggggaaataaaacaagggggggaaaacaggggagggaaagccggggctggggacacctctggggggcaggacccaccagaaagcggga

SEQ ID NO: 375850 - DNA, 1318 bp, Homo sapiens
  misc_feature (1227)..(1227): n is a, c, g, or t
tcctcgtggtggccgcagttgtgcacaccccagcccaggctctggcaggctgccaggcggggctcgccgccttcgcagtgcacgttgtccagcaggatgtgtccggtgccatagccgaagaaggcgttggtggtggcggccatggccgccccgcagcccagctgacgacagaccacagcggcatccggcagcccccagtcgtcgtcacacacggtgccccacaggccactgtgcaggatctccactcggccctgacacagggtggagccagccatcctgagacgtccgtacagcccgtactggtggagtgtcaggaggccactctgatggtcatggtcagcaaagacctttttggcaccgggaagctcatcagggctgctgacctcaccttgggcccagaggcctgtgagcctctggtctccatggacacagaagatgtggtcaggtttgaggttggactccacgagtgtggcaacagcatgcaggtaactgacgatgccctggtgtacagcaccttcctgctccatgacccccgccccgtgggaaacctgtccatcgtgaggactaaccgcgcagagattcccatcgagtgccgctaccccaggcagggcaatgtgagcagccaggccatcctgcccacctggttgcccttcaggaccacggtgttctcagaggagaagctgactttctctctgcgtctgatggaggagaactggaacgctgagaagaggtcccccaccttccacctgggagatgcagcccacctccaggcagaaatccacactggcagccacgtgccactgcggttgtttgtggaccactgcgtggccacaccgacaccagaccagaatgcctccccttatcacaccatcgtggacttccatggctgtcttgtcgacggtctcactgatgcctcttctgcattcaaagttcctcgacccgggccagatacactccagttcacagtggatgtcttccactttgctaatgactccagaaacatgcgatacttgatatgactagcctgccacctgaatgtgaagcctagcttacgccgaccctaatgaactgataaagggcttgtagcttaagcgaacccttcgaccagtttggtcgcccacgggtacggcctctaactggaatgtgttacttccctgtcactacatttccctcgtagcctctcataactctttctatatatggcagcctcgccgtcctcatcctttngttgactaagccactttctccctctcagctacgtctccgtaccattgaacccctgtcacacacataattatcttgatgtttcagcgcaagg

SEQ ID NO: 375851 - DNA, 1083 bp, Homo sapiens
gaaacaaaggttattgcggacaaatacaaattctgcgtcgcggcaactacacctcaaactttaatcgatctgtgttgaataacggcacgagaaagaccggtctaaactctcctagtcttatggtctggtcttacttcctcatatgacgccgcgacaagatgtcctacaatggtttaagcaggaaggggggggggcgcgggtgtgtacgaaggagcggtgagatggacacgccgtacatggttaattcccgatgaagcctgattcgatggaagtacaggaaagtacccgtatattatcgatgtggatttgctaaggctgttatatcccacggttgtagaaagcattgttgggctttcatagtaaattgtctcaggcacaggaagcctccattttatacttgatgttttcaccttgaataagcgcccaggcgacataatatacatcacctgccacctgaaggtcaccctagctgagcaggacccagatgaactcaacaaggcctgttccttcagcaagccttccaacagctggttcccagtggaaggctcggctgacatctgtcaatgctgtaacaaaggtgactgtggcactccaagccattccaggaggcagcctcatgtcatgagccagtggtccaggtctgcttcccgtaaccgcaggcatgtgacagaagaagcagatgtcaccgtggggccactgatcttcctggacaggaggggtgaccatgaagtagagcagtgggctttgccttctgacacctcagtggtgctgctgggcgtaggcctggctgtggtggtgtccctgactctgactgctgttatcctggttctcaccaggaggtgtcgcactgcctcccaccctgtgtctgcttccgaataaaaaaaaagaaacagaaaaagaaacaaacgcaacacgagaaagaaacaagaagaaaaagggggggggtcaaaaaccccgggggcacaaatggacagccagtttgtaaaggggccataggggaaataaaacaagggggggaaaacaggggagggaaagccggggctggggacacctctggggggcaggacccaccagaaagcggga

SEQ ID NO: 375852 - DNA, 1060 bp, Homo sapiens
ccttatcattacacggcaggataaaagagggcggggcgcgaacacgacgtgatcccagtggccgcattgggaacatggtgttctaaatgtcgcgaaatttcttttaatagtgacgggtactaataatccaataaaaggggcactatgtttcaacatctataggtggccacgtcaggatgagaatcaaagtatggtacttgcctcgcttcgtgtagatatggtaacgtggtagagagcgcacaatcaagtgaacaataaggctgccccttataagacagtgtgggatatgcaggatgtgatataggcgggtgctgggggaagcttatgggcattcaaagttattggactgagtcaagaaaaattcgagttcacagtgtattttctccggtttgggtaatactcccgaaacatgatatacatcacctgccacctgaaggtcaccctagctgagcaggacccagatgaactcaacaaggcctgttccttcagcaagccttccaacagctggttcccagtggaaggctcggctgacatctgtcaatgctgtaacaaaggtgactgtggcactccaagccattccaggaggcagcctcatgtcatgagccagtggtccaggtctgcttcccgtaaccgcaggcatgtgacagaagaagcagatgtcaccgtggggccactgatcttcctggacaggaggggtgaccatgaagtagagcagtgggctttgccttctgacacctcagtggtgctgctgggcgtaggcctggctgtggtggtgtccctgactctgactgctgttatcctggttctcaccaggaggtgtcgcactgcctcccaccctgtgtctgcttccgaataaaaaaaaagaaacagaaaaagaaacaaacgcaacacgagaaagaaacaagaagaaaaagggggggggtcaaaaaccccgggggcacaaatggacagccagtttgtaaaggggccataggggaaataaaacaagggggggaaaacaggggagggaaagccggggctggggacacctctggggggcaggacccaccagaaagcggga

SEQ ID NO: 375853 - DNA, 1028 bp, Homo sapiens
cttttgcgtcatctggtatcaaaataagtgttggcgtgacgatatcgaatctaaggttgcttaggaaaggggttaaagaagaggcacaattttttgagtaggaaacaagaatagggttcagaggggccccccctttcacaaggataacggccccttcgggatgcgttcacattacgtacctagtgccgtcggtgattagggacgatgtgttgcgcccggccacagacataaatgcttccccttaaacacagtggtgggattcacgcaggtcttttgagggtctcgtggagcctctttggcattgaaagttcttgattcgggccaaaagcactccagttcccaggtatgttctccactttgctattacttccagaaccatgatatacatcacctgccacctgaaggtcaccctagctgagcaggacccagatgaactcaacaaggcctgttccttcagcaagccttccaacagctggttcccagtggaaggctcggctgacatctgtcaatgctgtaacaaaggtgactgtggcactccaagccattccaggaggcagcctcatgtcatgagccagtggtccaggtctgcttcccgtaaccgcaggcatgtgacagaagaagcagatgtcaccgtggggccactgatcttcctggacaggaggggtgaccatgaagtagagcagtgggctttgccttctgacacctcagtggtgctgctgggcgtaggcctggctgtggtggtgtccctgactctgactgctgttatcctggttctcaccaggaggtgtcgcactgcctcccaccctgtgtctgcttccgaataaaaaaaaagaaacagaaaaagaaacaaacgcaacacgagaaagaaacaagaagaaaaagggggggggtcaaaaaccccgggggcacaaatggacagccagtttgtaaaggggccataggggaaataaaacaagggggggaaaacaggggagggaaagccggggctggggacacctctggggggcaggacccaccagaaagcggga

SEQ ID NO: 375854 - DNA, 1066 bp, Homo sapiens
tacgcattcatagcgcgcacgttattactaccacgtctagttggccgatatacctactttccgacaggcactccctgcgaatacgaccccgcttgctggtatctcactttgcaatgctatcgtacattattcgtgctagcctcgcgacataaagtaaatagaggggtacgggtccgacgcttgctctttaggttacacaacggtttgtggcattcctagtttgcatgatggcgctcaaaggctcttaaaagcgcacgtcgtcactacctgcatctaccagaaattaccgaggatgcttgattatggatcatgcagggggctcgttgggaatcagaagctccacgtcccagggccacaaacatcttccctgttggcaggctaagtctttcctctatgacaacgctccccgaaccattgtatgcttttaccgtccacctaaaggtctccctaactgagcgggcccacatttacttctcaagtgcctgttccttcagcaagccttctctacagctggttcccagtggaaggctcggctgacatctgtcaatgctgtaacaaaggtgactgtggcactccaagccattccaggaggcagcctcatgtcatgagccagtggtccaggtctgcttcccgtaaccgcaggcatgtgacagaagaagcagatgtcaccgtggggccactgatcttcctggacaggaggggtgaccatgaagtagagcagtgggctttgccttctgacacctcagtggtgctgctgggcgtaggcctggctgtggtggtgtccctgactctgactgctgttatcctggttctcaccaggaggtgtcgcactgcctcccaccctgtgtctgcttccgaataaaaaaaaagaaacagaaaaagaaacaaacgcaacacgagaaagaaacaagaagaaaaagggggggggtcaaaaaccccgggggcacaaatggacagccagtttgtaaaggggccataggggaaataaaacaagggggggaaaacaggggagggaaagccggggctggggacacctctggggggcaggacccaccagaaagcggga

SEQ ID NO: 375855 - DNA, 1241 bp, Homo sapiens
tcctcgtggtggccgcagttgtgcacaccccagcccaggctctggcaggctgccaggcggggctcgccgccttcgcagtgcacgttgtccagcaggatgtgtccggtgccatagccgaagaaggcgttggtggtggcggccatggccgccccgcagcccagctgacgacagaccacagcggcatccggcagcccccagtcgtcgtcacacacggtgccccacaggccactgtgcaggatctccactcggccctgacacagggtggagccagccatcctgagacgtccgtacagcccgtactggtggagtgtcaggaggccactctgatggtcatggtcagcaaagacctttttggcaccgggaagctcatcagggctgctgacctcaccttgggcccagaggcctgtgagcctctggtctccatggacacagaagatgtggtcaggtttgaggttggactccacgagtgtggcaacagcatgcaggtaactgacgatgccctggtgtacagcaccttcctgctccatgacccccgccccgtgggaaacctgtccatcgtgaggactaaccgcgcagagattcccatcgagtgccgctaccccaggcagggcaatgtgagcagccaggccatcctgcccacctggttgcccttcaggaccacggtgttctcagaggagaagctgactttctctctgcgtctgatggaggagaactggaacgctgagaagaggtcccccaccttccacctgggagatgcagcccacctccaggcagaaatccacactggcagccacgtgccactgcggttgtttgtggaccactgcgtggccacaccgacaccagaccagaatgcctccccttgcaacactcacgacccgcccggactgtgaggtatacggcctcacccgtgcccctctttgtatccaaacgccctcctcccacggccccgtactctcccccctcacaaccgacaccctccctcttccggctcgcgctcccaattcgctgttctcactcccctaccctcctgcagccaaccccatatgttcctggtcgtagctgcactccactccggccggatctctcactatcttttccactccccggtccacatagtatattttcgcaatcctccgcttagcccgccccgacactcccccctcctgcaaccattttgggcgtcgcgggcccttccctcttggcgccctcgcttacgttctgttttgactcattacacctac

SEQ ID NO: 375856 - DNA, 1461 bp, Homo sapiens
tcctcgtggtggccgcagttgtgcacaccccagcccaggctctggcaggctgccaggcggggctcgccgccttcgcagtgcacgttgtccagcaggatgtgtccggtgccatagccgaagaaggcgttggtggtggcggccatggccgccccgcagcccagctgacgacagaccacagcggcatccggcagcccccagtcgtcgtcacacacggtgccccacaggccactgtgcaggatctccactcggccctgacacagggtggagccagccatcctgagacgtccgtacagcccgtactggtggagtgtcaggaggccactctgatggtcatggtcagcaaagacctttttggcaccgggaagctcatcagggctgctgacctcaccttgggcccagaggcctgtgagcctctggtctccatggacacagaagatgtggtcaggtttgaggttggactccacgagtgtggcaacagcatgcaggtaactgacgatgccctggtgtacagcaccttcctgctccatgacccccgccccgtgggaaacctgtccatcgtgaggactaaccgcgcagagattcccatcgagtgccgctaccccaggcagggcaatgtgagcagccaggccatcctgcccacctggttgcccttcaggaccacggtgttctcagaggagaagctgactttctctctgcgtctgatggaggtgacagaagaagcagatgtcaccgtggggccactgatcttcctggacaggaggggtgaccatgaagtagagcagtgggctttgccttctgacacctcagtggtgctgctgggcgtaggcctggctgtggtggtgtccctgactctgactgctgttatcctggttctcaccaggaggtgtcgcactgcctcccaccctgtgtctgcttccgaataaaaaaaaagaagaaagcaatatctggtcgtggtgtggtggtcaggtggaaggtcagaattagtactgactgtgtcgggtggggacgactgtataccacccgccccgtgcactcacatagcatagtccagcaagcactactgtgtctctactgtaaacagggcagggttcatgtccttagacaactataatctatcacctccatgggaaccaacatggaaactcttagatgaaggtcagtctggctggacccaccttacttctaggctagcaaagaatcttatatctctggcccccatggatttgactctagacatgggagtggggaggagagagcttccaggcccacttctccaaggcaagcaggcaggcagctctgtccagatgctagaggccagaaggccagtcatgactgggccctcccagtagggcagtgatcagagcactgcttctgcctggtcttagctgtcaccttgggcttgaagctattcttgggacatgttggtatgaacttgtcaaagctgcagcaaggggtgactgg

SEQ ID NO: 375857 - DNA, 1443 bp, Homo sapiens
  misc_feature (1)..(1): n is a, c, g, or t
  misc_feature (5)..(7): n is a, c, g, or t
ngccnnngcccccgcgccggcggcggcgcggcgcccgcgcttccgtagcgctcctcgtaggccggggctcggcgcgcgcacccgcactaaagacgcttcttcccggcgggtaggaatcccgccggcgagccgaacagttccccgagcgcagcccgcggaccaccacccggccgcacgggccgcttttgtcccccgcccgccgcttctgtccgagaggccgcccgcgaggcgcatcctgaccgcgagcgtcgggtcccagagccgggcgcggctggggcccgaggctagcatctctcgggagccgcaaggcgagagctgcaaagtttaattagacacttcagaattttgatcacctaatgttgatttcagatgtaaaagtcaagagaagactctaaaaatagcaaagatgcttttgagccagaatgccttcatcttcagatcacttaatttggttctcatggtgtatatcagcctcgtgtttggtatttcatatgattcgcctgattacacagatgaatcttgcactttcaagatatcattgcgaaatttccggtccatcttatcatgggaattaaaaaaccactccattgtaccaactcactatacattgctgtatacaatcatgagtaaaccagaagatttgaaggtggttaagaactgtgcaaataccacaagatcattttgtgacctcacagatgagtggagaagcacacacgaggcctatgtcaccgtcctagaaggattcagcgggaacacaacgttgttcagttgctcacacaatttctggctggccatagacatgtcttttgaaccaccagagtttgagattgttggttttaccaaccacattaatgtgatggtgaaatttccatctattgttgaggaagaattacagtttgatttatctctcgtcattgaagaacagtcagagggaattgttaagaagcataaacccgaaataaaaggaaacatgagtggaaatttcacctatatcattgacaagttaattccaaacacgaactactgtgtatctgtttatttagagcacagtgatgagcaagcagtaataaagtctcccttaaaatgcaccctccttccacctggccaggaatcagaatcagcagaatctgccaaaataggaggaataattactgtgtttttgatagcattggtcttgacaagcaccatagtgacactgaaatggattggttatatatgcttaagaaatagcctccccaaagtcttgaggcaaggtctcgctaagggctggaatgcagtggctattcacaggtgcagtcataatgcactacagtctgaaactcctgagctcaaacagtcgtcctgcctaagcttccccagtagctgggattacaagcgtgcatccctgtgccccagtgattaagttttattatgtagaaaataaagagcaaacagtacagctga

SEQ ID NO: 375858 - DNA, 1041 bp, Homo sapiens
  misc_feature (1)..(1): n is a, c, g, or t
  misc_feature (5)..(7): n is a, c, g, or t
ngccnnngcccccgcgccggcggcggcgcggcgcccgcgcttccgtagcgctcctcgtaggccggggctcggcgcgcgcacccgcactaaagacgcttcttcccggcgggtaggaatcccgccggcgagccgaacagttccccgagcgcagcccgcggaccaccacccggccgcacgggccgcttttgtcccccgcccgccgcttctgtccgagaggccgcccgcgaggcgcatcctgaccgcgagcgtcgggtcccagagccgggcgcggctggggcccgaggctagcatctctcgggagccgcaaggcgagagctgcaaagatgtaaaagtcaagagaagactctaaaaatagcaaagatgcttttgagccagaatgccttcatcttcagatcacttaatttggttctcatggtgtatatcagcctcgtgtttggtatttcatatgattcgcctgattacacagatgaatcttgcactttcaagatatcattgcgaaatttccggtccatcttatcatgggaattaaaaaaccactccattgtaccaactcactatacattgctgtatacaatcatgagtaaaccagaagatttgaaggtggttaagaactgtgcaaataccacaagatcattttgtgacctcacagatgagtggagaagcacacacgaggcctatgtcaccgtcctagaaggattcagcgggaacacaacgttgttcagttgctcacacaatttctggctggccatagacatgtcttttgaaccaccagagtttgagattgttggttttaccaaccacattaatgtgatggtgaaatttccatctattgttgaggaagaattacagtttgatttatctctcgtcattgaagaacagtcagagggaattgttaagaagcataaacccgaaataaaaggaaacatgagtggaaatttcacctatatcattgacaagttaattccaaacacgaactactgtgtatctgtttatttagagcacagtgatgagcaagcagtaataaagtctcccttaaaatgc

SEQ ID NO: 375859 - DNA, 867 bp, Homo sapiens
gcacctgcgaccccaggacccctcccgggccctgtcctgcgccctccacgcgtcgcccctgctgggagtccgctttcgttgcacccctccgcgtcccaccccaccccaccaaggatgcccaggataccgggcatttgccactgcaagatatgtaaaagtcaagagaagactctaaaaatagcaaagatgcttttgagccagaatgccttcatcttcagatcacttaatttggttctcatggtgtatatcagcctcgtgtttggtatttcatatgattcgcctgattacacagatgaatcttgcactttcaagatatcattgcgaaatttccggtccatcttatcatgggaattaaaaaaccactccattgtaccaactcactatacattgctgtatacaatcatgagtaaaccagaagatttgaaggtggttaagaactgtgcaaataccacaagatcattttgtgacctcacagatgagtggagaagcacacacgaggcctatgtcaccgtcctagaaggattcagcgggaacacaacgttgttcagttgctcacacaatttctggctggccatagacatgtcttttgaaccaccagagtttgagattgttggttttaccaaccacattaatgtgatggtgaaatttccatctattgttgaggaagaattacagtttgatttatctctcgtcattgaagaacagtcagagggaattgttaagaagcataaacccgaaataaaaggaaacatgagtggaaatttcacctatatcattgacaagttaattccaaacacgaactactgtgtatctgtttatttagagcacagtgatgagcaagcagtaataaagtctcccttaaaatgc

SEQ ID NO: 375860 - DNA, 671 bp, Homo sapiens
atatatttttaagtggaaaaagcaggcagaacagggaccgtacatattgttgttagtgtcagctcccaaatggatcttattttatctcagatcacagtccttgcaccatgtggctgctggcaccaatgtagagtaaaaaccatctatgtgggcattttttggcacaagaaaaatctcaatctgataccaataaatgtgtgttaaagaatgtcagacttagagtaatcattgcaagttgagcccagataaaactattgcctctctaatgtgttttcttccttctagtgtatatcagcctcgtgtttggtatttcatatgattcgcctggtaagagatgttttttggcttcactaaattttgtataagagtgaaagtgttggggcaaccattcagaggtataaaatgtgggagatttgatttctgattgtacatctgttgcctgttttattgggattctttctctgtaaaaggagctaaaatgagctaactctggttttttgagagatacaaaactagtctaagaaatgcagccctccagatcatggttatacctgtttctgtaatactccaagctcatttatcaatgctctcatatctgcagatcgagctcgtagcggtccgcctcatattctattctgcctcacaaaatctaacacgcgtacttacagccg

SEQ ID NO: 375861 - DNA, 4458 bp, Homo sapiens
  misc_feature (1)..(1): n is a, c, g, or t
  misc_feature (5)..(7): n is a, c, g, or t
ngccnnngcccccgcgccggcggcggcgcggcgcccgcgcttccgtagcgctcctcgtaggccggggctcggcgcgcgcacccgcactaaagacgcttcttcccggcgggtaggaatcccgccggcgagccgaacagttccccgagcgcagcccgcggaccaccacccggccgcacgggccgcttttgtcccccgcccgccgcttctgtccgagaggccgcccgcgaggcgcatcctgaccgcgagcgtcgggtcccagagccgggcgcggctggggcccgaggctagcatctctcgggagccgcaaggcgagagctgcaaagtttaattagacacttcagaattttgatcacctaatgttgatttcagatgtaaaagtcaagagaagactctaaaaatagcaaagatgcttttgagccagaatgccttcatcttcagatcacttaatttggttctcatggtgtatatcagcctcgtgtttggtatttcatatgattcgcctgattacacagatgaatcttgcactttcaagatatcattgcgaaatttccggtccatcttatcatgggaattaaaaaaccactccattgtaccaactcactatacattgctgtatacaatcatgagtaaaccagaagatttgaaggtggttaagaactgtgcaaataccacaagatcattttgtgacctcacagatgagtggagaagcacacacgaggcctatgtcaccgtcctagaaggattcagcgggaacacaacgttgttcagttgctcacacaatttctggctggccatagacatgtcttttgaaccaccagagtttgagattgttggttttaccaaccacattaatgtgatggtgaaatttccatctattgttgaggaagaattacagtttgatttatctctcgtcattgaagaacagtcagagggaattgttaagaagcataaacccgaaataaaaggaaacatgagtggaaatttcacctatatcattgacaagttaattccaaacacgaactactgtgtatctgtttatttagagcacagtgatgagcaagcagtaataaagtctcccttaaaatgcaccctccttccacctggccaggaatcagaattttcataactttttagcctggccatttcctaacctgccaccgttggaagccatggatatggtggaggtcatttacatcaacagaaagaagaaagtgtgggattataattatgatgatgaaagtgatagcgatactgaggcagcgcccaggacaagtggcggtggctataccatgcatggactgactgtcaggcctctgggtcaggcctctgccacctctacagaatcccagttgatagacccggagtccgaggaggagcctgacctgcctgaggttgatgtggagctccccacgatgccaaaggacagccctcagcagttggaactcttgagtgggccctgtgagaggagaaagagtccactccaggacccttttcccgaagaggactacagctccacggaggggtctgggggcagaattaccttcaatgtggacttaaactctgtgtttttgagagttcttgatgacgaggacagtgacgacttagaagcccctctgatgctatcgtctcatctggaagagatggttgacccagaggatcctgataatgtgcaatcaaaccatttgctggccagcggggaagggacacagccaacctttcccagcccctcttcagagggcctgtggtccgaagatgctccatctgatcaaagtgacacttctgagtcagatgttgaccttggggatggttatataatgagatgactccaaaactattgaatgaacttggacagacaagcacctacagggttctttgtctctgcatcctaacttgctgccttatcgtctgcaagtgttctccaagggaaggaggaggaaactgtggtgttcctttcttccaggtgacatcacctatgcacattcccagtatggggaccatagtatcattcagtgcattgtttacatattcaaagtggtgcactttgaaggaagcacatgtgcacctttcctttacactaatgcacttaggatgtttctgcatcatgtctaccagggagcagggttccccacagtttcagaggtggtccaggaccctatgatatttctcttctttcgttcttttttttttttttttgagacagagtctcgttctgtcgcccaagctggagcgcaatggtgtgatcttggctcactgcaacatccgcctcccgggttcaggtgattctcctgcctcagcctccctcgcaagtagctgggattacaggcgcctgccaccatgcctagcaaatttttgtatttttagtagagacaggattttaccatgttggccaggctggtctcgaactcctgacctcaagtgatctgccctcctcagcctcgtaaagtgctgggattacaggggtgagccgctgtgcctggctggccctgtgatatttctgtgaaataaattgggccagggtgggagcagggaaagaaaaggaaaatagtagcaagagctgcaaagcaggcaggaagggaggaggagagccaggtgagcagtggagagaaggggggccctgcacaaggaaacagggaagagccatcgaagtttcagtcggtgagccttgggcacctcacccatgtcacatcctgtctcctgcaattggaattccaccttgtccagccctccccagttaaagtggggaagacagactttaggatcacgtgtgtgactaatacagaaaggaaacatggcgtcggggagagggataaaacctgaatgccatattttaagttaaaaaaaaaaaaagcaaacacaaagatgcttcaagatcttcaggagaagtatggtatacaagtttcagggaccctatttgacaattttcagagtgctctctatgctgattccgagtcgagtgtgtcagctgtgattacagtgcctgtggatctaggccgggttgggggggtgtgggcgggggaagggaagtctggcccggagcaattgctcctgccggtaaccccagcactttgggatgcctaaacaggcgtatcgcttgaggccagtaattcgagaccagcctgggcaacatggcaaatctgtctctacaaaacaaaattagaaaaattaactgggcgtagtggcatgtgcctgttgtcccagctacttgggaggctgaggtgggagaatggcttgagcccgggaagcggaggttgcagtgagccaagatcatgtcactgcgcttcagcctgggtgacagaaccagaccctgtctttaaaaagggagttggtggggagaggttctagaatgtcatgtagcaaccagtttaaggactgggactcagggatccaactcccacagtttccctgtgtgaccctaggcatttgacttagcctttctgagcctcaggttttttgtttctgaagtaaaaggattggactaggtaatctccaagatcctaggaacccaggagaaagatgagaaaatgtacaagaatgaacactcaggtggaaatgctgcaatcctgagaagctcccaggatgaatgaaaggcacaggacctcttacccctcacccctgcccccctcaagagctggtttctcaaacctttctcttaggccccttcaaagggggaaaactaaaaattatacaagttatagttcaaggactttaaatagattatttatatgattgctcataaggatgaggctgtgaggagggaacaccttatttaatctaatgaaattccataggaaagaggccttttgtatattgaatcaatttatctgccttctcagtgcatctgtcatattctgaaagattctgggttgatcttttgcgataacctctatggctgtgagtgtgtgtgtgtgtttgtgtattttttaacattttgtataatgattggaggttggtaaaaagtaacacaacagtacttttttaatacaaacttggtgtggtcttgagttgtcttccattggagagcgtacgtgtgccacagattggtgcacctgccggcatctctaggattgcaccaactccctctagctcttcttggtggcctgcaggggcctagggcgcattcacttccctctgcttgactttacgtggtgttctagcgtcagacatcaggcgatgccgtgcattacccaagacactggacagctccggatcttcccgtctaaccactaatcaagttaaaaagaggaaattaacgctttcttagtagtctctgaaagaaactagttatttgcgtaaagatgacttggttttgtgttgtttatccctggggagaagggtaaagaagaccctcaaactggatttgctgctgaagtgcttttaactcacctgtgcggagagcggacttcaagagagggcgtgccggtgctccggacaaaacctggggaatactgaaagccacca

SEQ ID NO: 375862 - DNA, 4195 bp, Homo sapiens
  misc_feature (1)..(1): n is a, c, g, or t
  misc_feature (5)..(7): n is a, c, g, or t
ngccnnngcccccgcgccggcggcggcgcggcgcccgcgcttccgtagcgctcctcgtaggccggggctcggcgcgcgcacccgcactaaagacgcttcttcccggcgggtaggaatcccgccggcgagccgaacagttccccgagcgcagcccgcggaccaccacccggccgcacgggccgcttttgtcccccgcccgccgcttctgtccgagaggccgcccgcgaggcgcatcctgaccgcgagcgtcgggtcccagagccgggcgcggctggggcccgaggctagcatctctcgggagccgcaaggcgagagctgcaaagtttaattagacacttcagaattttgatcacctaatgttgatttcagatgtaaaagtcaagagaagactctaaaaatagcaaagatgcttttgagccagaatgccttcatcttcagatcacttaatttggttctcatggtgtatatcagcctcgtgtttggtatttcatatgattcgcctgattacacagatgaatcttgcactttcaagatatcattgcgaaatttccggtccatcttatcatgggaattaaaaaaccactccattgtaccaactcactatacattgctgtatacaatcatgagtaaaccagaagatttgaaggtggttaagaactgtgcaaataccacaagatcattttgtgacctcacagatgagtggagaagcacacacgaggcctatgtcaccgtcctagaaggattcagcgggaacacaacgttgttcagttgctcacacaatttctggctggccatagacatgtcttttgaaccaccagagtttgagattgttggttttaccaaccacattaatgtgatggtgaaatttccatctattgttgaggaagaattacagtttgatttatctctcgtcattgaagaacagtcagagggaattgttaagaagcataaacccgaaataaaaggaaacatgagtggaaatttcacctatatcattgacaagttaattccaaacacgaactactgtgtatctgtttatttagagcacagtgatgagcaagcagtaataaagtctcccttaaaatgcaccctccttccacctggccaggaatcagaatcagcagaatctgccaaaataggaggaataattactgtgtttttgatagcattggtcttgacaagcaccatagtgacactgaaatggattggttatatatgcttaagaaatagcctccccaaagtcttgaattttcataactttttagcctggccatttcctaacctgccaccgttggaagccatggatatggtggaggtcatttacatcaacagaaagaagaaagtgtgggattataattatgatgatgaaagtgatagcgatactgaggcagcgcccaggacaagtggcggtggctataccatgcatggactgactgtcaggcctctgggtcaggcctctgccacctctacagaatcccagttgatagacccggagtccgaggaggagcctgacctgcctgaggttgatgtggagctccccacgatgccaaaggacagccctcagcagttggaactcttgagtgggccctgtgagaggagaaagagtccactccaggacccttttcccgaagaggactacagctccacggaggggtctgggggcagaattaccttcaatgtggacttaaactctgtgtttttgagagttcttgatgacgaggacagtgacgacttagaagcccctctgatgctatcgtctcatctggaagagatggttgacccagaggatcctgataatgtgcaatcaaaccatttgctggccagcggggaagggacacagccaacctttcccagcccctcttcagagggcctgtggtccgaagatgctccatctgatcaaagtgacacttctgagtcagatgttgaccttggggatggttatataatgagatgactccaaaactattgaatgaacttggacagacaagcacctacagggttctttgtctctgcatcctaacttgctgccttatcgtctgcaagtgttctccaagggaaggaggaggaaactgtggtgttcctttcttccaggtgacatcacctatgcacattcccagtatggggaccatagtatcattcagtgcattgtttacatattcaaagtggtgcactttgaaggaagcacatgtgcacctttcctttacactaatgcacttaggatgtttctgcatcatgtctaccagggagcagggttccccacagtttcagaggtggtccaggaccctatgatatttctcttctttcgttcttttttttttttttttgagacagagtctcgttctgtcgcccaagctggagcgcaatggtgtgatcttggctcactgcaacatccgcctcccgggttcaggtgattctcctgcctcagcctccctcgcaagtagctgggattacaggcgcctgccaccatgcctagcaaatttttgtatttttagtagagacaggattttaccatgttggccaggctggtctcgaactcctgacctcaagtgatctgccctcctcagcctcgtaaagtgctgggattacaggggtgagccgctgtgcctggctggccctgtgatatttctgtgaaataaattgggccagggtgggagcagggaaagaaaaggaaaatagtagcaagagctgcaaagcaggcaggaagggaggaggagagccaggtgagcagtggagagaaggggggccctgcacaaggaaacagggaagagccatcgaagtttcagtcggtgagccttgggcacctcacccatgtcacatcctgtctcctgcaattggaattccaccttgtccagccctccccagttaaagtggggaagacagactttaggatcacgtgtgtgactaatacagaaaggaaacatggcgtcggggagagggataaaacctgaatgccatattttaagttaaaaaaaaaaaaagcaaacacaaagatgcttcaagatcatgtcactgcgcttcagcctgggtgacagaaccagaccctgtctttaaaaagggagttggtggggagaggttctagaatgtcatgtagcaaccagtttaaggactgggactcagggatccaactcccacagtttccctgtgtgaccctaggcatttgacttagcctttctgagcctcaggttttttgtttctgaagtaaaaggattggactaggtaatctccaagatcctaggaacccaggagaaagatgagaaaatgtacaagaatgaacactcaggtggaaatgctgcaatcctgagaagctcccaggatgaatgaaaggcacaggacctcttacccctcacccctgcccccctcaagagctggtttctcaaacctttctcttaggccccttcaaagggggaaaactaaaaattatacaagttatagttcaaggactttaaatagattatttatatgattgctcataaggatgaggctgtgaggagggaacaccttatttaatctaatgaaattccataggaaagaggccttttgtatattgaatcaatttatctgccttctcagtgcatctgtcatattctgaaagattctgggttgatcttttgcgataacctctatggctgtgagtgtgtgtgtgtgtttgtgtattttttaacattttgtataatgattggaggttggtaaaaagtaacacaacagtacttttttaatacaaacttggtgtggtcttgagttgtcttccattggagagcgtacgtgtgccacagattggtgcacctgccggcatctctaggattgcaccaactccctctagctcttcttggtggcctgcaggggcctagggcgcattcacttccctctgcttgactttacgtggtgttctagcgtcagacatcaggcgatgccgtgcattacccaagacactggacagctccggatcttcccgtctaaccactaatcaagttaaaaagaggaaattaacgctttcttagtagtctctgaaagaaactagttatttgcgtaaagatgacttggttttgtgttgtttatccctggggagaagggtaaagaagaccctcaaactggatttgctgctgaagtgcttttaactcacctgtgcggagagcggacttcaagagagggcgtgccggtgctccggacaaaacctggggaatactgaaagccacca

SEQ ID NO: 375863 - DNA, 4249 bp, Homo sapiens
ctctaaagcgcaaggcgagagctgcaaagatgtaaaagtcaagagaagactctaaaaatagcaaagatgcttttgagccagaatgccttcatcttcagatcacttaatttggttctcatggtgtatatcagcctcgtgtttggtatttcatatgattcgcctgattacacagatgaatcttgcactttcaagatatcattgcgaaatttccggtccatcttatcatgggaattaaaaaaccactccattgtaccaactcactatacattgctgtatacaatcatgagtaaaccagaagatttgaaggtggttaagaactgtgcaaataccacaagatcattttgtgacctcacagatgagtggagaagcacacacgaggcctatgtcaccgtcctagaaggattcagcgggaacacaacgttgttcagttgctcacacaatttctggctggccatagacatgtcttttgaaccaccagagtttgagattgttggttttaccaaccacattaatgtgatggtgaaatttccatctattgttgaggaagaattacagtttgatttatctctcgtcattgaagaacagtcagagggaattgttaagaagcataaacccgaaataaaaggaaacatgagtggaaatttcacctatatcattgacaagttaattccaaacacgaactactgtgtatctgtttatttagagcacagtgatgagcaagcagtaataaagtctcccttaaaatgcaccctccttccacctggccaggaatcagaatcagcagaatctgccaaaataggaggaataattactgtgtttttgatagcattggtcttgacaagcaccatagtgacactgaaatggattggttatatatgcttaagaaatagcctccccaaagtcttgaattttcataactttttagcctggccatttcctaacctgccaccgttggaagccatggatatggtggaggtcatttacatcaacagaaagaagaaagtgtgggattataattatgatgatgaaagtgatagcgatactgaggcagcgcccaggacaagtggcggtggctataccatgcatggactgactgtcaggcctctgggtcaggcctctgccacctctacagaatcccagttgatagacccggagtccgaggaggagcctgacctgcctgaggttgatgtggagctccccacgatgccaaaggacagccctcagcagttggaactcttgagtgggccctgtgagaggagaaagagtccactccaggacccttttcccgaagaggactacagctccacggaggggtctgggggcagaattaccttcaatgtggacttaaactctgtgtttttgagagttcttgatgacgaggacagtgacgacttagaagcccctctgatgctatcgtctcatctggaagagatggttgacccagaggatcctgataatgtgcaatcaaaccatttgctggccagcggggaagggacacagccaacctttcccagcccctcttcagagggcctgtggtccgaagatgctccatctgatcaaagtgacacttctgagtcagatgttgaccttggggatggttatataatgagatgactccaaaactattgaatgaacttggacagacaagcacctacagggttctttgtctctgcatcctaacttgctgccttatcgtctgcaagtgttctccaagggaaggaggaggaaactgtggtgttcctttcttccaggtgacatcacctatgcacattcccagtatggggaccatagtatcattcagtgcattgtttacatattcaaagtggtgcactttgaaggaagcacatgtgcacctttcctttacactaatgcacttaggatgtttctgcatcatgtctaccagggagcagggttccccacagtttcagaggtggtccaggaccctatgatatttctcttctttcgttcttttttttttttttttgagacagagtctcgttctgtcgcccaagctggagcgcaatggtgtgatcttggctcactgcaacatccgcctcccgggttcaggtgattctcctgcctcagcctccctcgcaagtagctgggattacaggcgcctgccaccatgcctagcaaatttttgtatttttagtagagacaggattttaccatgttggccaggctggtctcgaactcctgacctcaagtgatctgccctcctcagcctcgtaaagtgctgggattacaggggtgagccgctgtgcctggctggccctgtgatatttctgtgaaataaattgggccagggtgggagcagggaaagaaaaggaaaatagtagcaagagctgcaaagcaggcaggaagggaggaggagagccaggtgagcagtggagagaaggggggccctgcacaaggaaacagggaagagccatcgaagtttcagtcggtgagccttgggcacctcacccatgtcacatcctgtctcctgcaattggaattccaccttgtccagccctccccagttaaagtggggaagacagactttaggatcacgtgtgtgactaatacagaaaggaaacatggcgtcggggagagggataaaacctgaatgccatattttaagttaaaaaaaaaaaaagcaaacacaaagatgcttcaagatcttcaggagaagtatggtatacaagtttcagggaccctatttgacaattttcagagtgctctctatgctgattccgagtcgagtgtgtcagctgtgattacagtgcctgtggatctaggccgggttgggggggtgtgggcgggggaagggaagtctggcccggagcaattgctcctgccggtaaccccagcactttgggatgcctaaacaggcgtatcgcttgaggccagtaattcgagaccagcctgggcaacatggcaaatctgtctctacaaaacaaaattagaaaaattaactgggcgtagtggcatgtgcctgttgtcccagctacttgggaggctgaggtgggagaatggcttgagcccgggaagcggaggttgcagtgagccaagatcatgtcactgcgcttcagcctgggtgacagaaccagaccctgtctttaaaaagggagttggtggggagaggttctagaatgtcatgtagcaaccagtttaaggactgggactcagggatccaactcccacagtttccctgtgtgaccctaggcatttgacttagcctttctgagcctcaggttttttgtttctgaagtaaaaggattggactaggtaatctccaagatcctaggaacccaggagaaagatgagaaaatgtacaagaatgaacactcaggtggaaatgctgcaatcctgagaagctcccaggatgaatgaaaggcacaggacctcttacccctcacccctgcccccctcaagagctggtttctcaaacctttctcttaggccccttcaaagggggaaaactaaaaattatacaagttatagttcaaggactttaaatagattatttatatgattgctcataaggatgaggctgtgaggagggaacaccttatttaatctaatgaaattccataggaaagaggccttttgtatattgaatcaatttatctgccttctcagtgcatctgtcatattctgaaagattctgggttgatcttttgcgataacctctatggctgtgagtgtgtgtgtgtgtttgtgtattttttaacattttgtataatgattggaggttggtaaaaagtaacacaacagtacttttttaatacaaacttggtgtggtcttgagttgtcttccattggagagcgtacgtgtgccacagattggtgcacctgccggcatctctaggattgcaccaactccctctagctcttcttggtggcctgcaggggcctagggcgcattcacttccctctgcttgactttacgtggtgttctagcgtcagacatcaggcgatgccgtgcattacccaagacactggacagctccggatcttcccgtctaaccactaatcaagttaaaaagaggaaattaacgctttcttagtagtctctgaaagaaactagttatttgcgtaaagatgacttggttttgtgttgtttatccctggggagaagggtaaagaagaccctcaaactggatttgctgctgaagtgcttttaactcacctgtgcggagagcggacttcaagagagggcgtgccggtgctccggacaaaacctggggaatactgaaagccacca

SEQ ID NO: 375864 - DNA, 4014 bp, Homo sapiens
  misc_feature (1)..(1): n is a, c, g, or t
  misc_feature (5)..(7): n is a, c, g, or t
ngccnnngcccccgcgccggcggcggcgcggcgcccgcgcttccgtagcgctcctcgtaggccggggctcggcgcgcgcacccgcactaaagacgcttcttcccggcgggtaggaatcccgccggcgagccgaacagttccccgagcgcagcccgcggaccaccacccggccgcacgggccgcttttgtcccccgcccgccgcttctgtccgagaggccgcccgcgaggcgcatcctgaccgcgagcgtcgggtcccagagccgggcgcggctggggcccgaggctagcatctctcgggagccgcaaggcgagagctgcaaagtttaattagacacttcagaattttgatcacctaatgttgatttcagatgtaaaagtcaagagaagactctaaaaatagcaaagatgcttttgagccagaatgccttcatcttcagatcacttaatttggttctcatggtgtatatcagcctcgtgtttggtatttcatatgattcgcctgattacacagatgaatcttgcactttcaagatatcattgcgaaatttccggtccatcttatcatgggaattaaaaaaccactccattgtaccaactcactatacattgctgtatacaatcatgagtaaaccagaagatttgaaggtggttaagaactgtgcaaataccacaagatcattttgtgacctcacagatgagtggagaagcacacacgaggcctatgtcaccgtcctagaaggattcagcgggaacacaacgttgttcagttgctcacacaatttctggctggccatagacatgtcttttgaaccaccagagtttgagattgttggttttaccaaccacattaatgtgatggtgaaatttccatctattgttgaggaagaattacagtttgatttatctctcgtcattgaagaacagtcagagggaattgttaagaagcataaacccgaaataaaaggaaacatgagtggaaatttcacctatatcattgacaagttaattccaaacacgaactactgtgtatctgtttatttagagcacagtgatgagcaagcagtaataaagtctcccttaaaatgcaccctccttccacctggccaggaatcagaatcagcagaatctgccaaaataggaggaataattactgtgtttttgatagcattggtcttgacaagcaccatagtgacactgaaatggattggttatatatgcttaagaaatagcctccccaaagtcttgaattttcataactttttagcctggccatttcctaacctgccaccgttggaagccatggatatggtggaggtcatttacatcaacagaaagaagaaagtgtgggattataattatgatgatgaaagtgatagcgatactgaggcagcgcccaggacaagtggcggtggctataccatgcatggactgactgtcaggcctctgggtcaggcctctgccacctctacagaatcccagttgatagacccggagtccgaggaggagcctgacctgcctgaggttgatgtggagctccccacgatgccaaaggacagccctcagcagttggaactcttgagtgggccctgtgagaggagaaagagtccactccaggacccttttcccgaagaggactacagctccacggaggggtctgggggcagaattaccttcaatgtggacttaaactctgtgtttttgagagttcttgatgacgaggacagtgacgacttagaagcccctctgatgctatcgtctcatctggaagagatggttgacccagaggatcctgataatgtgcaatcaaaccatttgctggccagcggggaagggacacagccaacctttcccagcccctcttcagagggcctgtggtccgaagatgctccatctgatcaaagtgacacttctgagtcagatgttgaccttggggatggttatataatgagatgactccaaaactattgaatgaacttggacagacaagcacctacagggttctttgtctctgcatcctaacttgctgccttatcgtctgcaagtgttctccaagggaaggaggaggaaactgtggtgttcctttcttccaggtgacatcacctatgcacattcccagtatggggaccatagtatcattcagtgcattgtttacatattcaaagtggtgcactttgaaggaagcacatgtgcacctttcctttacactaatgcacttaggatgtttctgcatcatgtctaccagggagcagggttccccacagtttcagaggtggtccaggaccctatgatatttctcttctttcgttcttttttttttttttttgagacagagtctcgttctgtcgcccaagctggagcgcaatggtgtgatcttggctcactgcaacatccgcctcccgggttcaggtgattctcctgcctcagcctccctcgcaagtagctgggattacaggcgcctgccaccatgcctagcaaatttttgtatttttagtagagacaggattttaccatgttggccaggctggtctcgaactcctgacctcaagtgatctgccctcctcagcctcgtaaagtgctgggattacaggggtgagccgctgtgcctggctggccctgtgatatttctgtgaaataaattgggccagggtgggagcagggaaagaaaaggaaaatagtagcaagagctgcaaagcaggcaggaagggaggaggagagccaggtgagcagtggagagaaggggggccctgcacaaggaaacagggaagagccatcgaagtttcagtcggtgagccttgggcacctcacccatgtcacatcctgtctcctgcaattggaattccaccttgtccagccctccccagttaaagtggggaagacagactttaggatcacgtgtgtgactaatacagaaaggaaacatggcgtcggggagagggataaaacctgaatgccatattttaagttaaaaaaaaaaaaagcaaacacaaagatgcttcaagatcttcaggagaagtatggtatacaagtttcagggaccctatttgacaattttcagagtgctctctatgctgattccgagtcgagtgtgtcagctgtgattacagtgcctgtggatctaggccgggttgggggggtgtgggcgggggaagggaagtctggcccggagcaattgcccctcaagagctggtttctcaaacctttctcttaggccccttcaaagggggaaaactaaaaattatacaagttatagttcaaggactttaaatagattatttatatgattgctcataaggatgaggctgtgaggagggaacaccttatttaatctaatgaaattccataggaaagaggccttttgtatattgaatcaatttatctgccttctcagtgcatctgtcatattctgaaagattctgggttgatcttttgcgataacctctatggctgtgagtgtgtgtgtgtgtttgtgtattttttaacattttgtataatgattggaggttggtaaaaagtaacacaacagtacttttttaatacaaacttggtgtggtcttgagttgtcttccattggagagcgtacgtgtgccacagattggtgcacctgccggcatctctaggattgcaccaactccctctagctcttcttggtggcctgcaggggcctagggcgcattcacttccctctgcttgactttacgtggtgttctagcgtcagacatcaggcgatgccgtgcattacccaagacactggacagctccggatcttcccgtctaaccactaatcaagttaaaaagaggaaattaacgctttcttagtagtctctgaaagaaactagttatttgcgtaaagatgacttggttttgtgttgtttatccctggggagaagggtaaagaagaccctcaaactggatttgctgctgaagtgcttttaactcacctgtgcggagagcggacttcaagagagggcgtgccggtgctccggacaaaacctggggaatactgaaagccacca

SEQ ID NO: 375865 - DNA, 4318 bp, Homo sapiens
tcagatgtaaaagtcaagagaagactctaaaatcaacattaggtgatcaaaattctgaagtgtctaattaaattttgatcacctaatgttgatttcagatgtaaaagtcaagagaagactctaaaaatagcaaagatgcttttgagccagaatgccttcatcttcagatcacttaatttggttctcatggtgtatatcagcctcgtgtttggtatttcatatgattcgcctgattacacagatgaatcttgcactttcaagatatcattgcgaaatttccggtccatcttatcatgggaattaaaaaaccactccattgtaccaactcactatacattgctgtatacaatcatgagtaaaccagaagatttgaaggtggttaagaactgtgcaaataccacaagatcattttgtgacctcacagatgagtggagaagcacacacgaggcctatgtcaccgtcctagaaggattcagcgggaacacaacgttgttcagttgctcacacaatttctggctggccatagacatgtcttttgaaccaccagagtttgagattgttggttttaccaaccacattaatgtgatggtgaaatttccatctattgttgaggaagaattacagtttgatttatctctcgtcattgaagaacagtcagagggaattgttaagaagcataaacccgaaataaaaggaaacatgagtggaaatttcacctatatcattgacaagttaattccaaacacgaactactgtgtatctgtttatttagagcacagtgatgagcaagcagtaataaagtctcccttaaaatgcaccctccttccacctggccaggaatcagaatcagcagaatctgccaaaataggaggaataattactgtgtttttgatagcattggtcttgacaagcaccatagtgacactgaaatggattggttatatatgcttaagaaatagcctccccaaagtcttgaattttcataactttttagcctggccatttcctaacctgccaccgttggaagccatggatatggtggaggtcatttacatcaacagaaagaagaaagtgtgggattataattatgatgatgaaagtgatagcgatactgaggcagcgcccaggacaagtggcggtggctataccatgcatggactgactgtcaggcctctgggtcaggcctctgccacctctacagaatcccagttgatagacccggagtccgaggaggagcctgacctgcctgaggttgatgtggagctccccacgatgccaaaggacagccctcagcagttggaactcttgagtgggccctgtgagaggagaaagagtccactccaggacccttttcccgaagaggactacagctccacggaggggtctgggggcagaattaccttcaatgtggacttaaactctgtgtttttgagagttcttgatgacgaggacagtgacgacttagaagcccctctgatgctatcgtctcatctggaagagatggttgacccagaggatcctgataatgtgcaatcaaaccatttgctggccagcggggaagggacacagccaacctttcccagcccctcttcagagggcctgtggtccgaagatgctccatctgatcaaagtgacacttctgagtcagatgttgaccttggggatggttatataatgagatgactccaaaactattgaatgaacttggacagacaagcacctacagggttctttgtctctgcatcctaacttgctgccttatcgtctgcaagtgttctccaagggaaggaggaggaaactgtggtgttcctttcttccaggtgacatcacctatgcacattcccagtatggggaccatagtatcattcagtgcattgtttacatattcaaagtggtgcactttgaaggaagcacatgtgcacctttcctttacactaatgcacttaggatgtttctgcatcatgtctaccagggagcagggttccccacagtttcagaggtggtccaggaccctatgatatttctcttctttcgttcttttttttttttttttgagacagagtctcgttctgtcgcccaagctggagcgcaatggtgtgatcttggctcactgcaacatccgcctcccgggttcaggtgattctcctgcctcagcctccctcgcaagtagctgggattacaggcgcctgccaccatgcctagcaaatttttgtatttttagtagagacaggattttaccatgttggccaggctggtctcgaactcctgacctcaagtgatctgccctcctcagcctcgtaaagtgctgggattacaggggtgagccgctgtgcctggctggccctgtgatatttctgtgaaataaattgggccagggtgggagcagggaaagaaaaggaaaatagtagcaagagctgcaaagcaggcaggaagggaggaggagagccaggtgagcagtggagagaaggggggccctgcacaaggaaacagggaagagccatcgaagtttcagtcggtgagccttgggcacctcacccatgtcacatcctgtctcctgcaattggaattccaccttgtccagccctccccagttaaagtggggaagacagactttaggatcacgtgtgtgactaatacagaaaggaaacatggcgtcggggagagggataaaacctgaatgccatattttaagttaaaaaaaaaaaaagcaaacacaaagatgcttcaagatcttcaggagaagtatggtatacaagtttcagggaccctatttgacaattttcagagtgctctctatgctgattccgagtcgagtgtgtcagctgtgattacagtgcctgtggatctaggccgggttgggggggtgtgggcgggggaagggaagtctggcccggagcaattgctcctgccggtaaccccagcactttgggatgcctaaacaggcgtatcgcttgaggccagtaattcgagaccagcctgggcaacatggcaaatctgtctctacaaaacaaaattagaaaaattaactgggcgtagtggcatgtgcctgttgtcccagctacttgggaggctgaggtgggagaatggcttgagcccgggaagcggaggttgcagtgagccaagatcatgtcactgcgcttcagcctgggtgacagaaccagaccctgtctttaaaaagggagttggtggggagaggttctagaatgtcatgtagcaaccagtttaaggactgggactcagggatccaactcccacagtttccctgtgtgaccctaggcatttgacttagcctttctgagcctcaggttttttgtttctgaagtaaaaggattggactaggtaatctccaagatcctaggaacccaggagaaagatgagaaaatgtacaagaatgaacactcaggtggaaatgctgcaatcctgagaagctcccaggatgaatgaaaggcacaggacctcttacccctcacccctgcccccctcaagagctggtttctcaaacctttctcttaggccccttcaaagggggaaaactaaaaattatacaagttatagttcaaggactttaaatagattatttatatgattgctcataaggatgaggctgtgaggagggaacaccttatttaatctaatgaaattccataggaaagaggccttttgtatattgaatcaatttatctgccttctcagtgcatctgtcatattctgaaagattctgggttgatcttttgcgataacctctatggctgtgagtgtgtgtgtgtgtttgtgtattttttaacattttgtataatgattggaggttggtaaaaagtaacacaacagtacttttttaatacaaacttggtgtggtcttgagttgtcttccattggagagcgtacgtgtgccacagattggtgcacctgccggcatctctaggattgcaccaactccctctagctcttcttggtggcctgcaggggcctagggcgcattcacttccctctgcttgactttacgtggtgttctagcgtcagacatcaggcgatgccgtgcattacccaagacactggacagctccggatcttcccgtctaaccactaatcaagttaaaaagaggaaattaacgctttcttagtagtctctgaaagaaactagttatttgcgtaaagatgacttggttttgtgttgtttatccctggggagaagggtaaagaagaccctcaaactggatttgctgctgaagtgcttttaactcacctgtgcggagagcggacttcaagagagggcgtgccggtgctccggacaaaacctggggaatactgaaagccacca

SEQ ID NO: 375866 - DNA, 4645 bp, Homo sapiens
  misc_feature (1270)..(1270): n is a, c, g, or t
atatatttttaagtggaaaaagcaggcagaacagggaccgtacatattgttgttagtgtcagctcccaaatggatcttattttatctcagatcacagtccttgcaccatgtggctgctggcaccaatgtagagtaaaaaccatctatgtgggcattttttggcacaagaaaaatctcaatctgataccaataaatgtgtgttaaagaatgtcagacttagagtaatcattgcaagttgagcccagataaaactattgcctctctaatgtgttttcttccttctagtgtatatcagcctcgtgtttggtatttcatatgattcgcctgattacacagatgaatcttgcactttcaagatatcattgcgaaatttccggtccatcttatcatgggaattaaaaaaccactccattgtaccaactcactatacattgctgtatacaatcatgagtaaaccagaagatttgaaggtggttaagaactgtgcaaataccacaagatcattttgtgacctcacagatgagtggagaagcacacacgaggcctatgtcaccgtcctagaaggattcagcgggaacacaacgttgttcagttgctcacacaatttctggctggccatagacatgtcttttgaaccaccagagtttgagattgttggttttaccaaccacattaatgtgatggtgaaatttccatctattgttgaggaagaattacagtttgatttatctctcgtcattgaagaacagtcagagggaattgttaagaagcataaacccgaaataaaaggaaacatgagtggaaatttcacctatatcattgacaagttaattccaaacacgaactactgtgtatctgtttatttagagcacagtgatgagcaagcagtaataaagtctcccttaaaatgcaccctccttccacctggccaggaatcagaatcagcagaatctgccaaaataggaggaataattactgtgtttttgatagcattggtcttgacaagcaccatagtgacactgaaatggattggttatatatgcttaagaaatagcctccccaaagtcttgaggcaaggtctcgctaagggctggaatgcagtggctattcacaggtgcagtcataatgcactacagtctgaaactcctgagctcaaacagtcgtcctgcctaagcttccccagtagctgggattacaagcgtgcatccctgtgccccagtgattaagttttattatgtagaaaataaagagcaaacagtacagctgatanggactctctctctctttttttttttttttaagaattttcataactttttagcctggccatttcctaacctgccaccgttggaagccatggatatggtggaggtcatttacatcaacagaaagaagaaagtgtgggattataattatgatgatgaaagtgatagcgatactgaggcagcgcccaggacaagtggcggtggctataccatgcatggactgactgtcaggcctctgggtcaggcctctgccacctctacagaatcccagttgatagacccggagtccgaggaggagcctgacctgcctgaggttgatgtggagctccccacgatgccaaaggacagccctcagcagttggaactcttgagtgggccctgtgagaggagaaagagtccactccaggacccttttcccgaagaggactacagctccacggaggggtctgggggcagaattaccttcaatgtggacttaaactctgtgtttttgagagttcttgatgacgaggacagtgacgacttagaagcccctctgatgctatcgtctcatctggaagagatggttgacccagaggatcctgataatgtgcaatcaaaccatttgctggccagcggggaagggacacagccaacctttcccagcccctcttcagagggcctgtggtccgaagatgctccatctgatcaaagtgacacttctgagtcagatgttgaccttggggatggttatataatgagatgactccaaaactattgaatgaacttggacagacaagcacctacagggttctttgtctctgcatcctaacttgctgccttatcgtctgcaagtgttctccaagggaaggaggaggaaactgtggtgttcctttcttccaggtgacatcacctatgcacattcccagtatggggaccatagtatcattcagtgcattgtttacatattcaaagtggtgcactttgaaggaagcacatgtgcacctttcctttacactaatgcacttaggatgtttctgcatcatgtctaccagggagcagggttccccacagtttcagaggtggtccaggaccctatgatatttctcttctttcgttcttttttttttttttttgagacagagtctcgttctgtcgcccaagctggagcgcaatggtgtgatcttggctcactgcaacatccgcctcccgggttcaggtgattctcctgcctcagcctccctcgcaagtagctgggattacaggcgcctgccaccatgcctagcaaatttttgtatttttagtagagacaggattttaccatgttggccaggctggtctcgaactcctgacctcaagtgatctgccctcctcagcctcgtaaagtgctgggattacaggggtgagccgctgtgcctggctggccctgtgatatttctgtgaaataaattgggccagggtgggagcagggaaagaaaaggaaaatagtagcaagagctgcaaagcaggcaggaagggaggaggagagccaggtgagcagtggagagaaggggggccctgcacaaggaaacagggaagagccatcgaagtttcagtcggtgagccttgggcacctcacccatgtcacatcctgtctcctgcaattggaattccaccttgtccagccctccccagttaaagtggggaagacagactttaggatcacgtgtgtgactaatacagaaaggaaacatggcgtcggggagagggataaaacctgaatgccatattttaagttaaaaaaaaaaaaagcaaacacaaagatgcttcaagatcttcaggagaagtatggtatacaagtttcagggaccctatttgacaattttcagagtgctctctatgctgattccgagtcgagtgtgtcagctgtgattacagtgcctgtggatctaggccgggttgggggggtgtgggcgggggaagggaagtctggcccggagcaattgctcctgccggtaaccccagcactttgggatgcctaaacaggcgtatcgcttgaggccagtaattcgagaccagcctgggcaacatggcaaatctgtctctacaaaacaaaattagaaaaattaactgggcgtagtggcatgtgcctgttgtcccagctacttgggaggctgaggtgggagaatggcttgagcccgggaagcggaggttgcagtgagccaagatcatgtcactgcgcttcagcctgggtgacagaaccagaccctgtctttaaaaagggagttggtggggagaggttctagaatgtcatgtagcaaccagtttaaggactgggactcagggatccaactcccacagtttccctgtgtgaccctaggcatttgacttagcctttctgagcctcaggttttttgtttctgaagtaaaaggattggactaggtaatctccaagatcctaggaacccaggagaaagatgagaaaatgtacaagaatgaacactcaggtggaaatgctgcaatcctgagaagctcccaggatgaatgaaaggcacaggacctcttacccctcacccctgcccccctcaagagctggtttctcaaacctttctcttaggccccttcaaagggggaaaactaaaaattatacaagttatagttcaaggactttaaatagattatttatatgattgctcataaggatgaggctgtgaggagggaacaccttatttaatctaatgaaattccataggaaagaggccttttgtatattgaatcaatttatctgccttctcagtgcatctgtcatattctgaaagattctgggttgatcttttgcgataacctctatggctgtgagtgtgtgtgtgtgtttgtgtattttttaacattttgtataatgattggaggttggtaaaaagtaacacaacagtacttttttaatacaaacttggtgtggtcttgagttgtcttccattggagagcgtacgtgtgccacagattggtgcacctgccggcatctctaggattgcaccaactccctctagctcttcttggtggcctgcaggggcctagggcgcattcacttccctctgcttgactttacgtggtgttctagcgtcagacatcaggcgatgccgtgcattacccaagacactggacagctccggatcttcccgtctaaccactaatcaagttaaaaagaggaaattaacgctttcttagtagtctctgaaagaaactagttatttgcgtaaagatgacttggttttgtgttgtttatccctggggagaagggtaaagaagaccctcaaactggatttgctgctgaagtgcttttaactcacctgtgcggagagcggacttcaagagagggcgtgccggtgctccggacaaaacctggggaatactgaaagccacca

SEQ ID NO: 375867 - DNA, 2215 bp, Homo sapiens
gacaaaattagaaaaattaactgggcgtagtggcatgtgctgttgtctcagcctccctcgcaagtagctgggattacaggcgcctgccaccatgcctagcaaatttttgtatttttagtagagacaggattttaccatgttggccaggctggtctcgaactcctgacctcaagtgatctgccctcctcagcctcgtaaagtgctgggattacaggggtgagccgctgtgcctggctggccctgtgatatttctgtgaaataaattgggccagggtgggagcagggaaagaaaaggaaaatagtagcaagagctgcaaagcaggcaggaagggaggaggagagccaggtgagcagtggagagaaggggggccctgcacaaggaaacagggaagagccatcgaagtttcagtcggtgagccttgggcacctcacccatgtcacatcctgtctcctgcaattggaattccaccttgtccagccctccccagttaaagtggggaagacagactttaggatcacgtgtgtgactaatacagaaaggaaacatggcgtcggggagagggataaaacctgaatgccatattttaagttaaaaaaaaaaaaagcaaacacaaagatgcttcaagatcttcaggagaagtatggtatacaagtttcagggaccctatttgacaattttcagagtgctctctatgctgattccgagtcgagtgtgtcagctgtgattacagtgcctgtggatctaggccgggttgggggggtgtgggcgggggaagggaagtctggcccggagcaattgctcctgccggtaaccccagcactttgggatgcctaaacaggcgtatcgcttgaggccagtaattcgagaccagcctgggcaacatggcaaatctgtctctacaaaacaaaattagaaaaattaactgggcgtagtggcatgtgcctgttgtcccagctacttgggaggctgaggtgggagaatggcttgagcccgggaagcggaggttgcagtgagccaagatcatgtcactgcgcttcagcctgggtgacagaaccagaccctgtctttaaaaagggagttggtggggagaggttctagaatgtcatgtagcaaccagtttaaggactgggactcagggatccaactcccacagtttccctgtgtgaccctaggcatttgacttagcctttctgagcctcaggttttttgtttctgaagtaaaaggattggactaggtaatctccaagatcctaggaacccaggagaaagatgagaaaatgtacaagaatgaacactcaggtggaaatgctgcaatcctgagaagctcccaggatgaatgaaaggcacaggacctcttacccctcacccctgcccccctcaagagctggtttctcaaacctttctcttaggccccttcaaagggggaaaactaaaaattatacaagttatagttcaaggactttaaatagattatttatatgattgctcataaggatgaggctgtgaggagggaacaccttatttaatctaatgaaattccataggaaagaggccttttgtatattgaatcaatttatctgccttctcagtgcatctgtcatattctgaaagattctgggttgatcttttgcgataacctctatggctgtgagtgtgtgtgtgtgtttgtgtattttttaacattttgtataatgattggaggttggtaaaaagtaacacaacagtacttttttaatacaaacttggtgtggtcttgagttgtcttccattggagagcgtacgtgtgccacagattggtgcacctgccggcatctctaggattgcaccaactccctctagctcttcttggtggcctgcaggggcctagggcgcattcacttccctctgcttgactttacgtggtgttctagcgtcagacatcaggcgatgccgtgcattacccaagacactggacagctccggatcttcccgtctaaccactaatcaagttaaaaagaggaaattaacgctttcttagtagtctctgaaagaaactagttatttgcgtaaagatgacttggttttgtgttgtttatccctggggagaagggtaaagaagaccctcaaactggatttgctgctgaagtgcttttaactcacctgtgcggagagcggacttcaagagagggcgtgccggtgctccggacaaaacctggggaatactgaaagccacca

SEQ ID NO: 375868 - DNA, 2098 bp, Homo sapiens
  misc_feature (11)..(11): n is a, c, g, or t
cgggggaaggnaagtctggcccggagcaattgctcctgccggtaaccccagcactttgatctgccctcctcagcctcgtaaagtgctgggattacaggggtgagccgctgtgcctggctggccctgtgatatttctgtgaaataaattgggccagggtgggagcagggaaagaaaaggaaaatagtagcaagagctgcaaagcaggcaggaagggaggaggagagccaggtgagcagtggagagaaggggggccctgcacaaggaaacagggaagagccatcgaagtttcagtcggtgagccttgggcacctcacccatgtcacatcctgtctcctgcaattggaattccaccttgtccagccctccccagttaaagtggggaagacagactttaggatcacgtgtgtgactaatacagaaaggaaacatggcgtcggggagagggataaaacctgaatgccatattttaagttaaaaaaaaaaaaagcaaacacaaagatgcttcaagatcttcaggagaagtatggtatacaagtttcagggaccctatttgacaattttcagagtgctctctatgctgattccgagtcgagtgtgtcagctgtgattacagtgcctgtggatctaggccgggttgggggggtgtgggcgggggaagggaagtctggcccggagcaattgctcctgccggtaaccccagcactttgggatgcctaaacaggcgtatcgcttgaggccagtaattcgagaccagcctgggcaacatggcaaatctgtctctacaaaacaaaattagaaaaattaactgggcgtagtggcatgtgcctgttgtcccagctacttgggaggctgaggtgggagaatggcttgagcccgggaagcggaggttgcagtgagccaagatcatgtcactgcgcttcagcctgggtgacagaaccagaccctgtctttaaaaagggagttggtggggagaggttctagaatgtcatgtagcaaccagtttaaggactgggactcagggatccaactcccacagtttccctgtgtgaccctaggcatttgacttagcctttctgagcctcaggttttttgtttctgaagtaaaaggattggactaggtaatctccaagatcctaggaacccaggagaaagatgagaaaatgtacaagaatgaacactcaggtggaaatgctgcaatcctgagaagctcccaggatgaatgaaaggcacaggacctcttacccctcacccctgcccccctcaagagctggtttctcaaacctttctcttaggccccttcaaagggggaaaactaaaaattatacaagttatagttcaaggactttaaatagattatttatatgattgctcataaggatgaggctgtgaggagggaacaccttatttaatctaatgaaattccataggaaagaggccttttgtatattgaatcaatttatctgccttctcagtgcatctgtcatattctgaaagattctgggttgatcttttgcgataacctctatggctgtgagtgtgtgtgtgtgtttgtgtattttttaacattttgtataatgattggaggttggtaaaaagtaacacaacagtacttttttaatacaaacttggtgtggtcttgagttgtcttccattggagagcgtacgtgtgccacagattggtgcacctgccggcatctctaggattgcaccaactccctctagctcttcttggtggcctgcaggggcctagggcgcattcacttccctctgcttgactttacgtggtgttctagcgtcagacatcaggcgatgccgtgcattacccaagacactggacagctccggatcttcccgtctaaccactaatcaagttaaaaagaggaaattaacgctttcttagtagtctctgaaagaaactagttatttgcgtaaagatgacttggttttgtgttgtttatccctggggagaagggtaaagaagaccctcaaactggatttgctgctgaagtgcttttaactcacctgtgcggagagcggacttcaagagagggcgtgccggtgctccggacaaaacctggggaatactgaaagccacca

SEQ ID NO: 375869 - DNA, 1942 bp, Homo sapiens
cctgcgcaacacgccaaagggaccatcacccagcttcttcaggaggcgcaggtccttctccccaatgagccaggtgagcagtggagagaaggggggccctgcacaaggaaacagggaagagccatcgaagtttcagtcggtgagccttgggcacctcacccatgtcacatcctgtctcctgcaattggaattccaccttgtccagccctccccagttaaagtggggaagacagactttaggatcacgtgtgtgactaatacagaaaggaaacatggcgtcggggagagggataaaacctgaatgccatattttaagttaaaaaaaaaaaaagcaaacacaaagatgcttcaagatcttcaggagaagtatggtatacaagtttcagggaccctatttgacaattttcagagtgctctctatgctgattccgagtcgagtgtgtcagctgtgattacagtgcctgtggatctaggccgggttgggggggtgtgggcgggggaagggaagtctggcccggagcaattgctcctgccggtaaccccagcactttgggatgcctaaacaggcgtatcgcttgaggccagtaattcgagaccagcctgggcaacatggcaaatctgtctctacaaaacaaaattagaaaaattaactgggcgtagtggcatgtgcctgttgtcccagctacttgggaggctgaggtgggagaatggcttgagcccgggaagcggaggttgcagtgagccaagatcatgtcactgcgcttcagcctgggtgacagaaccagaccctgtctttaaaaagggagttggtggggagaggttctagaatgtcatgtagcaaccagtttaaggactgggactcagggatccaactcccacagtttccctgtgtgaccctaggcatttgacttagcctttctgagcctcaggttttttgtttctgaagtaaaaggattggactaggtaatctccaagatcctaggaacccaggagaaagatgagaaaatgtacaagaatgaacactcaggtggaaatgctgcaatcctgagaagctcccaggatgaatgaaaggcacaggacctcttacccctcacccctgcccccctcaagagctggtttctcaaacctttctcttaggccccttcaaagggggaaaactaaaaattatacaagttatagttcaaggactttaaatagattatttatatgattgctcataaggatgaggctgtgaggagggaacaccttatttaatctaatgaaattccataggaaagaggccttttgtatattgaatcaatttatctgccttctcagtgcatctgtcatattctgaaagattctgggttgatcttttgcgataacctctatggctgtgagtgtgtgtgtgtgtttgtgtattttttaacattttgtataatgattggaggttggtaaaaagtaacacaacagtacttttttaatacaaacttggtgtggtcttgagttgtcttccattggagagcgtacgtgtgccacagattggtgcacctgccggcatctctaggattgcaccaactccctctagctcttcttggtggcctgcaggggcctagggcgcattcacttccctctgcttgactttacgtggtgttctagcgtcagacatcaggcgatgccgtgcattacccaagacactggacagctccggatcttcccgtctaaccactaatcaagttaaaaagaggaaattaacgctttcttagtagtctctgaaagaaactagttatttgcgtaaagatgacttggttttgtgttgtttatccctggggagaagggtaaagaagaccctcaaactggatttgctgctgaagtgcttttaactcacctgtgcggagagcggacttcaagagagggcgtgccggtgctccggacaaaacctggggaatactgaaagccacca

SEQ ID NO: 375870 - DNA, 1925 bp, Homo sapiens
  misc_feature (1)..(1): n is a, c, g, or t
  misc_feature (5)..(7): n is a, c, g, or t
  misc_feature (1446)..(1446): n is a, c, g, or t
ngccnnngcccccgcgccggcggcggcgcggcgcccgcgcttccgtagcgctcctcgtaggccggggctcggcgcgcgcacccgcactaaagacgcttcttcccggcgggtaggaatcccgccggcgagccgaacagttccccgagcgcagcccgcggaccaccacccggccgcacgggccgcttttgtcccccgcccgccgcttctgtccgagaggccgcccgcgaggcgcatcctgaccgcgagcgtcgggtcccagagccgggcgcggctggggcccgaggctagcatctctcgggagccgcaaggcgagagctgcaaagtttaattagacacttcagaattttgatcacctaatgttgatttcagatgtaaaagtcaagagaagactctaaaaatagcaaagatgcttttgagccagaatgccttcatcttcagatcacttaatttggttctcatggtgtatatcagcctcgtgtttggtatttcatatgattcgcctgattacacagatgaatcttgcactttcaagatatcattgcgaaatttccggtccatcttatcatgggaattaaaaaaccactccattgtaccaactcactatacattgctgtatacaatcatgagtaaaccagaagatttgaaggtggttaagaactgtgcaaataccacaagatcattttgtgacctcacagatgagtggagaagcacacacgaggcctatgtcaccgtcctagaaggattcagcgggaacacaacgttgttcagttgctcacacaatttctggctggccatagacatgtcttttgaaccaccagagtttgagattgttggttttaccaaccacattaatgtgatggtgaaatttccatctattgttgaggaagaattacagtttgatttatctctcgtcattgaagaacagtcagagggaattgttaagaagcataaacccgaaataaaaggaaacatgagtggaaatttcacctatatcattgacaagttaattccaaacacgaactactgtgtatctgtttatttagagcacagtgatgagcaagcagtaataaagtctcccttaaaatgcaccctccttccacctggccaggaatcagaatcagcagaatctgccaaaataggaggaataattactgtgtttttgatagcattggtcttgacaagcaccatagtgacactgaaatggattggttatatatgcttaagaaatagcctccccaaagtcttgaggcaaggtctcgctaagggctggaatgcagtggctattcacaggtgcagtcataatgcactacagtctgaaactcctgagctcaaacagtcgtcctgcctaagcttccccagtagctgggattacaagcgtgcatccctgtgccccagtgattaagttttattatgtagaaaataaagagcaaacagtacagctgatanggactctctctctctttttttttttttttaagaattttcataactttttagcctggccatttcctaacctgccaccgttggaagccatggatatggtggaggtcatttacatcaacagaaagaagaaagtgtgggattataattatgatgatgaaagtgatagcgatactgaggcagcgcccaggacaagtggcggtggctataccatgcatggactgactgtcaggcctctgggtcaggcctctgccacctctacagaatcccagttgatagacccggagtccgaggaggagcctgacctgcctgaggttgatgtggagctccccacgatgccaaaggacagccctcagcagttggaactcttgagtgggccctgtgagaggagaaagagtccactccaggacccttttcccgaagagggcgcggccactgatgggggtggtgtcataagtaccttaattgtcgtctttggaggggtg

SEQ ID NO: 375871 - DNA, 1397 bp, Homo sapiens
  misc_feature (1)..(1): n is a, c, g, or t
  misc_feature (5)..(7): n is a, c, g, or t
ngccnnngcccccgcgccggcggcggcgcggcgcccgcgcttccgtagcgctcctcgtaggccggggctcggcgcgcgcacccgcactaaagacgcttcttcccggcgggtaggaatcccgccggcgagccgaacagttccccgagcgcagcccgcggaccaccacccggccgcacgggccgcttttgtcccccgcccgccgcttctgtccgagaggccgcccgcgaggcgcatcctgaccgcgagcgtcgggtcccagagccgggcgcggctggggcccgaggctagcatctctcgggagccgcaaggcgagagctgcaaagatgtaaaagtcaagagaagactctaaaaatagcaaagatgcttttgagccagaatgccttcatcttcagatcacttaatttggttctcatggtgtatatcagcctcgtgtttggtatttcatatgattcgcctgattacacagatgaatcttgcactttcaagatatcattgcgaaatttccggtccatcttatcatgggaattaaaaaaccactccattgtaccaactcactatacattgctgtatacaatcatgagtaaaccagaagatttgaaggtggttaagaactgtgcaaataccacaagatcattttgtgacctcacagatgagtggagaagcacacacgaggcctatgtcaccgtcctagaaggattcagcgggaacacaacgttgttcagttgctcacacaatttctggctggccatagacatgtcttttgaaccaccagagtttgagattgttggttttaccaaccacattaatgtgatggtgaaatttccatctattgttgaggaagaattacagtttgatttatctctcgtcattgaagaacagtcagagggaattgttaagaagcataaacccgaaataaaaggaaacatgagtggaaatttcacctatatcattgacaagttaattccaaacacgaactactgtgtatctgtttatttagagcacagtgatgagcaagcagtaataaagtctcccttaaaatgcaccctccttccacctggccaggaatcagaatcagcagaatctgccaaaataggaggaataattactgtgtttttgatagcattggtcttgacaagcaccatagtgacactgaaatggattggttatatatgcttaagaaatagcctccccaaagtcttgaggcaaggtctcgctaagggctggaatgcagtggctattcacaggtgcagtcataatgcactacagtctgaaactcctgagctcaaacagtcgtcctgcctaagcttccccagtagctgggattacaagcgtgcatccctgtgccccagtgattaagttttattatgtagaaaataaagagcaaacagtacagctga

SEQ ID NO: 375872 - DNA, 4589 bp, Homo sapiens
  misc_feature (1)..(1): n is a, c, g, or t
  misc_feature (5)..(7): n is a, c, g, or t
ngccnnngcccccgcgccggcggcggcgcggcgcccgcgcttccgtagcgctcctcgtaggccggggctcggcgcgcgcacccgcactaaagacgcttcttcccggcgggtaggaatcccgccggcgagccgaacagttccccgagcgcagcccgcggaccaccacccggccgcacgggccgcttttgtcccccgcccgccgcttctgtccgagaggccgcccgcgaggcgcatcctgaccgcgagcgtcgggtcccagagccgggcgcggctggggcccgaggctagcatctctcgggagccgcaaggcgagagctgcaaagtttaattagacacttcagaattttgatcacctaatgttgatttcagatgtaaaagtcaagagaagactctaaaaatagcaaagatgcttttgagccagaatgccttcatcttcagatcacttaatttggttctcatggtgtatatcagcctcgtgtttggtatttcatatgattcgcctgattacacagatgaatcttgcactttcaagatatcattgcgaaatttccggtccatcttatcatgggaattaaaaaaccactccattgtaccaactcactatacattgctgtatacaatcatgagtaaaccagaagatttgaaggtggttaagaactgtgcaaataccacaagatcattttgtgacctcacagatgagtggagaagcacacacgaggcctatgtcaccgtcctagaaggattcagcgggaacacaacgttgttcagttgctcacacaatttctggctggccatagacatgtcttttgaaccaccagagtttgagattgttggttttaccaaccacattaatgtgatggtgaaatttccatctattgttgaggaagaattacagtttgatttatctctcgtcattgaagaacagtcagagggaattgttaagaagcataaacccgaaataaaaggaaacatgagtggaaatttcacctatatcattgacaagttaattccaaacacgaactactgtgtatctgtttatttagagcacagtgatgagcaagcagtaataaagtctcccttaaaatgcaccctccttccacctggccaggaatcagaatcagcagaatctgccaaaataggaggaataattactgtgtttttgatagcattggtcttgacaagcaccatagtgacactgaaatggattggttatatatgcttaagaaatagcctccccaaagtcttgaattttcataactttttagcctggccatttcctaacctgccaccgttggaagccatggatatggtggaggtcatttacatcaacagaaagaagaaagtgtgggattataattatgatgatgaaagtgatagcgatactgaggcagcgcccaggacaagtggcggtggctataccatgcatggactgactgtcaggcctctgggtcaggcctctgccacctctacagaatcccagttgatagacccggagtccgaggaggagcctgacctgcctgaggttgatgtggagctccccacgatgccaaaggacagccctcagcagttggaactcttgagtgggccctgtgagaggagaaagagtccactccaggacccttttcccgaagaggactacagctccacggaggggtctgggggcagaattaccttcaatgtggacttaaactctgtgtttttgagagttcttgatgacgaggacagtgacgacttagaagcccctctgatgctatcgtctcatctggaagagatggttgacccagaggatcctgataatgtgcaatcaaaccatttgctggccagcggggaagggacacagccaacctttcccagcccctcttcagagggcctgtggtccgaagatgctccatctgatcaaagtgacacttctgagtcagatgttgaccttggggatggttatataatgagatgactccaaaactattgaatgaacttggacagacaagcacctacagggttctttgtctctgcatcctaacttgctgccttatcgtctgcaagtgttctccaagggaaggaggaggaaactgtggtgttcctttcttccaggtgacatcacctatgcacattcccagtatggggaccatagtatcattcagtgcattgtttacatattcaaagtggtgcactttgaaggaagcacatgtgcacctttcctttacactaatgcacttaggatgtttctgcatcatgtctaccagggagcagggttccccacagtttcagaggtggtccaggaccctatgatatttctcttctttcgttcttttttttttttttttgagacagagtctcgttctgtcgcccaagctggagcgcaatggtgtgatcttggctcactgcaacatccgcctcccgggttcaggtgattctcctgcctcagcctccctcgcaagtagctgggattacaggcgcctgccaccatgcctagcaaatttttgtatttttagtagagacaggattttaccatgttggccaggctggtctcgaactcctgacctcaagtgatctgccctcctcagcctcgtaaagtgctgggattacaggggtgagccgctgtgcctggctggccctgtgatatttctgtgaaataaattgggccagggtgggagcagggaaagaaaaggaaaatagtagcaagagctgcaaagcaggcaggaagggaggaggagagccaggtgagcagtggagagaaggggggccctgcacaaggaaacagggaagagccatcgaagtttcagtcggtgagccttgggcacctcacccatgtcacatcctgtctcctgcaattggaattccaccttgtccagccctccccagttaaagtggggaagacagactttaggatcacgtgtgtgactaatacagaaaggaaacatggcgtcggggagagggataaaacctgaatgccatattttaagttaaaaaaaaaaaaagcaaacacaaagatgcttcaagatcttcaggagaagtatggtatacaagtttcagggaccctatttgacaattttcagagtgctctctatgctgattccgagtcgagtgtgtcagctgtgattacagtgcctgtggatctaggccgggttgggggggtgtgggcgggggaagggaagtctggcccggagcaattgctcctgccggtaaccccagcactttgggatgcctaaacaggcgtatcgcttgaggccagtaattcgagaccagcctgggcaacatggcaaatctgtctctacaaaacaaaattagaaaaattaactgggcgtagtggcatgtgcctgttgtcccagctacttgggaggctgaggtgggagaatggcttgagcccgggaagcggaggttgcagtgagccaagatcatgtcactgcgcttcagcctgggtgacagaaccagaccctgtctttaaaaagggagttggtggggagaggttctagaatgtcatgtagcaaccagtttaaggactgggactcagggatccaactcccacagtttccctgtgtgaccctaggcatttgacttagcctttctgagcctcaggttttttgtttctgaagtaaaaggattggactaggtaatctccaagatcctaggaacccaggagaaagatgagaaaatgtacaagaatgaacactcaggtggaaatgctgcaatcctgagaagctcccaggatgaatgaaaggcacaggacctcttacccctcacccctgcccccctcaagagctggtttctcaaacctttctcttaggccccttcaaagggggaaaactaaaaattatacaagttatagttcaaggactttaaatagattatttatatgattgctcataaggatgaggctgtgaggagggaacaccttatttaatctaatgaaattccataggaaagaggccttttgtatattgaatcaatttatctgccttctcagtgcatctgtcatattctgaaagattctgggttgatcttttgcgataacctctatggctgtgagtgtgtgtgtgtgtttgtgtattttttaacattttgtataatgattggaggttggtaaaaagtaacacaacagtacttttttaatacaaacttggtgtggtcttgagttgtcttccattggagagcgtacgtgtgccacagattggtgcacctgccggcatctctaggattgcaccaactccctctagctcttcttggtggcctgcaggggcctagggcgcattcacttccctctgcttgactttacgtggtgttctagcgtcagacatcaggcgatgccgtgcattacccaagacactggacagctccggatcttcccgtctaaccactaatcaagttaaaaagaggaaattaacgctttcttagtagtctctgaaagaaactagttatttgcgtaaagatgacttggttttgtgttgtttatccctggggagaagggtaaagaagaccctcaaactggatttgctgctgaagtgcttttaactcacctgtgcggagagcggacttcaagagagggcgtgccggtgctccggacaaaacctggggaatactgaaagccacca

SEQ ID NO: 375873 - DNA, 4821 bp, Homo sapiens
  misc_feature (1)..(1): n is a, c, g, or t
  misc_feature (5)..(7): n is a, c, g, or t
  misc_feature (1446)..(1446): n is a, c, g, or t
ngccnnngcccccgcgccggcggcggcgcggcgcccgcgcttccgtagcgctcctcgtaggccggggctcggcgcgcgcacccgcactaaagacgcttcttcccggcgggtaggaatcccgccggcgagccgaacagttccccgagcgcagcccgcggaccaccacccggccgcacgggccgcttttgtcccccgcccgccgcttctgtccgagaggccgcccgcgaggcgcatcctgaccgcgagcgtcgggtcccagagccgggcgcggctggggcccgaggctagcatctctcgggagccgcaaggcgagagctgcaaagtttaattagacacttcagaattttgatcacctaatgttgatttcagatgtaaaagtcaagagaagactctaaaaatagcaaagatgcttttgagccagaatgccttcatcttcagatcacttaatttggttctcatggtgtatatcagcctcgtgtttggtatttcatatgattcgcctgattacacagatgaatcttgcactttcaagatatcattgcgaaatttccggtccatcttatcatgggaattaaaaaaccactccattgtaccaactcactatacattgctgtatacaatcatgagtaaaccagaagatttgaaggtggttaagaactgtgcaaataccacaagatcattttgtgacctcacagatgagtggagaagcacacacgaggcctatgtcaccgtcctagaaggattcagcgggaacacaacgttgttcagttgctcacacaatttctggctggccatagacatgtcttttgaaccaccagagtttgagattgttggttttaccaaccacattaatgtgatggtgaaatttccatctattgttgaggaagaattacagtttgatttatctctcgtcattgaagaacagtcagagggaattgttaagaagcataaacccgaaataaaaggaaacatgagtggaaatttcacctatatcattgacaagttaattccaaacacgaactactgtgtatctgtttatttagagcacagtgatgagcaagcagtaataaagtctcccttaaaatgcaccctccttccacctggccaggaatcagaatcagcagaatctgccaaaataggaggaataattactgtgtttttgatagcattggtcttgacaagcaccatagtgacactgaaatggattggttatatatgcttaagaaatagcctccccaaagtcttgaggcaaggtctcgctaagggctggaatgcagtggctattcacaggtgcagtcataatgcactacagtctgaaactcctgagctcaaacagtcgtcctgcctaagcttccccagtagctgggattacaagcgtgcatccctgtgccccagtgattaagttttattatgtagaaaataaagagcaaacagtacagctgatanggactctctctctctttttttttttttttaagaattttcataactttttagcctggccatttcctaacctgccaccgttggaagccatggatatggtggaggtcatttacatcaacagaaagaagaaagtgtgggattataattatgatgatgaaagtgatagcgatactgaggcagcgcccaggacaagtggcggtggctataccatgcatggactgactgtcaggcctctgggtcaggcctctgccacctctacagaatcccagttgatagacccggagtccgaggaggagcctgacctgcctgaggttgatgtggagctccccacgatgccaaaggacagccctcagcagttggaactcttgagtgggccctgtgagaggagaaagagtccactccaggacccttttcccgaagaggactacagctccacggaggggtctgggggcagaattaccttcaatgtggacttaaactctgtgtttttgagagttcttgatgacgaggacagtgacgacttagaagcccctctgatgctatcgtctcatctggaagagatggttgacccagaggatcctgataatgtgcaatcaaaccatttgctggccagcggggaagggacacagccaacctttcccagcccctcttcagagggcctgtggtccgaagatgctccatctgatcaaagtgacacttctgagtcagatgttgaccttggggatggttatataatgagatgactccaaaactattgaatgaacttggacagacaagcacctacagggttctttgtctctgcatcctaacttgctgccttatcgtctgcaagtgttctccaagggaaggaggaggaaactgtggtgttcctttcttccaggtgacatcacctatgcacattcccagtatggggaccatagtatcattcagtgcattgtttacatattcaaagtggtgcactttgaaggaagcacatgtgcacctttcctttacactaatgcacttaggatgtttctgcatcatgtctaccagggagcagggttccccacagtttcagaggtggtccaggaccctatgatatttctcttctttcgttcttttttttttttttttgagacagagtctcgttctgtcgcccaagctggagcgcaatggtgtgatcttggctcactgcaacatccgcctcccgggttcaggtgattctcctgcctcagcctccctcgcaagtagctgggattacaggcgcctgccaccatgcctagcaaatttttgtatttttagtagagacaggattttaccatgttggccaggctggtctcgaactcctgacctcaagtgatctgccctcctcagcctcgtaaagtgctgggattacaggggtgagccgctgtgcctggctggccctgtgatatttctgtgaaataaattgggccagggtgggagcagggaaagaaaaggaaaatagtagcaagagctgcaaagcaggcaggaagggaggaggagagccaggtgagcagtggagagaaggggggccctgcacaaggaaacagggaagagccatcgaagtttcagtcggtgagccttgggcacctcacccatgtcacatcctgtctcctgcaattggaattccaccttgtccagccctccccagttaaagtggggaagacagactttaggatcacgtgtgtgactaatacagaaaggaaacatggcgtcggggagagggataaaacctgaatgccatattttaagttaaaaaaaaaaaaagcaaacacaaagatgcttcaagatcttcaggagaagtatggtatacaagtttcagggaccctatttgacaattttcagagtgctctctatgctgattccgagtcgagtgtgtcagctgtgattacagtgcctgtggatctaggccgggttgggggggtgtgggcgggggaagggaagtctggcccggagcaattgctcctgccggtaaccccagcactttgggatgcctaaacaggcgtatcgcttgaggccagtaattcgagaccagcctgggcaacatggcaaatctgtctctacaaaacaaaattagaaaaattaactgggcgtagtggcatgtgcctgttgtcccagctacttgggaggctgaggtgggagaatggcttgagcccgggaagcggaggttgcagtgagccaagatcatgtcactgcgcttcagcctgggtgacagaaccagaccctgtctttaaaaagggagttggtggggagaggttctagaatgtcatgtagcaaccagtttaaggactgggactcagggatccaactcccacagtttccctgtgtgaccctaggcatttgacttagcctttctgagcctcaggttttttgtttctgaagtaaaaggattggactaggtaatctccaagatcctaggaacccaggagaaagatgagaaaatgtacaagaatgaacactcaggtggaaatgctgcaatcctgagaagctcccaggatgaatgaaaggcacaggacctcttacccctcacccctgcccccctcaagagctggtttctcaaacctttctcttaggccccttcaaagggggaaaactaaaaattatacaagttatagttcaaggactttaaatagattatttatatgattgctcataaggatgaggctgtgaggagggaacaccttatttaatctaatgaaattccataggaaagaggccttttgtatattgaatcaatttatctgccttctcagtgcatctgtcatattctgaaagattctgggttgatcttttgcgataacctctatggctgtgagtgtgtgtgtgtgtttgtgtattttttaacattttgtataatgattggaggttggtaaaaagtaacacaacagtacttttttaatacaaacttggtgtggtcttgagttgtcttccattggagagcgtacgtgtgccacagattggtgcacctgccggcatctctaggattgcaccaactccctctagctcttcttggtggcctgcaggggcctagggcgcattcacttccctctgcttgactttacgtggtgttctagcgtcagacatcaggcgatgccgtgcattacccaagacactggacagctccggatcttcccgtctaaccactaatcaagttaaaaagaggaaattaacgctttcttagtagtctctgaaagaaactagttatttgcgtaaagatgacttggttttgtgttgtttatccctggggagaagggtaaagaagaccctcaaactggatttgctgctgaagtgcttttaactcacctgtgcggagagcggacttcaagagagggcgtgccggtgctccggacaaaacctggggaatactgaaagccacca

SEQ ID NO: 375874 - DNA, 4543 bp, Homo sapiens
  misc_feature (1)..(1): n is a, c, g, or t
  misc_feature (5)..(7): n is a, c, g, or t
ngccnnngcccccgcgccggcggcggcgcggcgcccgcgcttccgtagcgctcctcgtaggccggggctcggcgcgcgcacccgcactaaagacgcttcttcccggcgggtaggaatcccgccggcgagccgaacagttccccgagcgcagcccgcggaccaccacccggccgcacgggccgcttttgtcccccgcccgccgcttctgtccgagaggccgcccgcgaggcgcatcctgaccgcgagcgtcgggtcccagagccgggcgcggctggggcccgaggctagcatctctcgggagccgcaaggcgagagctgcaaagatgtaaaagtcaagagaagactctaaaaatagcaaagatgcttttgagccagaatgccttcatcttcagatcacttaatttggttctcatggtgtatatcagcctcgtgtttggtatttcatatgattcgcctgattacacagatgaatcttgcactttcaagatatcattgcgaaatttccggtccatcttatcatgggaattaaaaaaccactccattgtaccaactcactatacattgctgtatacaatcatgagtaaaccagaagatttgaaggtggttaagaactgtgcaaataccacaagatcattttgtgacctcacagatgagtggagaagcacacacgaggcctatgtcaccgtcctagaaggattcagcgggaacacaacgttgttcagttgctcacacaatttctggctggccatagacatgtcttttgaaccaccagagtttgagattgttggttttaccaaccacattaatgtgatggtgaaatttccatctattgttgaggaagaattacagtttgatttatctctcgtcattgaagaacagtcagagggaattgttaagaagcataaacccgaaataaaaggaaacatgagtggaaatttcacctatatcattgacaagttaattccaaacacgaactactgtgtatctgtttatttagagcacagtgatgagcaagcagtaataaagtctcccttaaaatgcaccctccttccacctggccaggaatcagaatcagcagaatctgccaaaataggaggaataattactgtgtttttgatagcattggtcttgacaagcaccatagtgacactgaaatggattggttatatatgcttaagaaatagcctccccaaagtcttgaattttcataactttttagcctggccatttcctaacctgccaccgttggaagccatggatatggtggaggtcatttacatcaacagaaagaagaaagtgtgggattataattatgatgatgaaagtgatagcgatactgaggcagcgcccaggacaagtggcggtggctataccatgcatggactgactgtcaggcctctgggtcaggcctctgccacctctacagaatcccagttgatagacccggagtccgaggaggagcctgacctgcctgaggttgatgtggagctccccacgatgccaaaggacagccctcagcagttggaactcttgagtgggccctgtgagaggagaaagagtccactccaggacccttttcccgaagaggactacagctccacggaggggtctgggggcagaattaccttcaatgtggacttaaactctgtgtttttgagagttcttgatgacgaggacagtgacgacttagaagcccctctgatgctatcgtctcatctggaagagatggttgacccagaggatcctgataatgtgcaatcaaaccatttgctggccagcggggaagggacacagccaacctttcccagcccctcttcagagggcctgtggtccgaagatgctccatctgatcaaagtgacacttctgagtcagatgttgaccttggggatggttatataatgagatgactccaaaactattgaatgaacttggacagacaagcacctacagggttctttgtctctgcatcctaacttgctgccttatcgtctgcaagtgttctccaagggaaggaggaggaaactgtggtgttcctttcttccaggtgacatcacctatgcacattcccagtatggggaccatagtatcattcagtgcattgtttacatattcaaagtggtgcactttgaaggaagcacatgtgcacctttcctttacactaatgcacttaggatgtttctgcatcatgtctaccagggagcagggttccccacagtttcagaggtggtccaggaccctatgatatttctcttctttcgttcttttttttttttttttgagacagagtctcgttctgtcgcccaagctggagcgcaatggtgtgatcttggctcactgcaacatccgcctcccgggttcaggtgattctcctgcctcagcctccctcgcaagtagctgggattacaggcgcctgccaccatgcctagcaaatttttgtatttttagtagagacaggattttaccatgttggccaggctggtctcgaactcctgacctcaagtgatctgccctcctcagcctcgtaaagtgctgggattacaggggtgagccgctgtgcctggctggccctgtgatatttctgtgaaataaattgggccagggtgggagcagggaaagaaaaggaaaatagtagcaagagctgcaaagcaggcaggaagggaggaggagagccaggtgagcagtggagagaaggggggccctgcacaaggaaacagggaagagccatcgaagtttcagtcggtgagccttgggcacctcacccatgtcacatcctgtctcctgcaattggaattccaccttgtccagccctccccagttaaagtggggaagacagactttaggatcacgtgtgtgactaatacagaaaggaaacatggcgtcggggagagggataaaacctgaatgccatattttaagttaaaaaaaaaaaaagcaaacacaaagatgcttcaagatcttcaggagaagtatggtatacaagtttcagggaccctatttgacaattttcagagtgctctctatgctgattccgagtcgagtgtgtcagctgtgattacagtgcctgtggatctaggccgggttgggggggtgtgggcgggggaagggaagtctggcccggagcaattgctcctgccggtaaccccagcactttgggatgcctaaacaggcgtatcgcttgaggccagtaattcgagaccagcctgggcaacatggcaaatctgtctctacaaaacaaaattagaaaaattaactgggcgtagtggcatgtgcctgttgtcccagctacttgggaggctgaggtgggagaatggcttgagcccgggaagcggaggttgcagtgagccaagatcatgtcactgcgcttcagcctgggtgacagaaccagaccctgtctttaaaaagggagttggtggggagaggttctagaatgtcatgtagcaaccagtttaaggactgggactcagggatccaactcccacagtttccctgtgtgaccctaggcatttgacttagcctttctgagcctcaggttttttgtttctgaagtaaaaggattggactaggtaatctccaagatcctaggaacccaggagaaagatgagaaaatgtacaagaatgaacactcaggtggaaatgctgcaatcctgagaagctcccaggatgaatgaaaggcacaggacctcttacccctcacccctgcccccctcaagagctggtttctcaaacctttctcttaggccccttcaaagggggaaaactaaaaattatacaagttatagttcaaggactttaaatagattatttatatgattgctcataaggatgaggctgtgaggagggaacaccttatttaatctaatgaaattccataggaaagaggccttttgtatattgaatcaatttatctgccttctcagtgcatctgtcatattctgaaagattctgggttgatcttttgcgataacctctatggctgtgagtgtgtgtgtgtgtttgtgtattttttaacattttgtataatgattggaggttggtaaaaagtaacacaacagtacttttttaatacaaacttggtgtggtcttgagttgtcttccattggagagcgtacgtgtgccacagattggtgcacctgccggcatctctaggattgcaccaactccctctagctcttcttggtggcctgcaggggcctagggcgcattcacttccctctgcttgactttacgtggtgttctagcgtcagacatcaggcgatgccgtgcattacccaagacactggacagctccggatcttcccgtctaaccactaatcaagttaaaaagaggaaattaacgctttcttagtagtctctgaaagaaactagttatttgcgtaaagatgacttggttttgtgttgtttatccctggggagaagggtaaagaagaccctcaaactggatttgctgctgaagtgcttttaactcacctgtgcggagagcggacttcaagagagggcgtgccggtgctccggacaaaacctggggaatactgaaagccacca

SEQ ID NO: 375875 - DNA, 5088 bp, Homo sapiens
  misc_feature (1)..(1): n is a, c, g, or t
  misc_feature (5)..(7): n is a, c, g, or t
  misc_feature (1713)..(1713): n is a, c, g, or t
ngccnnngcccccgcgccggcggcggcgcggcgcccgcgcttccgtagcgctcctcgtaggccggggctcggcgcgcgcacccgcactaaagacgcttcttcccggcgggtaggaatcccgccggcgagccgaacagttccccgagcgcagcccgcggaccaccacccggccgcacgggccgcttttgtcccccgcccgccgcttctgtccgagaggccgcccgcgaggcgcatcctgaccgcgagcgtcgggtcccagagccgggcgcggctggggcccgaggctagcatctctcgggagccgcaaggcgagagctgcaaagatgtaaaagtcaagagaagactctaaaaatagcaaagatgcttttgagccagaatgccttcatcttcagatcacttaatttggttctcatggtgtatatcagcctcgtgtttggtatttcatatgattcgcctgattacacagatgaatcttgcactttcaagatatcattgcgaaatttccggtccatcttatcatgggaattaaaaaaccactccattgtaccaactcactatacattgctgtatacaatcatgagtgggacaccagaaagctgcctggcctagtctgggacaggcctgggtccatagtctggtttggtcactaaccagcttgacacttggcacggacctcagcccctaagctaatgcctctgctgaggggttgctgcaaggattcgtgacataatggatggagtcctgcttgtcttttgtcttcccacacctaccaatcgcccttagaagtcattgctttgatccagcagccccttggagtgtccttttgatggttatttatttggcctagagctgctgctgctactgcttattgactgagccagtgggagacctctttaaaccagaagatttgaaggtggttaagaactgtgcaaataccacaagatcattttgtgacctcacagatgagtggagaagcacacacgaggcctatgtcaccgtcctagaaggattcagcgggaacacaacgttgttcagttgctcacacaatttctggctggccatagacatgtcttttgaaccaccagagtttgagattgttggttttaccaaccacattaatgtgatggtgaaatttccatctattgttgaggaagaattacagtttgatttatctctcgtcattgaagaacagtcagagggaattgttaagaagcataaacccgaaataaaaggaaacatgagtggaaatttcacctatatcattgacaagttaattccaaacacgaactactgtgtatctgtttatttagagcacagtgatgagcaagcagtaataaagtctcccttaaaatgcaccctccttccacctggccaggaatcagaatcagcagaatctgccaaaataggaggaataattactgtgtttttgatagcattggtcttgacaagcaccatagtgacactgaaatggattggttatatatgcttaagaaatagcctccccaaagtcttgaggcaaggtctcgctaagggctggaatgcagtggctattcacaggtgcagtcataatgcactacagtctgaaactcctgagctcaaacagtcgtcctgcctaagcttccccagtagctgggattacaagcgtgcatccctgtgccccagtgattaagttttattatgtagaaaataaagagcaaacagtacagctgatanggactctctctctctttttttttttttttaagaattttcataactttttagcctggccatttcctaacctgccaccgttggaagccatggatatggtggaggtcatttacatcaacagaaagaagaaagtgtgggattataattatgatgatgaaagtgatagcgatactgaggcagcgcccaggacaagtggcggtggctataccatgcatggactgactgtcaggcctctgggtcaggcctctgccacctctacagaatcccagttgatagacccggagtccgaggaggagcctgacctgcctgaggttgatgtggagctccccacgatgccaaaggacagccctcagcagttggaactcttgagtgggccctgtgagaggagaaagagtccactccaggacccttttcccgaagaggactacagctccacggaggggtctgggggcagaattaccttcaatgtggacttaaactctgtgtttttgagagttcttgatgacgaggacagtgacgacttagaagcccctctgatgctatcgtctcatctggaagagatggttgacccagaggatcctgataatgtgcaatcaaaccatttgctggccagcggggaagggacacagccaacctttcccagcccctcttcagagggcctgtggtccgaagatgctccatctgatcaaagtgacacttctgagtcagatgttgaccttggggatggttatataatgagatgactccaaaactattgaatgaacttggacagacaagcacctacagggttctttgtctctgcatcctaacttgctgccttatcgtctgcaagtgttctccaagggaaggaggaggaaactgtggtgttcctttcttccaggtgacatcacctatgcacattcccagtatggggaccatagtatcattcagtgcattgtttacatattcaaagtggtgcactttgaaggaagcacatgtgcacctttcctttacactaatgcacttaggatgtttctgcatcatgtctaccagggagcagggttccccacagtttcagaggtggtccaggaccctatgatatttctcttctttcgttcttttttttttttttttgagacagagtctcgttctgtcgcccaagctggagcgcaatggtgtgatcttggctcactgcaacatccgcctcccgggttcaggtgattctcctgcctcagcctccctcgcaagtagctgggattacaggcgcctgccaccatgcctagcaaatttttgtatttttagtagagacaggattttaccatgttggccaggctggtctcgaactcctgacctcaagtgatctgccctcctcagcctcgtaaagtgctgggattacaggggtgagccgctgtgcctggctggccctgtgatatttctgtgaaataaattgggccagggtgggagcagggaaagaaaaggaaaatagtagcaagagctgcaaagcaggcaggaagggaggaggagagccaggtgagcagtggagagaaggggggccctgcacaaggaaacagggaagagccatcgaagtttcagtcggtgagccttgggcacctcacccatgtcacatcctgtctcctgcaattggaattccaccttgtccagccctccccagttaaagtggggaagacagactttaggatcacgtgtgtgactaatacagaaaggaaacatggcgtcggggagagggataaaacctgaatgccatattttaagttaaaaaaaaaaaaagcaaacacaaagatgcttcaagatcttcaggagaagtatggtatacaagtttcagggaccctatttgacaattttcagagtgctctctatgctgattccgagtcgagtgtgtcagctgtgattacagtgcctgtggatctaggccgggttgggggggtgtgggcgggggaagggaagtctggcccggagcaattgctcctgccggtaaccccagcactttgggatgcctaaacaggcgtatcgcttgaggccagtaattcgagaccagcctgggcaacatggcaaatctgtctctacaaaacaaaattagaaaaattaactgggcgtagtggcatgtgcctgttgtcccagctacttgggaggctgaggtgggagaatggcttgagcccgggaagcggaggttgcagtgagccaagatcatgtcactgcgcttcagcctgggtgacagaaccagaccctgtctttaaaaagggagttggtggggagaggttctagaatgtcatgtagcaaccagtttaaggactgggactcagggatccaactcccacagtttccctgtgtgaccctaggcatttgacttagcctttctgagcctcaggttttttgtttctgaagtaaaaggattggactaggtaatctccaagatcctaggaacccaggagaaagatgagaaaatgtacaagaatgaacactcaggtggaaatgctgcaatcctgagaagctcccaggatgaatgaaaggcacaggacctcttacccctcacccctgcccccctcaagagctggtttctcaaacctttctcttaggccccttcaaagggggaaaactaaaaattatacaagttatagttcaaggactttaaatagattatttatatgattgctcataaggatgaggctgtgaggagggaacaccttatttaatctaatgaaattccataggaaagaggccttttgtatattgaatcaatttatctgccttctcagtgcatctgtcatattctgaaagattctgggttgatcttttgcgataacctctatggctgtgagtgtgtgtgtgtgtttgtgtattttttaacattttgtataatgattggaggttggtaaaaagtaacacaacagtacttttttaatacaaacttggtgtggtcttgagttgtcttccattggagagcgtacgtgtgccacagattggtgcacctgccggcatctctaggattgcaccaactccctctagctcttcttggtggcctgcaggggcctagggcgcattcacttccctctgcttgactttacgtggtgttctagcgtcagacatcaggcgatgccgtgcattacccaagacactggacagctccggatcttcccgtctaaccactaatcaagttaaaaagaggaaattaacgctttcttagtagtctctgaaagaaactagttatttgcgtaaagatgacttggttttgtgttgtttatccctggggagaagggtaaagaagaccctcaaactggatttgctgctgaagtgcttttaactcacctgtgcggagagcggacttcaagagagggcgtgccggtgctccggacaaaacctggggaatactgaaagccacca

SEQ ID NO: 375876 - DNA, 3751 bp, Homo sapiens
cggcgcttgggtttggtgctggaaggcaaatgcactcaggctcagagctagttgctggttgcatttatttccacaatgagccccaccatgagccgcacaacgagccacgcaaagagccacaccatgagccacaccaggagccactctaggagccacaccatgggccaccctaagagccccacgaagagccaggagggttcttggtggcacagtgatgagcaagcagtaataaagtctcccttaaaatgcaccctccttccacctggccaggaatcagaatcagcagaatctgccaaaataggaggaataattactgtgtttttgatagcattggtcttgacaagcaccatagtgacactgaaatggattggttatatatgcttaagaaatagcctccccaaagtcttgaattttcataactttttagcctggccatttcctaacctgccaccgttggaagccatggatatggtggaggtcatttacatcaacagaaagaagaaagtgtgggattataattatgatgatgaaagtgatagcgatactgaggcagcgcccaggacaagtggcggtggctataccatgcatggactgactgtcaggcctctgggtcaggcctctgccacctctacagaatcccagttgatagacccggagtccgaggaggagcctgacctgcctgaggttgatgtggagctccccacgatgccaaaggacagccctcagcagttggaactcttgagtgggccctgtgagaggagaaagagtccactccaggacccttttcccgaagaggactacagctccacggaggggtctgggggcagaattaccttcaatgtggacttaaactctgtgtttttgagagttcttgatgacgaggacagtgacgacttagaagcccctctgatgctatcgtctcatctggaagagatggttgacccagaggatcctgataatgtgcaatcaaaccatttgctggccagcggggaagggacacagccaacctttcccagcccctcttcagagggcctgtggtccgaagatgctccatctgatcaaagtgacacttctgagtcagatgttgaccttggggatggttatataatgagatgactccaaaactattgaatgaacttggacagacaagcacctacagggttctttgtctctgcatcctaacttgctgccttatcgtctgcaagtgttctccaagggaaggaggaggaaactgtggtgttcctttcttccaggtgacatcacctatgcacattcccagtatggggaccatagtatcattcagtgcattgtttacatattcaaagtggtgcactttgaaggaagcacatgtgcacctttcctttacactaatgcacttaggatgtttctgcatcatgtctaccagggagcagggttccccacagtttcagaggtggtccaggaccctatgatatttctcttctttcgttcttttttttttttttttgagacagagtctcgttctgtcgcccaagctggagcgcaatggtgtgatcttggctcactgcaacatccgcctcccgggttcaggtgattctcctgcctcagcctccctcgcaagtagctgggattacaggcgcctgccaccatgcctagcaaatttttgtatttttagtagagacaggattttaccatgttggccaggctggtctcgaactcctgacctcaagtgatctgccctcctcagcctcgtaaagtgctgggattacaggggtgagccgctgtgcctggctggccctgtgatatttctgtgaaataaattgggccagggtgggagcagggaaagaaaaggaaaatagtagcaagagctgcaaagcaggcaggaagggaggaggagagccaggtgagcagtggagagaaggggggccctgcacaaggaaacagggaagagccatcgaagtttcagtcggtgagccttgggcacctcacccatgtcacatcctgtctcctgcaattggaattccaccttgtccagccctccccagttaaagtggggaagacagactttaggatcacgtgtgtgactaatacagaaaggaaacatggcgtcggggagagggataaaacctgaatgccatattttaagttaaaaaaaaaaaaagcaaacacaaagatgcttcaagatcttcaggagaagtatggtatacaagtttcagggaccctatttgacaattttcagagtgctctctatgctgattccgagtcgagtgtgtcagctgtgattacagtgcctgtggatctaggccgggttgggggggtgtgggcgggggaagggaagtctggcccggagcaattgctcctgccggtaaccccagcactttgggatgcctaaacaggcgtatcgcttgaggccagtaattcgagaccagcctgggcaacatggcaaatctgtctctacaaaacaaaattagaaaaattaactgggcgtagtggcatgtgcctgttgtcccagctacttgggaggctgaggtgggagaatggcttgagcccgggaagcggaggttgcagtgagccaagatcatgtcactgcgcttcagcctgggtgacagaaccagaccctgtctttaaaaagggagttggtggggagaggttctagaatgtcatgtagcaaccagtttaaggactgggactcagggatccaactcccacagtttccctgtgtgaccctaggcatttgacttagcctttctgagcctcaggttttttgtttctgaagtaaaaggattggactaggtaatctccaagatcctaggaacccaggagaaagatgagaaaatgtacaagaatgaacactcaggtggaaatgctgcaatcctgagaagctcccaggatgaatgaaaggcacaggacctcttacccctcacccctgcccccctcaagagctggtttctcaaacctttctcttaggccccttcaaagggggaaaactaaaaattatacaagttatagttcaaggactttaaatagattatttatatgattgctcataaggatgaggctgtgaggagggaacaccttatttaatctaatgaaattccataggaaagaggccttttgtatattgaatcaatttatctgccttctcagtgcatctgtcatattctgaaagattctgggttgatcttttgcgataacctctatggctgtgagtgtgtgtgtgtgtttgtgtattttttaacattttgtataatgattggaggttggtaaaaagtaacacaacagtacttttttaatacaaacttggtgtggtcttgagttgtcttccattggagagcgtacgtgtgccacagattggtgcacctgccggcatctctaggattgcaccaactccctctagctcttcttggtggcctgcaggggcctagggcgcattcacttccctctgcttgactttacgtggtgttctagcgtcagacatcaggcgatgccgtgcattacccaagacactggacagctccggatcttcccgtctaaccactaatcaagttaaaaagaggaaattaacgctttcttagtagtctctgaaagaaactagttatttgcgtaaagatgacttggttttgtgttgtttatccctggggagaagggtaaagaagaccctcaaactggatttgctgctgaagtgcttttaactcacctgtgcggagagcggacttcaagagagggcgtgccggtgctccggacaaaacctggggaatactgaaagccacca

SEQ ID NO: 375877 - DNA, 483 bp, Homo sapiens
tctctaactaccaccttcacctctatctaaggagaaactgggatgtttacaaatgcctctgcttttcctctgggttcctgtaatcttcaagtgcctgaaggaacacactttccttcttccttcttcctctctgaacccctgacataaaccccaatttatgatgatcaggagcctggtatctgaataccatcaagggtgagaggaattcacttgaccttctggtgtcatcatatcttttatttatttttgtttattttattttattttgagacagggtctcaccctgttgcccaggctggggtgcaatggtgtgatcttggctcactacaacctccacctcccaggttcaaatgattctcctactcaggaggctgaggcaggagaattgcttgaacctgggaagtggaggttgcagtgaaccaagatcttgccattgcactccagcctgggtgacaagagcagaactccattaaaaaaaaaaaa

SEQ ID NO: 375878 - DNA, 587 bp, Homo sapiens
ccgtagcccactgactcaaatgttaatcttttttggcagcaccctcacagacacacccaggatcaatacttcacatccttcaatccaatcaagttgacactcagtattaaccatcacagggcttcatatattgaatgagatcatgtccaagtcagtgtactttaggggtgttttgagcagggcagaaagaagctaatgctaccaccaaagagagctctgctttgttactggactgccatccactagaatttatgattaaacccattcctacctgctgtttactaggggagaggctgttgtttatttttggcagagcaaacgaacacagtgaggactactgggagactcacttgaagacaggcggattgcatctaagaggtggtgttgcccacactgcaaattgtgcttgtgtctgtctaaacagcaatgaaaactggccaggttcatagtaccctttcaaagtggagttctctaaggaaacattagcttcagttgataactctcaaagaaactaggacagttcccaggctgctctgtatttgtgtagataaacaacaggcattaatagagccatactgaaaaaaaaa

SEQ ID NO: 375879 - DNA, 316 bp, Homo sapiens
ccaattgtcaaagtttctgggcccacaaaatctggacctgctcctaattttttgccacatatctgagtctgggtattttcttcgtggcttttagggggctttggggttctactgccatgcctgtgattcctagtatttggaaggtaactagaggttgcagaccagaaggaacagaaagccacctgacctaagctctagctgtggtagaaaaaggtgtgtaggcctgctatggtgacatagggctagttactttacctgtccctttgctctacacaactgatactatgcatagttccttctacctcaatccaggccc

SEQ ID NO: 375880 - DNA, 806 bp, Homo sapiens
aaggggctcatgcagaagcagttcccggacccgacactctgggtaggagaccactaaacccggcccctcaaagcagaggtgaccttgccctcatcgagagcgcacacaagacgccactgtaaaaggatcacagatggagagacattttgccacacgatgaatcacacaccacatctcatccccgagcttcagctgcaggacaatgctgccagaggcctggtcctcagagctcacgtaagcatctctggtgtgcagtatttttactccgtttttgaccaaagacacctgaacattcctggagaaaacagtgatgtggatcttatcaaatttaatgggcacatctgaagaaggaaacttgctcagcaccgtgagccccacagtgaaagcactttttggcaagactagagtctcaccgattttccctttctctcctcgatctcctttccagcctcttattccccggactcctggctcaccctggggccccgtgggtccagcttctcccttgggaccaggctttccaatagggcccatggggcccggtaaaccagttgggcccaaaggcccaatgttgccccttggcccctcaggaccagtgggacccacgtcacccttattccccttctgcccctgaggcccagtctctcctcggaggcctttctctcccatgggccctgcaagccccttggggccatgttttcctggggatcctcttgagccttgatcacctttgatgccttttgcttcaacttttccatctgctcctaaatagagaaagagcaaataaagagatagtttgtgaaaga

SEQ ID NO: 375881 - DNA, 710 bp, Homo sapiens
aaggggctcatgcagaagcagttcccggacccgacactctgggtaggagaccactaaacccggcccctcaaagcagaggtgaccttgccctcatcgagagcgcacacaagacgccactgtaaaaggatcacagatggagagacattttgccacacgatgaatcacacaccacatctcatccccgagcttcagctgcaggacaatgctgccagaggcctggtcctcagagctcacgtaagcatctctggtgtgcagtatttttactccgtttttgaccaaagacacctgaacattcctggagaaaacagtgatgtggcagaccattgtgaccggggttcccagggattccagggtgcccttgcctgcaggtgtcctgtgagtttatgttccctgtgcagatttcaatggcaagcagaagccaccagatcctcatggttcagatgacagactgaactgaaagagggaaacagaaacccagaggagaaacctttgttgctggggccctggacacagcctccgttctgtgcagtgggaaatggatgagctgtcccctgccccagacccacacctggacagacttggcagaagactcagggcaggggagcaagctggttattaccaggatgacattgtccttggaaggtaacacttgtgattggaaccactcttcaagctgaacgggcaataaaaaaaagccaagtttaaggtca

SEQ ID NO: 375882 - DNA, 301 bp, Homo sapiens
gccagcctcagcctcccaaagtgctgtgattacaggcgtcagccgctgcgcccggcctcctccatagcccttccaacagaagcaccaaatgacaactctagaagaaacatttacaactctttccatttttcatcatacctttaaattataggatgtcatttgatggtttatttcagtggtctgttgttctacttggtggtctatttcattataaaatatatcttttatgacagtaaaccactgggctacagagtcatgataatttctaaattttgctgctgacctctagactcacagtctg

SEQ ID NO: 375883 - DNA, 3232 bp, Homo sapiens
cggctccgggccgctgcgggctccccagctccccacagatcccaggaggggcgggagagcggccatgaagcgaagccgcaaacgcttgtcagctgcctcccggcgccgcccgcgctgctcccattgtcaccgcctcatacgccggaagtggaactgcgcgcgccagggaggttgtcgggaggggccggcgaataaaacgagcggcgaaagaaccgaaaaaaggctcgacgctaccgtgtatgaggaactttgatccttgcgggccaccattccggaagtagaatttagaggaagaaaataccggagttgcagggtataggtaaatttctcaaggttataggttggggttcttagaactttttgtggtgtgtgttggcctagagcgactcagaagcgttagtgacttcacctaaaaaagctaacctctctgctgagcgcgaccggtatgcggcgcaggatgagcctcagggcttctgttaagagtctgtctgagaaagccggtctgcgctgttcctcggtggcgaccttaattatgagatgagctaatgctttactgacttaaccatggcgcagcgggcagtgtggctcataagccacgaaccgggaactccactttgtggcaccgtgagattctccagacggtatccaactgttgaaaaacgagccagagtcttcaatggagcaagttatgtgcctgttcctgaagatggtccctttcttaaagcactgctctttgaacttagattattggatgatgataaagacttcgttgagagtcgtgatagctgttcacgcatcaataaaacatccatttatggactcctgataggaggtgaagaactctggccagttgttgcttttctgaagaatgacatgatatatgcttgtgttccactagttgaacaaactctgtcccctcgtccgccactaattagtgtcagtggagtttcacaaggctttgaatttctttttgggatacaggattttctttattcaggtcaaaaaaatgactctgagctgaatacaaaattgagccagttgcctgacttgcttctgcaggcttgtccatttggtactttattagatgccaacttacagaattcattagataataccaattttgcatctgtgactcagccacagaaacagccagcttggaaaactgggacgtacaaaggaaaaccacaagtttctatttctatcactgaaaaggtaaaatccatgcaatatgataaacagggtatagcagatacatggcaagttgttggaacagtgacttgcaagtgtgatttggaaggaatcatgccaaatgttaccatcagcttgagtctccccaccaatggatctccacttcaggatattctagttcacccttgtgtaacttctcttgactctgcaattctgacttctagtagtattgatgcaatggatgactctgcatttagtgggccttacaaatttccattcactccacctttagagtcattcaacttatgcttctacacttcccaggtccctgtcccaccaattttgggtttttatcaaatgaaggaggaagaagtacaactaagaataaccattaatttaaaacttcatgaaagtgtgaaaaataattttgaattctgtgaagcccatatacctttttacaatagaggtccaattacacatttggaatacaaaactagttttggccagcttgaagtatttcgagagaaaagcttattgatctggattattggccagaagttcccaaaatcaatggaaattagtctttctggaactgtaacttttggagccaagagccatgagaagcagccatttgacccaatttgtactggagaaacagcatatttaaagcttcattttaggatcttagattacacacttactggatgttatgcagatcagcattcagttcaagtttttgcatcaggaaaaccaaaaataagtgcacaccggaaactaatttcttctgattattacatctggaattctaaagcccctgctccagtaacatatggatcattattattgtaatagtctcatgtttaaatgggattatataatgataacagtttaaagaaaatcataatcttatatttttaatgtggatgcatataacctgtgagtgaaaaatcactgaatgatttaattgtaaaagtagtcttatgtggtgtttgtagtctgatagagcttgaaaggacattttaaaagctaatgtctccaattttgttaaccttcgattttatgccagtataattcagaacatagaaaagtaatgattcacttgggctcattttagactggtcctgggtcaccctgccacacttgtttcctagtgtttctgtggcagacattgctaatcaattacagcccttttctgtactgagccttggataaagggtcaggctcctttttagttcagagattcaggcagccactcccagtgggttgtagataatgtgcaagataaaaactattttctcttccaaatctaagtactaagctcctagtataaggtgttgttacagaataccagagaccatgttagagacaactacatctcttcaaaaaacagccaacagagacaaaggaaaagtgtttaaatagtaagctgttcttcttaatcagaactatcctattgactaataaataatctgcataattctacttaaggtgtgtaatctctgttctagagttagtttttaagtaagcttgttaatctgccactttgacattttgcttaggatgtcagtagccatattaagatgtgtagaataccttcagaagatgatcatagtgttttgtaatcatttaatgtctgcagccaaatttttaaaggtaatttagacctaatactgctcttgctgtgtcttattaagttaaaattaatgaatgaattctggtaaaaattcaaaaggcactctgtgagtagagagtatcatttaagcttattttagtcacatgtagtatatatctccttaaagctgtcactctcactttcttaccattctcttgatttcttcagaaaccatctagtcatcatctttatactctacctgcttctgcaattatatatcatattatgttttcagagcagttcattgtcaagttggactttaagtgaccattcaagaaaagatgaaatctcacgaacctcaaaacttcattcatgtctttttacaaatgagaaaaaaaaatgcattaaagattaatactcaatttgattata

SEQ ID NO: 375884 - DNA, 653 bp, Homo sapiens
cggctccgggccgctgcgggctccccagctccccacagatcccaggaggggcgggagagcggccatgaagcgaagccgcaaacgcttgtcagctgcctcccggcgccgcccgcgctgctcccattgtcaccgcctcatacgccggaagtggaactgcgcgcgccagggaggttgtcgggaggggccggcgaataaaacgagcggcgaaagaaccgaaaaaaggctcgacgctaccgtgtatgaggaactttgatccttgcgggccaccattccggaagtagaatttagaggaagaaaataccggagttgcagggtataggtaaatttctcaaggttataggttggggttcttagaactttttgtggtgtgtgttggcctagagcgactcagaagcgttagtgacttcacctaaaaaagctaacctctctgctgagcgcgaccggtatgcggcgcaggatgagcctcagggcttctgttaagagtctgtctgagaaagccggtctgcgctgttcctcggtggcgaccttaattatgagatgagctacatggcttaatctaacccgctgggacccgtttcaaagccgccaaatggggggccggccaaagaccggggagcccaaggtggttgggcgtcaatagagccagcgaaccg

SEQ ID NO: 375885 - DNA, 3273 bp, Homo sapiens
cggctccgggccgctgcgggctccccagctccccacagatcccaggaggggcgggagagcggccatgaagcgaagccgcaaacgcttgtcagctgcctcccggcgccgcccgcgctgctcccattgtcaccgcctcatacgccggaagtggaactgcgcgcgccagggaggttgtcgggaggggccggcgaataaaacgagcggcgaaagaaccgaaaaaaggctcgacgctaccgtgtatgaggaactttgatccttgcgggccaccattccggaagtagaatttagaggaagaaaataccggagttgcagggtataggtaaatttctcaaggttataggttggggttcttagaactttttgtggtgtgtgttggcctagagcgactcagaagcgttagtgacttcacctaaaaaagctaacctctctgctgagcgcgaccggtatgcggcgcaggatgagcctcagggcttctgttaagagtctgtctgagaaagccggtctgcgctgttcctcggtggcgaccttaattatgagatgagctaatgctttactgacttaaccatggcgcagcgggcagtgtggctcataagccacgaaccgggaactccactttgtggcaccgtgagattctccagggattggcaagaagactcagggtacctgtcattcactataaacggtatccaactgttgaaaaacgagccagagtcttcaatggagcaagttatgtgcctgttcctgaagatggtccctttcttaaagcactgctctttgaacttagattattggatgatgataaagacttcgttgagagtcgtgatagctgttcacgcatcaataaaacatccatttatggactcctgataggaggtgaagaactctggccagttgttgcttttctgaagaatgacatgatatatgcttgtgttccactagttgaacaaactctgtcccctcgtccgccactaattagtgtcagtggagtttcacaaggctttgaatttctttttgggatacaggattttctttattcaggtcaaaaaaatgactctgagctgaatacaaaattgagccagttgcctgacttgcttctgcaggcttgtccatttggtactttattagatgccaacttacagaattcattagataataccaattttgcatctgtgactcagccacagaaacagccagcttggaaaactgggacgtacaaaggaaaaccacaagtttctatttctatcactgaaaaggtaaaatccatgcaatatgataaacagggtatagcagatacatggcaagttgttggaacagtgacttgcaagtgtgatttggaaggaatcatgccaaatgttaccatcagcttgagtctccccaccaatggatctccacttcaggatattctagttcacccttgtgtaacttctcttgactctgcaattctgacttctagtagtattgatgcaatggatgactctgcatttagtgggccttacaaatttccattcactccacctttagagtcattcaacttatgcttctacacttcccaggtccctgtcccaccaattttgggtttttatcaaatgaaggaggaagaagtacaactaagaataaccattaatttaaaacttcatgaaagtgtgaaaaataattttgaattctgtgaagcccatatacctttttacaatagaggtccaattacacatttggaatacaaaactagttttggccagcttgaagtatttcgagagaaaagcttattgatctggattattggccagaagttcccaaaatcaatggaaattagtctttctggaactgtaacttttggagccaagagccatgagaagcagccatttgacccaatttgtactggagaaacagcatatttaaagcttcattttaggatcttagattacacacttactggatgttatgcagatcagcattcagttcaagtttttgcatcaggaaaaccaaaaataagtgcacaccggaaactaatttcttctgattattacatctggaattctaaagcccctgctccagtaacatatggatcattattattgtaatagtctcatgtttaaatgggattatataatgataacagtttaaagaaaatcataatcttatatttttaatgtggatgcatataacctgtgagtgaaaaatcactgaatgatttaattgtaaaagtagtcttatgtggtgtttgtagtctgatagagcttgaaaggacattttaaaagctaatgtctccaattttgttaaccttcgattttatgccagtataattcagaacatagaaaagtaatgattcacttgggctcattttagactggtcctgggtcaccctgccacacttgtttcctagtgtttctgtggcagacattgctaatcaattacagcccttttctgtactgagccttggataaagggtcaggctcctttttagttcagagattcaggcagccactcccagtgggttgtagataatgtgcaagataaaaactattttctcttccaaatctaagtactaagctcctagtataaggtgttgttacagaataccagagaccatgttagagacaactacatctcttcaaaaaacagccaacagagacaaaggaaaagtgtttaaatagtaagctgttcttcttaatcagaactatcctattgactaataaataatctgcataattctacttaaggtgtgtaatctctgttctagagttagtttttaagtaagcttgttaatctgccactttgacattttgcttaggatgtcagtagccatattaagatgtgtagaataccttcagaagatgatcatagtgttttgtaatcatttaatgtctgcagccaaatttttaaaggtaatttagacctaatactgctcttgctgtgtcttattaagttaaaattaatgaatgaattctggtaaaaattcaaaaggcactctgtgagtagagagtatcatttaagcttattttagtcacatgtagtatatatctccttaaagctgtcactctcactttcttaccattctcttgatttcttcagaaaccatctagtcatcatctttatactctacctgcttctgcaattatatatcatattatgttttcagagcagttcattgtcaagttggactttaagtgaccattcaagaaaagatgaaatctcacgaacctcaaaacttcattcatgtctttttacaaatgagaaaaaaaaatgcattaaagattaatactcaatttgattata

SEQ ID NO: 375886 - DNA, 2586 bp, Homo sapiens
cggctccgggccgctgcgggctccccagctccccacagatcccaggaggggcgggagagcggccatgaagcgaagccgcaaacgcttgtcagctgcctcccggcgccgcccgcgctgctcccattgtcaccgcctcatacgccggaagtggaactgcgcgcgccagggaggttgtcgggaggggccggcgaataaaacgagcggcgaaagaaccgaaaaaaggctcgacgctaccgtgtatgaggaactttgatccttgcgggccaccattccggaagtagaatttagaggaagaaaataccggagttgcagggtataggtaaatttctcaaggttataggttggggttcttagaactttttgtggtgtgtgttggcctagagcgactcagaagcgttagtgacttcacctaaaaaagctaacctctctgctgagcgcgaccggtatgcggcgcaggatgagcctcagggcttctgttaagagtctgtctgagaaagccggtctgcgctgttcctcggtggcgaccttaattatgagatgagctaatgctttactgacttaaccatggcgcagcgggcagtgtggctcataagccacgaaccgggaactccactttgtggcaccgtgagattctccagtgtgatttggaaggaatcatgccaaatgttaccatcagcttgagtctccccaccaatggatctccacttcaggatattctagttcacccttgtgtaacttctcttgactctgcaattctgacttctagtagtattgatgcaatggatgactctgcatttagtgggccttacaaatttccattcactccacctttagagtcattcaacttatgcttctacacttcccaggtccctgtcccaccaattttgggtttttatcaaatgaaggaggaagaagtacaactaagaataaccattaatttaaaacttcatgaaagtgtgaaaaataattttgaattctgtgaagcccatatacctttttacaatagaggtccaattacacatttggaatacaaaactagttttggccagcttgaagtatttcgagagaaaagcttattgatctggattattggccagaagttcccaaaatcaatggaaattagtctttctggaactgtaacttttggagccaagagccatgagaagcagccatttgacccaatttgtactggagaaacagcatatttaaagcttcattttaggatcttagattacacacttactggatgttatgcagatcagcattcagttcaagtttttgcatcaggaaaaccaaaaataagtgcacaccggaaactaatttcttctgattattacatctggaattctaaagcccctgctccagtaacatatggatcattattattgtaatagtctcatgtttaaatgggattatataatgataacagtttaaagaaaatcataatcttatatttttaatgtggatgcatataacctgtgagtgaaaaatcactgaatgatttaattgtaaaagtagtcttatgtggtgtttgtagtctgatagagcttgaaaggacattttaaaagctaatgtctccaattttgttaaccttcgattttatgccagtataattcagaacatagaaaagtaatgattcacttgggctcattttagactggtcctgggtcaccctgccacacttgtttcctagtgtttctgtggcagacattgctaatcaattacagcccttttctgtactgagccttggataaagggtcaggctcctttttagttcagagattcaggcagccactcccagtgggttgtagataatgtgcaagataaaaactattttctcttccaaatctaagtactaagctcctagtataaggtgttgttacagaataccagagaccatgttagagacaactacatctcttcaaaaaacagccaacagagacaaaggaaaagtgtttaaatagtaagctgttcttcttaatcagaactatcctattgactaataaataatctgcataattctacttaaggtgtgtaatctctgttctagagttagtttttaagtaagcttgttaatctgccactttgacattttgcttaggatgtcagtagccatattaagatgtgtagaataccttcagaagatgatcatagtgttttgtaatcatttaatgtctgcagccaaatttttaaaggtaatttagacctaatactgctcttgctgtgtcttattaagttaaaattaatgaatgaattctggtaaaaattcaaaaggcactctgtgagtagagagtatcatttaagcttattttagtcacatgtagtatatatctccttaaagctgtcactctcactttcttaccattctcttgatttcttcagaaaccatctagtcatcatctttatactctacctgcttctgcaattatatatcatattatgttttcagagcagttcattgtcaagttggactttaagtgaccattcaagaaaagatgaaatctcacgaacctcaaaacttcattcatgtctttttacaaatgagaaaaaaaaatgcattaaagattaatactcaatttgattata

SEQ ID NO: 375887 - DNA, 1940 bp, Homo sapiens
cggctccgggccgctgcgggctccccagctccccacagatcccaggaggggcgggagagcggccatgaagcgaagccgcaaacgcttgtcagctgcctcccggcgccgcccgcgctgctcccattgtcaccgcctcatacgccggaagtggaactgcgcgcgccagggaggttgtcgggaggggccggcgaataaaacgagcggcgaaagaaccgaaaaaaggctcgacgctaccgtgtatgaggaactttgatccttgcgggccaccattccggaagtagaatttagaggaagaaaataccggagttgcagggtataggtaaatttctcaaggttataggttggggttcttagaactttttgtggtgtgtgttggcctagagcgactcagaagcgttagtgacttcacctaaaaaagctaacctctctgctgagcgcgaccggtatgcggcgcaggatgagcctcagggcttctgttaagagtctgtctgagaaagccggtctgcgctgttcctcggtggcgaccttaattatgagatgagctaatgctttactgacttaaccatggcgcagcgggcagtgtggctcataagccacgaaccgggaactccactttgtggcaccgtgagattctccagacggtatccaactgttgaaaaacgagccagagtcttcaatggagcaagttatgtgcctgttcctgaagatggtccctttcttaaagcactgctctttgaacttagattattggatgatgataaagacttcgttgagagtcgtgatagctgttcacgcatcaataaaacatccatttatggactcctgataggaggtgaagaactctggccagttgttgcttttctgaagaatgacatgatatatgcttgtgttccactagttgaacaaactctgtcccctcgtccgccactaattagtgtcagtggagtttcacaaggctttgaatttctttttgggatacaggattttctttattcaggtcaaaaaaatgactctgagctgaatacaaaattgagccagttgcctgacttgcttctgcaggcttgtccatttggtactttattagatgccaacttacagaattcattagataataccaattttgcatctgtgactcagccacagaaacagccagcttggaaaactgggacgtacaaaggaaaaccacaagtttctatttctatcactgaaaaggtaaaatccatgcaatatgataaacagggtatagcagatacatggcaagttgttggaacagtgacttgcaagtgtgatttggaaggaatcatgccaaatgttaccatcagcttgagtctccccaccaatggatctccacttcaggatattctagttcacccttgtgtaacttctcttgactctgcaattctgacttctagtagtattgatgcaatggatgactctgcatttagtgggccttacaaatttccattcactccacctttagagtcattcaacttatgcttctacacttcccaggtaacaaccctagaatagttgagagtttgctgatctttatattcataaatactattgataagtagataattcatactcttggtatgagaacttagaaaaagttctatttatcagacaataattgatgattgaagatgaagatttagaccaggcacggtggctcatgcctgtaatcccagcagtttgggaggctgaggcaggtggatcacttgaggtcaggagttcgaggccagcctggccaacacgatgaaaccttgtctctactaaaaatacaaaaagttagccaggcgtggtgtcatgcacctgtaatcccatctacttgggtggccgaggcaggagaatcgcttgaacccaggtggcggaggttgcggtgagccaagatcgcaccagcgcactccagcctgggcgacagagtgagactccatctc

SEQ ID NO: 375888 - DNA, 674 bp, Homo sapiens
tctagagttagtttttaagtaaaattatgcagattatttattagtcaataggatagttctgattaagaagaacagctatcctattgactaataaataatctgcataattctacttaaggtgtgtaatctctgttctagagttagtttttaagtaagcttgttaatctgccactttgacattttgcttaggatgtcagtagccatattaagatgtgtagaataccttcagaagatgatcatagtgttttgtaatcatttaatgtctgcagccaaatttttaaaggtaatttagacctaatactgctcttgctgtgtcttattaagttaaaattaatgaatgaattctggtaaaaattcaaaaggcactctgtgagtagagagtatcatttaagcttattttagtcacatgtagtatatatctccttaaagctgtcactctcactttcttaccattctcttgatttcttcagaaaccatctagtcatcatctttatactctacctgcttctgcaattatatatcatattatgttttcagagcagttcattgtcaagttggactttaagtgaccattcaagaaaagatgaaatctcacgaacctcaaaacttcattcatgtctttttacaaatgagaaaaaaaaatgcattaaagattaatactcaatttgattata

SEQ ID NO: 375889 - DNA, 2670 bp, Homo sapiens
cggctccgggccgctgcgggctccccagctccccacagatcccaggaggggcgggagagcggccatgaagcgaagccgcaaacgcttgtcagctgcctcccggcgccgcccgcgctgctcccattgtcaccgcctcatacgccggaagtggaactgcgcgcgccagggaggttgtcgggaggggccggcgaataaaacgagcggcgaaagaaccgaaaaaaggctcgacgctaccgtgtatgaggaactttgatccttgcgggccaccattccggaagtagaatttagaggaagaaaataccggagttgcagggtataggtaaatttctcaaggttataggttggggttcttagaactttttgtggtgtgtgttggcctagagcgactcagaagcgttagtgacttcacctaaaaaagctaacctctctgctgagcgcgaccggtatgcggcgcaggatgagcctcagggcttctgttaagagtctgtctgagaaagccggtctgcgctgttcctcggtggcgaccttaattatgagatgagctaatgctttactgacttaaccatggcgcagcgggcagtgtggctcataagccacgaaccgggaactccactttgtggcaccgtgagattctccagacggtatccaactgttgaaaaacgagccagagtcttcaatggagcaagttatgtgcctgttcctgaagatggtccctttcttaaagcactgctctttgaacttagattattggatgatgataaagacttcgttgagagtcgtgatagctgttcacgcatcaataaaacatccatttatggactcctgataggaggtgaagaactctggccagttgttgcttttctgaagaatgacatgatatatgcttgtgttccactagttgaacaaactctgtcccctcgtccgccactaattagtgtcagtggagtttcacaaggctttgaatttctttttgggatacaggattttctttattcaggtcaaaaaaatgactctgagctgaatacaaaattgagccagttgcctgacttgcttctgcaggcttgtccatttggtactttattagatgccaacttacagaattcattagataataccaattttgcatctgtgactcagccacagaaacagccagcttggaaaactgggacgtacaaaggaaaaccacaagtttctatttctatcactgaaaaggtaaaatccatgcaatatgataaacagggtatagcagatacatggcaagttgttggaacagtgacttgcaagtgtgatttggaaggaatcatgccaaatgttaccatcagcttgagtctccccaccaatggatctccacttcaggatattctagttcacccttgtgtaacttctcttgactctgcaattctgacttctagtagtattgatgcaatggatgactctgcatttagtgggccttacaaatttccattcactccacctttagagtcattcaacttatgcttctacacttcccaggtccctgtcccaccaattttgggtttttatcaaatgaaggaggaagaagtacaactaagaataaccattaatttaaaacttcatgaaagtgtgaaaaataattttgaattctgtgaagcccatatacctttttacaatagaggtccaattacacatttggaatacaaaactagttttggccagcttgaagtatttcgagagaaaagcttattgatctggattattggccagaagttcccaaaatcaatggaaattagtctttctggaactgtaacttttggagccaagagccatgagaagcagccatttgacccaatttgtactggagaaacagcatatttaaagcttcattttaggatcttagattacacacttactggatgttatgcagatcagcattcagttcaagtttttgcatcaggaaaaccaaaaataagtgcacaccggaaactaatttcttctgattattacatctggaattctaaagcccctgctccagtaacatatggatcattattattgtaatagtctcatgtttaaatgggattatataatgataacagtttaaagaaaatcataatcttatatttttaatgtggatgcatataacctgtgagtgaaaaatcactgaatgatttaattgtaaaagtagtcttatgtggtgtttgtagtctgatagagcttgaaaggacattttaaaagctaatgtctccaattttgttaaccttcgattttatgccagtataattcagaacatagaaaagtaatgattcacttgggctcattttagactggtcctgggtcaccctgccacacttgtttcctagtgtttctgtggcagacattgctaatcaattacagcccttttctgtactgagccttggataaagggtcaggctcctttttagttcagagattcaggcagccactcccagtgggttgtagataatgtgcaagataaaaactattttctcttccaaatctaagtactaagctcctagtataaggtgttgttacagaataccagagaccatgttagagacaactacatctcttcaaaaaacagccaacagagacaaaggaaaagtgtttaaatagtaagctgttcttcttaatcagaactatcctattgactaataaataatctgcataattcta

SEQ ID NO: 375890 - DNA, 2780 bp, Homo sapiens
cggctccgggccgctgcgggctccccagctccccacagatcccaggaggggcgggagagcggccatgaagcgaagccgcaaacgcttgtcagctgcctcccggcgccgcccgcgctgctcccattgtcaccgcctcatacgccggaagtggaactgcgcgcgccagggaggttgtcgggaggggccggcgaataaaacgagcggcgaaagaaccgaaaaaaggctcgacgctaccgtgtatgaggaactttgatccttgcgggccaccattccggaagtagaatttagaggaagaaaataccggagttgcagggtataggtaaatttctcaaggttataggttggggttcttagaactttttgtggtgtgtgttggcctagagcgactcagaagcgttagtgacttcacctaaaaaagctaacctctctgctgagcgcgaccggtatgcggcgcaggatgagcctcagggcttctgttaagagtctgtctgagaaagccggtctgcgctgttcctcggtggcgaccttaattatgagatgagctaatgctttactgacttaaccatggcgcagcgggcagtgtggctcataagccacgaaccgggaactccactttgtggcaccgtgagattctccagacggtatccaactgttgaaaaacgagccagagtcttcaatggagcaagttatgtgcctgttcctgaagatggtccctttcttaaagcactgctctttgaacttagattattggatgatgataaagacttcgttgagagtcgtgatagctgttcacgcatcaataaaacatccatttatggactcctgataggagtgtgatttggaaggaatcatgccaaatgttaccatcagcttgagtctccccaccaatggatctccacttcaggatattctagttcacccttgtgtaacttctcttgactctgcaattctgacttctagtagtattgatgcaatggatgactctgcatttagtgggccttacaaatttccattcactccacctttagagtcattcaacttatgcttctacacttcccaggtccctgtcccaccaattttgggtttttatcaaatgaaggaggaagaagtacaactaagaataaccattaatttaaaacttcatgaaagtgtgaaaaataattttgaattctgtgaagcccatatacctttttacaatagaggtccaattacacatttggaatacaaaactagttttggccagcttgaagtatttcgagagaaaagcttattgatctggattattggccagaagttcccaaaatcaatggaaattagtctttctggaactgtaacttttggagccaagagccatgagaagcagccatttgacccaatttgtactggagaaacagcatatttaaagcttcattttaggatcttagattacacacttactggatgttatgcagatcagcattcagttcaagtttttgcatcaggaaaaccaaaaataagtgcacaccggaaactaatttcttctgattattacatctggaattctaaagcccctgctccagtaacatatggatcattattattgtaatagtctcatgtttaaatgggattatataatgataacagtttaaagaaaatcataatcttatatttttaatgtggatgcatataacctgtgagtgaaaaatcactgaatgatttaattgtaaaagtagtcttatgtggtgtttgtagtctgatagagcttgaaaggacattttaaaagctaatgtctccaattttgttaaccttcgattttatgccagtataattcagaacatagaaaagtaatgattcacttgggctcattttagactggtcctgggtcaccctgccacacttgtttcctagtgtttctgtggcagacattgctaatcaattacagcccttttctgtactgagccttggataaagggtcaggctcctttttagttcagagattcaggcagccactcccagtgggttgtagataatgtgcaagataaaaactattttctcttccaaatctaagtactaagctcctagtataaggtgttgttacagaataccagagaccatgttagagacaactacatctcttcaaaaaacagccaacagagacaaaggaaaagtgtttaaatagtaagctgttcttcttaatcagaactatcctattgactaataaataatctgcataattctacttaaggtgtgtaatctctgttctagagttagtttttaagtaagcttgttaatctgccactttgacattttgcttaggatgtcagtagccatattaagatgtgtagaataccttcagaagatgatcatagtgttttgtaatcatttaatgtctgcagccaaatttttaaaggtaatttagacctaatactgctcttgctgtgtcttattaagttaaaattaatgaatgaattctggtaaaaattcaaaaggcactctgtgagtagagagtatcatttaagcttattttagtcacatgtagtatatatctccttaaagctgtcactctcactttcttaccattctcttgatttcttcagaaaccatctagtcatcatctttatactctacctgcttctgcaattatatatcatattatgttttcagagcagttcattgtcaagttggactttaagtgaccattcaagaaaagatgaaatctcacgaacctcaaaacttcattcatgtctttttacaaatgagaaaaaaaaatgcattaaagattaatactcaatttgattata

SEQ ID NO: 375891 - DNA, 2718 bp, Homo sapiens
cggctccgggccgctgcgggctccccagctccccacagatcccaggaggggcgggagagcggccatgaagcgaagccgcaaacgcttgtcagctgcctcccggcgccgcccgcgctgctcccattgtcaccgcctcatacgccggaagtggaactgcgcgcgccagggaggttgtcgggaggggccggcgaataaaacgagcggcgaaagaaccgaaaaaaggctcgacgctaccgtgtatgaggaactttgatccttgcgggccaccattccggaagtagaatttagaggaagaaaataccggagttgcagggtataggtaaatttctcaaggttataggttggggttcttagaactttttgtggtgtgtgttggcctagagcgactcagaagcgttagtgacttcacctaaaaaagctaacctctctgctgagcgcgaccggtatgcggcgcaggatgagcctcagggcttctgttaagagtctgtctgagaaagccggtctgcgctgttcctcggtggcgaccttaattatgagatgagctaatgctttactgacttaaccatggcgcagcgggcagtgtggctcataagccacgaaccgggaactccactttgtggcaccgtgagattctccagacggtatccaactgttgaaaaacgagccagagtcttcaatggagcaagttatgtgcctgttcctgaagatggtccctttcttaaagcactgctctttgaacttagattattggatgatgataaagacttcgttgagagtcgtgatagctgttcacgcatcaataaaacatccatttatggactcctgataggaggtgaagaactctggccagttgttgcttttctgaagaatgacatgatatatgcttgtgttccactagttgaacaaactctgtcccctcgtccgccactaattagtgtcagtggagtttcacaaggctttgaatttctttttgggatacaggattttctttattcaggtcaaaaaaatgactctgagctgaatacaaaattgagccagttgcctgacttgcttctgcaggcttgtccatttggtactttattagatgccaacttacagaattcattagataataccaattttgcatctgtgactcagccacagaaacagccagcttggaaaactgggacgtacaaaggaaaaccacaagtttctatttctatcactgaaaaggtaaaatccatgcaatatgataaacagggtatagcagatacatggcaagttgttggaacagtgacttgcaaggtgagatttttctctggtacttgctttatcgttttatttaacatatggagaaaagttaaatttgctagttgtattttaaataacattttttattttcatcttaagcagcagtttttaaatgggagagtcatgtaaaattttatgttatctttttgcattccttaccaattatattagttatctgtggctgtgtaaagaattgtctcattgtccccaaaatagacatttattattttcatagtttctgtagggattagcttagctgggaactttcagggtagaatcactcatgaagttgcagtcaagttttcagttgaggctatagtcatctgaaggtctgactgaggctggaagatctgcttgcaagatgactcactcacatggctaacaagttggtcctagttattggaggaaggccttagttcctttccacatggacttctcaactggctgcttaagtgtcctcacacttggtgactggcttccctcagaccagatgatgagagaggggtgggggggggagagagagaggagagagagagagagagaagagagaagagagagaagagagaagagaaaagagagaggagagagacaggcaggcaggcaggcagaagcgattatttttattacctagctgggaggttacacttccactactttctgttcattagaagcaagtcactaagtggtccatattcaaggggcgtggaataaggctccacctatgaaaagagtaatgtcaaataacttcagaacatattttaaagtcaccactgctgttttccattttctttagagggatgaaattgacatctctgacatatctaaaatcatgttgaagggctcttatttaaacaagtcgttaggttaatattgggttctctgtagaaatagaaaacaggaaaacacaacgtaaataacaatacagttagcagtgattaatgccatgttgaataatgatcaaaaataaaatcctccaggtaaacttcctacaagtttatattaatagtattctcatttctttatttttctatcttcctttattccctgcagttacgtatactttttatatgtcaaatttaatgttgtgtggctatgtataaatattatagaataaaactagagttcaagagcagagaattagaacagtcctgacagaaaaatcgggtctgtctttttttttaatcctgtttaacgttaaagttacctaaaagttttggtgtctattttaaactcatatctatcatggtcaaaaatatactccagttactcactttattagaaataactattgtaaatggctccaaaattgaggtgttcatggattatgtcatccttaagttttaaagtagttaaatcttttttctcctaagttcaatgaaatgaaaatagaaaaatatggcctggcgcagtggctcactcctgtaatcc

SEQ ID NO: 375892 - DNA, 2328 bp, Homo sapiens
cggctccgggccgctgcgggctccccagctccccacagatcccaggaggggcgggagagcggccatgaagcgaagccgcaaacgcttgtcagctgcctcccggcgccgcccgcgctgctcccattgtcaccgcctcatacgccggaagtggaactgcgcgcgccagggaggttgtcgggaggggccggcgaataaaacgagcggcgaaagaaccgaaaaaaggctcgacgctaccgtgtatgaggaactttgatccttgcgggccaccattccggaagtagaatttagaggaagaaaataccggagttgcagggtataggtaaatttctcaaggttataggttggggttcttagaactttttgtggtgtgtgttggcctagagcgactcagaagcgttagtgacttcacctaaaaaagctaacctctctgctgagcgcgaccggtatgcggcgcaggatgagcctcagggcttctgttaagagtctgtctgagaaagccggtctgcgctgttcctcggtggcgaccttaattatgagatgagctaatgctttactgacttaaccatggcgcagcgggcagtgtggctcataagccacgaaccgggaactccactttgtggcaccgtgagattctccagacggtatccaactgttgaaaaacgagccagagtcttcaatggagcaagttatgtgcctgttcctgaagatggtccctttcttaaagcactgctctttgaacttagattattggatgatgataaagacttcgttgagagtcgtgatagctgttcacgcatcaataaaacatccatttatggactcctgataggaggtgaagaactctggccagttgttgcttttctgaagaatgacatgatatatgcttgtgttccactagttgaacaaactctgtcccctcgtccgccactaattagtgtcagtggagtttcacaaggctttgaatttctttttgggatacaggattttctttattcaggtcaaaaaaatgactctgagctgaatacaaaattgagccagttgcctgacttgcttctgcaggcttgtccatttggtactttattagatgccaacttacagaattcattagataataccaattttgcatctgtgactcagccacagaaacagccagcttggaaaactgggacgtacaaaggaaaaccacaagtttctatttctatcactgaaaaggtaaaatccatgcaatatgataaacagggtatagcagatacatggcaagttgttggaacagtgacttgcaagtgtgatttggaaggaatcatgccaaatgttaccatcagcttgagtctccccaccaatggatctccacttcaggatattctagttcacccttgtgtaacttctcttgactctgcaattctgacttctagtagtattgatgcaatggatgactctgcatttagtgggccttacaaatttccattcactccacctttagagtcattcaacttatgcttctacacttcccaggtccctgtcccaccaattttgggtttttatcaaatgaaggaggaagaagtacaactaagaataaccattaatttaaaacttcatgaaagtgtgaaaaataattttgaattctgtgaagcccatatacctttttacaatagaggtccaattacacatttggaatacaaaactagttttggccagcttgaagtatttcgagagaaaagcttattgatctggattattggccagaagttcccaaaatcaatggaaattagtctttctggaactgtaacttttggagccaagagccatgagaagcagccatttgacccaatttgtactggagaaacagcatatttaaagcttcattttaggatcttagattacacacttactggatgttatgcagatcagcattcagttcaagtttttgcatcaggaaaaccaaaaataagtgcacaccggaaactaatttcttctgattattacatctggaattctaaagcccctgctccagtaacatatggatcattattattgtaatagtctcatgtttaaatgggattatataatgataacagtttaaagaaaatcataatcttatatttttaatgtggatgcatataacctaaaccatctagtcatcatctttatactctacctgcttctgcaattatatatcatattatgttttcagagcagttcattgtcaagttggactttaagtgaccattcaagaaaagatgaaatctcacgaacctcaaaacttcattcatgtctttttacaaatgagaaaaaaaaatgcattaaagattaatactcaatttgattata

SEQ ID NO: 375893 - DNA, 2489 bp, Homo sapiens
cggctccgggccgctgcgggctccccagctccccacagatcccaggaggggcgggagagcggccatgaagcgaagccgcaaacgcttgtcagctgcctcccggcgccgcccgcgctgctcccattgtcaccgcctcatacgccggaagtggaactgcgcgcgccagggaggttgtcgggaggggccggcgaataaaacgagcggcgaaagaaccgaaaaaaggctcgacgctaccgtgtatgaggaactttgatccttgcgggccaccattccggaagtagaatttagaggaagaaaataccggagttgcagggtataggtaaatttctcaaggttataggttggggttcttagaactttttgtggtgtgtgttggcctagagcgactcagaagcgttagtgacttcacctaaaaaagctaacctctctgctgagcgcgaccggtatgcggcgcaggatgagcctcagggcttctgttaagagtctgtctgagaaagccggtctgcgctgttcctcggtggcgaccttaattatgagatgagctaatgctttactgacttaaccatggcgcagcgggcagtgtggctcataagccacgaaccgggaactccactttgtggcaccgtgagattctccagacggtatccaactgttgaaaaacgagccagagtcttcaatggagcaagttatgtgcctgttcctgaagatggtccctttcttaaagcactgctctttgaacttagattattggatgatgataaagacttcgttgagagtcgtgatagctgttcacgcatcaataaaacatccatttatggactcctgataggaggtgaagaactctggccagttgttgcttttctgaagaatgacatgatatatgcttgtgttccactagttgaacaaactctgtcccctcgtccgccactaattagtgtcagtggagtttcacaaggctttgaatttctttttgggatacaggattttctttattcaggtcaaaaaaatgactctgagctgaatacaaaattgagccagttgcctgacttgcttctgcaggcttgtccatttggtactttattagatgccaacttacagaattcattagataataccaattttgcatctgtgactcagccacagaaacagccagcttggaaaactgggacgtacaaaggaaaaccacaagtttctatttctatcactgaaaaggtaaaatccatgcaatatgataaacagggtatagcagatacatggcaagttgttggaacagtgacttgcaaggtgagatttttctctggtacttgctttatcgttttatttaacatatggagaaaagttaaatttgctagttgtattttaaataacattttttattttcatcttaagcagcagtttttaaatgggagagtcatgtaaaattttatgttatctttttgcattccttaccaattatattagttatctgtggctgtgtaaagaattgtctcattgtccccaaaatagacatttattattttcatagtttctgtagggattagcttagctgggaactttcagggtagaatcactcatgaagttgcagtcaagttttcagttgaggctatagtcatctgaaggtctgactgaggctggaagatctgcttgcaagatgactcactcacatggctaacaagttggtcctagttattggaggaaggccttagttcctttccacatggacttctcaactggctgcttaagttggtccatattcaaggggcgtggaataaggctccacctatgaaaagagtaatgtcaaataacttcagaacatattttaaagtcaccactgctgttttccattttctttagagggatgaaattgacatctctgacatatctaaaatcatgttgaagggctcttatttaaacaagtcgttaggttaatattgggttctctgtagaaatagaaaacaggaaaacacaacgtaaataacaatacagttagcagtgattaatgccatgttgaataatgatcaaaaataaaatcctccaggtaaacttcctacaagtttatattaatagtattctcatttctttatttttctatcttcctttattccctgcagttacgtatactttttatatgtcaaatttaatgttgtgtggctatgtataaatattatagaataaaactagagttcaagagcagagaattagaacagtcctgacagaaaaatcgggtctgtctttttttttaatcctgtttaacgttaaagttacctaaaagttttggtgtctattttaaactcatatctatcatggtcaaaaatatactccagttactcactttattagaaataactattgtaaatggctccaaaattgaggtgttcatggattatgtcatccttaagttttaaagtagttaaatcttttttctcctaagttcaatgaaatgaaaatagaaaaatatggcctggcgcagtggctcactcctgtaatcc

SEQ ID NO: 375894 - DNA, 748 bp, Homo sapiens
attttattaaattgtaattaatttaaattggaataacaacatgtggccagtggctaccatattggaaatgagagctctagagggtctcataaattcacatggctttatttactattgtgacactgatgactcccaaattaactctacagtccatgtcctactctaaatctaaacttcactgtgtatcctatgtatttatttgcctacttttcatccacccctaccttaatatctcggttttctcagctgcaccttgtactaaacaggttaaaaactgaacttggccgggcgctgtggctgatgcctataatcccagcactttgggaggccgaggcgggcagatcacgaggtcaggagatggagaccatcctggtcaacatggtgaaaccccgtctctactaaaaatacaaaaattagctgggcttggtggcacatgcctgtaaacccagctattcgggacgctgaggcgggagaatcgcttgaacctggaaggcggaggttgcagtgagccgagatctcgccactgcacttcagcctggcgacatagcgagactcctttgacctccacctcttcggagcctactactcttgacttgatctccactttccacaaatcctagctgaccgtctaccctaattcccaggtgaatgagtaaactgatgccgctgaaagaattcagctggtgaatggatgagcagtggatctttacaaaatgaaatacaactcagcaaaaaaaaaaaaaaaaaa

SEQ ID NO: 375895 - DNA, 266 bp, Homo sapiens
cggccctgtgtgaacctcaaggattgtttgctgtacttttttttagtggttctttccccagaccctggtagtgtcctcaggtgcttgtgctgcaattaatgagtactcagctgagtggggaactctggatatctgcagagttctttctctgggaggctttcacctgaactctctactaccttgcaaacaaactagccactttggcctccttgtacttatagctctatctcttcacttcaggaatttgctgagctccatctagattc

SEQ ID NO: 375896 - DNA, 1370 bp, Homo sapiens
ttgaacccatcagttgggttctggtcagtagtagtaaaaaaaaaaaaaaattaaaatgtaatatacatataggaaaatgcacattgtcataagtgtagtcagtgattattcataaacttcatataaataacaccaaacacccagtacttccaaagctctttgtgtttttttctagttgtgaagacccgtccccttccctcctccctctttaccccccacgtatcctgtaaccagtatcccaacctagattatgtttagggcattaggattttaacatagggaaggattctggttagaatggacctgctgttgtttagcagtggggaccctggggccaaagcgcagggtagagttgcggtgcagcctgcctgctaaatttatgagaggacaaccctgaggaaagttccaagagcttccagctctgaatttctcctttaatcctcacgtatttttagggaaccagccatatttgagaacttactacccctttaaggttataaatcattccccttttcccccatgtatattggatgcattgttattattaaacacatttaaggccaggcgcagtggctcacgcttgtaatcccagcactttgggaggccgaggcgggcagatcacgaggtcaggagatcgagaccatcctggctaacatggtgaaaccccgtctctactaaaaatacaaaaaaattagccgggcttggtggcaggcacctgtagtcccagctactcgggaggctgaggcaggagaatggcttgaacccgggaggcggagctttcagtgagccgaggatcgtgccactgcactccagagtgagactctgtctcaaaaaaaaaaaaaaaaaaaaaattaaaagttttgatacaacatttaccatgttaacattttttactttacacgttagttcacattttttgtagagacagagtctcactatgttgcccagcctagtcttgaactcttaacctcaagccatcctccctcctcagcctcccaaagtgctgggattacaggtgtaagccaccacatctgactgagaatgtttttgtcttacaaagctgaaattctttctcattaaacttactgggtgtgttttaatattcttttttactttttgttacagaaaatgtcgcacatattccaaagtagaaagaatggtatagtgaatacccatggacctgatagacctgggtattcaataattatcaattacatttcatttatatttctgcatgactacctcacattatattacttagaagcaaataccaggcatcatagtattttatatgaaaatatttcagtatatatctctaaaggaggcaaactttaaaaatccctgctattgttattatacctaaaaaaaaa

SEQ ID NO: 375897 - DNA, 598 bp, Homo sapiens
aggagtccccctgaatggatgattgctgtttcaggaccgggattagaggctgtgatagactgtgcagtggcaaaagtattaacaagagtggcgatgaggatggcagttggggcgtccaggctgctgactgagtgcccgcctgtcggtacagccagccaggccttcgacaagcacctgcctggaaaccgggctcgctgtcctgaaagcctggactggatgtcacgatggggagaacgggatcgcgatacccaagctggggcacaggcgagccagggacactggtttactggggtgataacacccagccctgctatcgcgatccgtttgcactgtggtcagctgtctccacgccgtggttggagagggcttgtctccgggcgccactgctggtgtgtatggtctgtcttagtgtcccctgcaagttgcattggagattgctgggtggcagggagggaaatgggaagagaatctgtggggtcatggtggtgaaggctgctggtttttaatcccttctcaaccagtccaggacacttgtctcccagagataactggggggggactgcctaaccccccctcccccacccctttccctacccca

SEQ ID NO: 375898 - DNA, 1907 bp, Homo sapiens
ctcacgttggggctacttgttttagggcgcaaaggaacggcctcgaaagggggtccttccccagccgagaaccaggaatcttccctcggcccgcgcgcgcgaccggccggtgcgccgcggcccgcggacaatcctccaaacacagactgtttgacttagaatcttcccttttttactccattcaagagcagcattcataaatttccagaatggagatctcctctcatcagtctcacctcctgcagcaactgaacgagcagcgcaggcaagatgtattttgtgactgcagtattctagttgaagggaaggtcttcaaagcacatcgaaatgtattattcgctagtagcggctactttaaaatgcttctttctcagaattcaaaggagacgagtcagccaaccacagctacatttcaggctttctcccctgacacttttacagttatcttggacttcgtatattctggcaaactgtctcttactggtcagaatgtcatagaagtgatgtcggctgctagcttccttcagatgactgatgtcataagtgtatgtaagacttttattaaatcttccttagacattagtgagaaagaaaaagatcgctatttcagtctctcagataaagatgccaattctaatggtgtagaacgttcctctttttatagtggtggctggcaagaaggaagcagttctccacgttctcacctaagcccagagcaaggaacaggtataataagtggaaaatcttggaataagtataattatcatccagcctcccagaagaatactcaacaacccttggccaagcatgaaccaaggaaagagtccattaaaaagaccaaacatttgagattgtcacagccttctgaagttactcattataagtcaagcaaacgagaagtacgaacatctgattcttccagccatgtttcccagtctgaagaacaagcacagattgatgctgaaatggactctactcctgttggctatcagtacggtcaaggatctgatgtcacatccaaaagctttccagatgatctgcctcggatgcgattcaagtgcccgtactgcacacatgtggtgaagcggaaggcagacctaaagcgccaccttcgttgtcatacaggagaaaggccctatccatgtcaagcttgtggaaaaagatttagcaggctagaccatctaagtagccattttcgaacaattcaccaggcatgtaaactcatctgcagaaaatgtaaacgtcatgtgacagatctaacagggcaagtggtacaggagggaaccaggcgctacagactgtgtaatgagtgtcttgcagaatttggcatagacagcctccccattgacttggaagctgaacaacatcttatgtccccatcagatggagataaggattccagatggcacttgagtgaagatgagaatagatcctatgtggagattgtagaagatgggtctgctgatctggtcatccaacaggttgatgatagtgaagaagaagaagaaaaagaaattaagcccaacattaggtagctgtaatgtgaaccaacagagctggcatgtctgcaatttacattgacttcctgtatctctctctttctatggtcggagtctagttaacaaatttatcacactgactttaaagaaatgatctgatataacttgcatgctttctgaacaggccattgtatccattctgaactttgttgccctaaaatgtgttgctgcactggaaagaaagaactagcttgagttggcttgatggatgaacaattatcctcttactttcattacaatcctcttactttattccagagatacctttttcttttaatattggaggatctacttagcaaacttttttcaaagaaaatactttaaataaattcaccacaaccaaacttt

SEQ ID NO: 375899 - DNA, 2170 bp, Homo sapiens
ctcacgttggggctacttgttttagggcgcaaaggaacggcctcgaaagggggtccttccccagccgagaaccaggaatcttccctcggcccgcgcgcgcgaccggccggtgcgccgcggcccgcggacaatcctccaaacacagactgtttgacttagaatcttcccttttttactccattcaagagcagcattcataaatttccagaatggagatctcctctcatcagtctcacctcctgcagcaactgaacgagcagcgcaggcaagatgtattttgtgactgcagtattctagttgaagggaaggtcttcaaagcacatcgaaatgtattattcgctagtagcggctactttaaaatgcttctttctcagaattcaaaggagacgagtcagccaaccacagctacatttcaggctttctcccctgacacttttacagttatcttggacttcgtatattctggcaaactgtctcttactggtcagaatgtcatagaagtgatgtcggctgctagcttccttcagatgactgatgtcataagtgtatgtaagacttttattaaatcttccttagacattagtgagaaagaaaaagatcgctatttcagtctctcagataaagatgccaattctaatggtgtagaacgttcctctttttatagtggtggctggcaagaaggaagcagttctccacgttctcacctaagcccagagcaaggaacaggtataataagtggaaaatcttggaataagtataattatcatccagcctcccagaagaatactcaacaacccttggccaagcatgaaccaaggaaagagtccattaaaaagaccaaacatttgagattgtcacagccttctgaagttactcattataagtcaagcaaacgagaagtacgaacatctgattcttccagccatgtttcccagtctgaagaacaagcacagattgatgctgaaatggactctactcctgttggctatcagtacggtcaaggatctgatgtcacatccaaaagctttccagatgatctgcctcggatgcgattcaagtgcccgtactgcacacatgtggtgaagcggaaggcagacctaaagcgccaccttcgttgtcatacaggagaaaggccctatccatgtcaagcttgtggaaaaagatttagcaggctagaccatctaagtagccattttcgaacaattcaccaggcatgtaaactcatctgcagaaaatgtaaacgtcatgtgacagatctaacagggcaagtggtacaggagggaaccaggcgctacagactgtgtaatgagtgtcttgcagaatttggcatagacagcctccccattgacttggaagctgaacaacatcttatgtccccatcagatggagataaggattccagatggcacttgagtgaagatgagaatagatcctatgtggagattgtagaagatgggtctgctgatctggtcatccaacaggttgatgatagtgaagaagaagaagaaaaagaaattaagcccaacattaggtagctgtaatgtgaaccaacagagctggcatgtctgcaatttacattgacttcctgtatctctctctttctatggtcggagtctagttaacaaatttatcacactgactttaaagaaatgatctgatataacttgcatgctttctgaacaggccattgtatccattctgaactttgttgccctaaaatgtgttgctgcactggaaagaaagaactagcttgagttggcttgatggatgaacaattatcctcttactttcattacaatcctcttactttattccagagatacctttttcttttaatattggaggatctacttagcaaacttttttcaaagaaaatactttaaataaattcaccacaaccaaactttatgtaagacaatttcaaggtgtttcaaaaacacataactaccaatgtttaatttcacagggaaccagttaagagcacatttaaggatctggcaacccaccttactaaacaaattagtctttctattaatttgagatctgaaacaacctgtcattactctgatatcctgaacgtttaaggattatggaagaagactaaagtgtttgaaatcattcatatttgaaatttttatcattagcttaaaaattactctcagtattgtta

SEQ ID NO: 375900 - DNA, 1989 bp, Homo sapiens
ctcacgttggggctacttgttttagggcgcaaaggaacggcctcgaaagggggtccttccccagccgagaaccaggaatcttccctcggcccgcgcgcgcgaccggccggtgcgccgcggcccgcggacaatcctccaaacacagactgtttgacttagaatcttcccttttttactccattcaagagcagcattcataaatttccagaatggagatctcctctcatcagtctcacctcctgcagcaactgaacgagcagcgcaggcaagatgtattttgtgactgcagtattctagttgaagggaaggtcttcaaagcacatcgaaatgtattattcgctagtagcggctactttaaaatgcttctttctcagaattcaaaggagacgagtcagccaaccacagctacatttcaggctttctcccctgacacttttacagttatcttggacttcgtatattctggcaaactgtctcttactggtcagaatgtcatagaagtgatgtcggctgctagcttccttcagatgactgatgtcataagtgtatgtaagacttttattaaatcttccttagacattagtgagaaagaaaaagatcgctatttcagtctctcagataaagatgccaattctaatggtgtagaacgttcctctttttatagtggtggctggcaagaaggaagcagttctccacgttctcacctaagcccagagcaaggaacaggtataataagtggaaaatcttggaataagtataattatcatccagcctcccagaagaatactcaacaacccttggccaagcatgaaccaaggaaagagtccattaaaaagaccaaacatttgagattgtcacagccttctgaagttactcattataagtcaagcaaacgagaagtacgaacatctgattcttccagccatgtttcccagtctgaagaacaagcacagattgatgctgaaatggactctactcctgttggctatcagtacggtcaaggatctgatgtcacatccaaaagctttccagatgatctgcctcggatgcgattcaagtgcccgtactgcacacatgtggtgaagcggaaggcagacctaaagcgccaccttcgttgtcatacaggagaaaggccctatccatgtcaagcttgtggaaaaagatttagcaggctagaccatctaagtagccattttcgaacaatggagataaggattccagatggcacttgagtgaagatgagaatagatcctatgtggagattgtagaagatgggtctgctgatctggtcatccaacaggttgatgatagtgaagaagaagaagaaaaagaaattaagcccaacattaggtagctgtaatgtgaaccaacagagctggcatgtctgcaatttacattgacttcctgtatctctctctttctatggtcggagtctagttaacaaatttatcacactgactttaaagaaatgatctgatataacttgcatgctttctgaacaggccattgtatccattctgaactttgttgccctaaaatgtgttgctgcactggaaagaaagaactagcttgagttggcttgatggatgaacaattatcctcttactttcattacaatcctcttactttattccagagatacctttttcttttaatattggaggatctacttagcaaacttttttcaaagaaaatactttaaataaattcaccacaaccaaactttatgtaagacaatttcaaggtgtttcaaaaacacataactaccaatgtttaatttcacagggaaccagttaagagcacatttaaggatctggcaacccaccttactaaacaaattagtctttctattaatttgagatctgaaacaacctgtcattactctgatatcctgaacgtttaaggattatggaagaagactaaagtgtttgaaatcattcatatttgaaatttttatcattagcttaaaaattactctcagtattgtta

SEQ ID NO: 375901 - DNA, 1698 bp, Homo sapiens
ggctgggcctgcggaagggggcgggttcggaggagtgaactgtgcggttagtgcgcctttcagcctcacctgcagctgcgcctccttgcacctgcgcctgtgctttttctcccagcactgcggacgcgactcgagggtgacgctcgctccgctcgtcccgctcgtcatggcctacccgggatacggaggagggtttggaaattttagcattcaggtgccaggaatgcagatgggacagccagtgccagaaacaggcccagctatactcctcgatggatactctgggccagcatattcagacacttattcctcagctggtgactccgtgtatacttacttcagtgctgttgctggacaggatggtgaagtggatgctgaagaacttcagagatgtttgacacagtctggaattaatggaacttactctcccttcagtttggaaacctgcagaattatgattgccatgttggatagagatcacacaggaaaaatgggatttaatgcattcaaagagctatgggcagctcttaatgcctggaaggaaaacttcatgactgttgatcaagatggaagtggcacagtagaacatcatgagttgcgtcaagccattggtcttatgggttataggttgagtcctcaaacattaactactattgttaaacgttatagcaagaatggcagaattttctttgatgattatgttgcttgctgtgtgaagcttcgagcattgacagatttctttaggaaaagagaccacttgcaacaagggtctgcgaatttcatatatgacgattttttgcagggcactatggcaatttgaatgcttagaattttaaacctgaagagacactgtgaattcttttgtttggaagaagtgaactggactactttaaaacttttaagggttttctatgttcttcctacctgttaaacctcttccctttctgtgtgtttttattttagcagatagttcaaagcaataaaagatttcttttttaatttgaggtattactgcttttggaaaagttattttataaatatgtgcatattgtcataaaatattgtatgattaattgatttaaataatgcttagccttaattttagataatgtaaatttagaggaatgtactttacaagatagattgtataagaagccaaataatgaaagcctagaaaaaactaatttatacttatctgaaggttacaaattagacttttaaattttctttgtagttggtggtgtttgagggttggctagaaatgaaagcctggattttgtgccatgtttgtaatatagtttgttccttgatcaaataatcagagaaaagaaacttaaagatctttgtctgtgaagaagaaaattatctccctagttcaatctgtagtgaaataagactacagaaggcattgttttttccttttttattttttgtattatatatttttcttaaatatgttttattgtcttctctaagcaaaaagttcttaataaacatagtatttctctctgcgtcctatttcattagtgaagacatagttcacctaaaatggcatcctgctctgaatctagactttttagaaatggcatatgtttttgatgatatgtcaacattcaaaattgtcctaattaaattgttgtttaaatgtaatgtcaactctttataaacttaaaaataaacaagtaattaaccactcta

SEQ ID NO: 375902 - DNA, 1062 bp, Homo sapiens
ggctgggcctgcggaagggggcgggttcggaggagtgaactgtgcggttagtgcgcctttcagcctcacctgcagctgcgcctccttgcacctgcgcctgtgctttttctcccagcactgcggacgcgactcgagggtgacgctcgctccgctcgtcccgctcgtcatggcctacccgggatacggaggagggtttggaaattttagcattcaggtgccaggaatgcagatgggacagccagtgccagaaacaggcccagctatactcctcgatggatactctgggccagcatattcagacacttattcctcagctggtgactccgtgtatacttacttcagtgctgttgctggacaggatggtgaagtggatgctgaagaacttcagagatgtttgacacagtctggaattaatggaacttactctcccttcagtttggaaacctgcagaattatgattgccatgttggatagagatcacacaggaaaaatgggatttaatgcattcaaagagctatgggcagctcttaatgcctggaaggaaaacttcatgactgttgatcaagatggaagtggcacagtagaacatcatgagttgcgtcaagccattggtcttatgggttataggttgagtcctcaaacattaactactattgttaaacgttatagcaagaatggcagaattttctttgatgattatgttgcttgctgtgtgaagcttcgagcattgacagatttctttaggaaaagagaccacttgcaacaagggtctgcgaatttcatatatgacgattgtggaggaatgaacgtaattaactttgaacatcttgatacagaaagacctgaatctgtgtgcaaaagtgactaagttccctttatccccctggaattcccatgagttgaggatcatctgaatttgagttgcatccatgaacagttttatcccttggtttcttatttgcgtggaaggcattttcataacgaagtactggtttagtaaaagcagtaaataggagtctccatgcaagagaaattggagtttcctaacatgcatgtgattta

SEQ ID NO: 375903 - DNA, 537 bp, Homo sapiens
tttctccctttattcactgttaaatctaattagtttaaaggcttcaaatattaaggaatataaatgataaaaacgttatgttatttttggaagtttttctcatatctctgttgccagggctattcaatcacttaatatttaattgaatatgaaattattctttttgtgtacctgggtgcactaaatatttgaaactatgtattttaaattacaataaaaaagtaatttctttgtttaaagatttctttaggaaaagagaccacttgcaacaagggtctgcgaatttcatatatgacgatgtgagtatcctgcttttgatatttatactgcattctagatagttctcagttagtaaaaaaatttaagtgatcccaagtaccagtactggaaataatatatttggtatgccacatacttttccatatttttcagtgtaacacaaatataagattaatattggtataggtgccaaacaatttgacttcatgttaaattgtaaatatgcttttcaatttttatgacaggttttttgaatta

SEQ ID NO: 375904 - DNA, 2442 bp, Homo sapiens
tccgctgcccacttagagaagcagggtctaccgctctgtgcctgacaatgacgaggttgtccacagggctctcaggccggcgcgcggggctgcactcgcacctgggcaggtgggcaggcgggcaggtgggcagcggggcggcgcgcggggccgcggcaggcaggtgcggccggcaggcgcggcactttggactctgcggtgtgcgcctggggtcccggaccggggcgatcctgctgcacactcgggtaggagctttgagtccagctttctgtcaggcagttcttacagagtttgcctgactttggtttctgtttcgattctcttctcaggactttgtaaacgtaatctgcctggcggggagggagtttcctcagggagacgccaccttttggtcggggcgggtgaagagaggaggcctttggttaaggacaccgcgggaaacagaaaaggaaagcgaattctctctgacaccaagaccaacgctctagcaaagctcctccggcggatattttgttttcccagcaggttctgccttaacaataaggtcctttgtaggccaaaatgtgcagggcataaaagcatgtgatttgggactttccaaaggggaagtgaacagaaactgccacagacccggacgtgaacagggagttaccctcggctggtgaatgtaggcaggcctggctgagggtggtgagactgcgagggacaggtgagagatgaagctcagaagacatctttgcagagatgtggagaagacaggaggaagtccttcctaaaataaacctgacctcctgtgggttcccaaacactaacttgtttccctgggaatttggaggtgggttctttgaccaggacctggtaacagatgtggatggacttgaaccaccaactcagcttagaaggaagccaagacttaaagtttcctagatcccagctttttggaaattttagcattcaggtgccaggaatgcagatgggacagccagtgccagaaacaggcccagctatactcctcgatggatactctgggccagcatattcagacacttattcctcagctggtgactccgtgtatacttacttcagtgctgttgctggacaggatggtgaagtggatgctgaagaacttcagagatgtttgacacagtctggaattaatggaacttactctcccttcagtttggaaacctgcagaattatgattgccatgttggatagagatcacacaggaaaaatgggatttaatgcattcaaagagctatgggcagctcttaatgcctggaaggaaaacttcatgactgttgatcaagatggaagtggcacagtagaacatcatgagttgcgtcaagccattggtcttatgggttataggttgagtcctcaaacattaactactattgttaaacgttatagcaagaatggcagaattttctttgatgattatgttgcttgctgtgtgaagcttcgagcattgacagatttctttaggaaaagagaccacttgcaacaagggtctgcgaatttcatatatgacgattttttgcagggcactatggcaatttgaatgcttagaattttaaacctgaagagacactgtgaattcttttgtttggaagaagtgaactggactactttaaaacttttaagggttttctatgttcttcctacctgttaaacctcttccctttctgtgtgtttttattttagcagatagttcaaagcaataaaagatttcttttttaatttgaggtattactgcttttggaaaagttattttataaatatgtgcatattgtcataaaatattgtatgattaattgatttaaataatgcttagccttaattttagataatgtaaatttagaggaatgtactttacaagatagattgtataagaagccaaataatgaaagcctagaaaaaactaatttatacttatctgaaggttacaaattagacttttaaattttctttgtagttggtggtgtttgagggttggctagaaatgaaagcctggattttgtgccatgtttgtaatatagtttgttccttgatcaaataatcagagaaaagaaacttaaagatctttgtctgtgaagaagaaaattatctccctagttcaatctgtagtgaaataagactacagaaggcattgttttttccttttttattttttgtattatatatttttcttaaatatgttttattgtcttctctaagcaaaaagttcttaataaacatagtatttctctctgcgtcctatttcattagtgaagacatagttcacctaaaatggcatcctgctctgaatctagactttttagaaatggcatatgtttttgatgatatgtcaacattcaaaattgtcctaattaaattgttgtttaaatgtaatgtcaactctttataaacttaaaaataaacaagtaattaaccactcta

SEQ ID NO: 375905 - DNA, 1726 bp, Homo sapiens
gcgtccgcgcctggtactcggcggcgccggattccggggctgttgggggccaggcctgggcgagcattgatcctgggctgacttggagccgcaggttttctggtcgttgaggaccctcgaggagcgtcctggtggagccgagggagtaatgtgtgtttggaaatttatttcctggaatggaggaacaagccaccctcttcttgttccagtaatcgtttgtgtttggaaattttagcattcaggtgccaggaatgcagatgggacagccagtgccagaaacaggcccagctatactcctcgatggatactctgggccagcatattcagacacttattcctcagctggtgactccgtgtatacttacttcagtgctgttgctggacaggatggtgaagtggatgctgaagaacttcagagatgtttgacacagtctggaattaatggaacttactctcccttcagtttggaaacctgcagaattatgattgccatgttggatagagatcacacaggaaaaatgggatttaatgcattcaaagagctatgggcagctcttaatgcctggaaggaaaacttcatgactgttgatcaagatggaagtggcacagtagaacatcatgagttgcgtcaagccattggtcttatgggttataggttgagtcctcaaacattaactactattgttaaacgttatagcaagaatggcagaattttctttgatgattatgttgcttgctgtgtgaagcttcgagcattgacagatttctttaggaaaagagaccacttgcaacaagggtctgcgaatttcatatatgacgattttttgcagggcactatggcaatttgaatgcttagaattttaaacctgaagagacactgtgaattcttttgtttggaagaagtgaactggactactttaaaacttttaagggttttctatgttcttcctacctgttaaacctcttccctttctgtgtgtttttattttagcagatagttcaaagcaataaaagatttcttttttaatttgaggtattactgcttttggaaaagttattttataaatatgtgcatattgtcataaaatattgtatgattaattgatttaaataatgcttagccttaattttagataatgtaaatttagaggaatgtactttacaagatagattgtataagaagccaaataatgaaagcctagaaaaaactaatttatacttatctgaaggttacaaattagacttttaaattttctttgtagttggtggtgtttgagggttggctagaaatgaaagcctggattttgtgccatgtttgtaatatagtttgttccttgatcaaataatcagagaaaagaaacttaaagatctttgtctgtgaagaagaaaattatctccctagttcaatctgtagtgaaataagactacagaaggcattgttttttccttttttattttttgtattatatatttttcttaaatatgttttattgtcttctctaagcaaaaagttcttaataaacatagtatttctctctgcgtcctatttcattagtgaagacatagttcacctaaaatggcatcctgctctgaatctagactttttagaaatggcatatgtttttgatgatatgtcaacattcaaaattgtcctaattaaattgttgtttaaatgtaatgtcaactctttataaacttaaaaataaacaagtaattaaccactcta

SEQ ID NO: 375906 - DNA, 1639 bp, Homo sapiens
ggctgggcctgcggaagggggcgggttcggaggagtgaactgtgcggttagtgcgcctttcagcctcacctgcagctgcgcctccttgcacctgcgcctgtgctttttctcccagcactgcggacgcgactcgagggtgacgctcgctccgctcgtcccgctcgtcatggcctacccgggatacggaggagggtttggaaattttagcattcaggtgccaggaatgcagatgggacagccagtgccagaaacaggcccagctatactcctcgatggatactctgggccagcatattcagacacttattcctcagctggtgactccgtgtatacttacttcagtgctgttgctggacaggatggtgaagtggatgctgaagaacttcagagatgtttgacacagtctggaattaatggaacttactctcccttcagtttggaaacctgcagaattatgattgccatgttggatagagatcacacaggaaaaatgggatttaatgcattcaaagagctatgggcagctcttaatgcctggaaggaaaacttcatgactgttgatcaagatggaagtggcacagtagaacatcatgagttgcgtcaagccattggtcttatgggttataggttgagtcctcaaacattaactactattgttaaacgttatagcaagaatggcagaattttctttgatgattatgttgcttgctgtgtgaagcttcgagcattgacagtttttgcagggcactatggcaatttgaatgcttagaattttaaacctgaagagacactgtgaattcttttgtttggaagaagtgaactggactactttaaaacttttaagggttttctatgttcttcctacctgttaaacctcttccctttctgtgtgtttttattttagcagatagttcaaagcaataaaagatttcttttttaatttgaggtattactgcttttggaaaagttattttataaatatgtgcatattgtcataaaatattgtatgattaattgatttaaataatgcttagccttaattttagataatgtaaatttagaggaatgtactttacaagatagattgtataagaagccaaataatgaaagcctagaaaaaactaatttatacttatctgaaggttacaaattagacttttaaattttctttgtagttggtggtgtttgagggttggctagaaatgaaagcctggattttgtgccatgtttgtaatatagtttgttccttgatcaaataatcagagaaaagaaacttaaagatctttgtctgtgaagaagaaaattatctccctagttcaatctgtagtgaaataagactacagaaggcattgttttttccttttttattttttgtattatatatttttcttaaatatgttttattgtcttctctaagcaaaaagttcttaataaacatagtatttctctctgcgtcctatttcattagtgaagacatagttcacctaaaatggcatcctgctctgaatctagactttttagaaatggcatatgtttttgatgatatgtcaacattcaaaattgtcctaattaaattgttgtttaaatgtaatgtcaactctttataaacttaaaaataaacaagtaattaaccactcta

SEQ ID NO: 375907 - DNA, 1640 bp, Homo sapiens
ggctgggcctgcggaagggggcgggttcggaggagtgaactgtgcggttagtgcgcctttcagcctcacctgcagctgcgcctccttgcacctgcgcctgtgctttttctcccagcactgcggacgcgactcgagggtgacgctcgctccgctcgtcccgctcgtcatggcctacccgggatacggaggagggtttggaaattttagcattcaggtgccaggaatgcagatgggacagccagtgccagaaacaggcccagctatactcctcgatggatactctgggccagcatattcagacacttattcctcagctggtgactccgtgtatacttacttcagtgctgttgctggacaggatggtgaagtggatgctgaagaacttcagagatgtttgacacagtctggaattaatggaacttactctcccttcagtttggaaacctgcagaattatgattgccatgttggatagagatcacacaggaaaaatgggatttaatgcattcaaagagctatgggcagctcttaatgcctgttgcgtcaagccattggtcttatgggttataggttgagtcctcaaacattaactactattgttaaacgttatagcaagaatggcagaattttctttgatgattatgttgcttgctgtgtgaagcttcgagcattgacagatttctttaggaaaagagaccacttgcaacaagggtctgcgaatttcatatatgacgattttttgcagggcactatggcaatttgaatgcttagaattttaaacctgaagagacactgtgaattcttttgtttggaagaagtgaactggactactttaaaacttttaagggttttctatgttcttcctacctgttaaacctcttccctttctgtgtgtttttattttagcagatagttcaaagcaataaaagatttcttttttaatttgaggtattactgcttttggaaaagttattttataaatatgtgcatattgtcataaaatattgtatgattaattgatttaaataatgcttagccttaattttagataatgtaaatttagaggaatgtactttacaagatagattgtataagaagccaaataatgaaagcctagaaaaaactaatttatacttatctgaaggttacaaattagacttttaaattttctttgtagttggtggtgtttgagggttggctagaaatgaaagcctggattttgtgccatgtttgtaatatagtttgttccttgatcaaataatcagagaaaagaaacttaaagatctttgtctgtgaagaagaaaattatctccctagttcaatctgtagtgaaataagactacagaaggcattgttttttccttttttattttttgtattatatatttttcttaaatatgttttattgtcttctctaagcaaaaagttcttaataaacatagtatttctctctgcgtcctatttcattagtgaagacatagttcacctaaaatggcatcctgctctgaatctagactttttagaaatggcatatgtttttgatgatatgtcaacattcaaaattgtcctaattaaattgttgtttaaatgtaatgtcaactctttataaacttaaaaataaacaagtaattaaccactcta

SEQ ID NO: 375908 - DNA, 1190 bp, Homo sapiens
tttcaaatggttactattaacctgatattcagggttttttaaaattcaaggtataagacagttatatttacctgtgctttaatgtttcagggtttttgttttgtttttcttatatttactgatggaagttatggggtcaacattactgatatttattggcttgaattataagccttggaaacaaacttttctctcttaagaaaatgctcttatggaatataattagtcaaaaataattaaaaaccattttattcttaatagataataatttcacttatgtattagtttttgcagggcactatggcaatttgaatgcttagaattttaaacctgaagagacactgtgaattcttttgtttggaagaagtgaactggactactttaaaacttttaagggttttctatgttcttcctacctgttaaacctcttccctttctgtgtgtttttattttagcagatagttcaaagcaataaaagatttcttttttaatttgaggtattactgcttttggaaaagttattttataaatatgtgcatattgtcataaaatattgtatgattaattgatttaaataatgcttagccttaattttagataatgtaaatttagaggaatgtactttacaagatagattgtataagaagccaaataatgaaagcctagaaaaaactaatttatacttatctgaaggttacaaattagacttttaaattttctttgtagttggtggtgtttgagggttggctagaaatgaaagcctggattttgtgccatgtttgtaatatagtttgttccttgatcaaataatcagagaaaagaaacttaaagatctttgtctgtgaagaagaaaattatctccctagttcaatctgtagtgaaataagactacagaaggcattgttttttccttttttattttttgtattatatatttttcttaaatatgttttattgtcttctctaagcaaaaagttcttaataaacatagtatttctctctgcgtcctatttcattagtgaagacatagttcacctaaaatggcatcctgctctgaatctagactttttagaaatggcatatgtttttgatgatatgtcaacattcaaaattgtcctaattaaattgttgtttaaatgtaatgtcaactctttataaacttaaaaataaacaagtaattaaccactcta

SEQ ID NO: 375909 - DNA, 1204 bp, Homo sapiens
tttctccctttattcactgttaaatctaattagtttaaaggcttcaaatattaaggaatataaatgataaaaacgttatgttatttttggaagtttttctcatatctctgttgccagggctattcaatcacttaatatttaattgaatatgaaattattctttttgtgtacctgggtgcactaaatatttgaaactatgtattttaaattacaataaaaaagtaatttctttgtttaaagatttctttaggaaaagagaccacttgcaacaagggtctgcgaatttcatatatgacgattttttgcagggcactatggcaatttgaatgcttagaattttaaacctgaagagacactgtgaattcttttgtttggaagaagtgaactggactactttaaaacttttaagggttttctatgttcttcctacctgttaaacctcttccctttctgtgtgtttttattttagcagatagttcaaagcaataaaagatttcttttttaatttgaggtattactgcttttggaaaagttattttataaatatgtgcatattgtcataaaatattgtatgattaattgatttaaataatgcttagccttaattttagataatgtaaatttagaggaatgtactttacaagatagattgtataagaagccaaataatgaaagcctagaaaaaactaatttatacttatctgaaggttacaaattagacttttaaattttctttgtagttggtggtgtttgagggttggctagaaatgaaagcctggattttgtgccatgtttgtaatatagtttgttccttgatcaaataatcagagaaaagaaacttaaagatctttgtctgtgaagaagaaaattatctccctagttcaatctgtagtgaaataagactacagaaggcattgttttttccttttttattttttgtattatatatttttcttaaatatgttttattgtcttctctaagcaaaaagttcttaataaacatagtatttctctctgcgtcctatttcattagtgaagacatagttcacctaaaatggcatcctgctctgaatctagactttttagaaatggcatatgtttttgatgatatgtcaacattcaaaattgtcctaattaaattgttgtttaaatgtaatgtcaactctttataaacttaaaaataaacaagtaattaaccactcta

SEQ ID NO: 375910 - DNA, 1117 bp, Homo sapiens
ggctgggcctgcggaagggggcgggttcggaggagtgaactgtgcggttagtgcgcctttcagcctcacctgcagctgcgcctccttgcacctgcgcctgtgctttttctcccagcactgcggacgcgactcgagggtgacgctcgctccgctcgtcccgctcgtcatggcctacccgggatacggaggagggtttggaaattttagcattcaggtgccaggaatgcagatgggacagccagtgccagaaacaggcccagctatactcctcgatggatactctgggccagcatattcagacacttattcctcagctggtgactccgtgtatacttacttcagtgctgttgctggacaggatggtgaagtggatgctgaagaacttcagagatgtttgacacagtctggaattaatggaacttactctcccttcagtttggaaacctgcagaattatgattgccatgttggatagagatcacacaggaaaaatgggatttaatgcattcaaagagctatgggcagctcttaatgcctggaaggaaaacttcatgactgttgatcaagatggaagtggcacagtagaacatcatgagttgcgtcaagccattggtcttatgggtaagaacattaacattctttagaatctataaagctaatctttgttctttgattagatgaacttaattgcttcaatttactaactaataaagggatgtatttttttgccagcaagttcctttgtttgttttcaaggttgtaggtaaattctgaccaaagacctcaacaaaaccattttaattatgatttttttcaaaagatgatcttccatacatgcatacattctgaatttcttctgttgtgtttaaatttatttctttgttagtacttaccagttagattgtattcttttataacttggcaggatatctaattgggagccaaagcttgcctcagtcagtcaaaagtctgtacaaaataggttttcagtggtagaaaccatgtttttgtcttttttttcttagatagtgcagaacacatagcaggtgccaaaatacatcaggatggaaaggttgcattttagagtaatttagaagtatataactttattcttatac

SEQ ID NO: 375911 - DNA, 440 bp, Homo sapiens
tgaacagggagttaccctcggctggtgaatgtaggcaggcctggctgagggtggtgagactgcgagggacaggtgagagatgaagctcagaagacatctttgcagagatgtggagaagacaggaggaagtccttcctaaaataaacctgacctcctgtgggttcccaaacactaacttgtttccctgggaatttggaggtgggttcgaaaaagtgagtaacaataaacagttaactttactgcctcatatttagattgctggtatttatgcagctttgaccaggacctggtaacagatgtggatggacttgaaccaccaactcagcttagaaggaagccaagacttaaagtttcctagatcccagcttgtaagttccctatattctttaatatacaactttcctttaataaaacaaaacaaaaaaatcccccaacaactt

SEQ ID NO: 375912 - DNA, 1996 bp, Homo sapiens
ggctgggcctgcggaagggggcgggttcggaggagtgaactgtgcggttagtgcgcctttcagcctcacctgcagctgcgcctccttgcacctgcgcctgtgctttttctcccagcactgcggacgcgactcgagggtgacgctcgctccgctcgtcccgctcgtcatggcctacccgggatacggaggagggtttggaaattttagcattcaggtgccaggaatgcagatgggacagccagtgccagaaacaggcccagctatactcctcgatggatactctgggccagcatattcagacacttattcctcagctggtgactccgtgtatacttacttcagtgctgttgctggacaggatggtgaagtggatgctgaagaacttcagagatgtttgacacagtctggaattaatggaacttactctcccttcagtttggaaacctgcagaattatgattgccatgttggatagagatcacacaggaaaaatgggatttaatgcattcaaagagctatgggcagctcttaatgcctggaaggaaaacttcatgactgttgatcaagatggaagtggcacagtagaacatcatgagttgcgtcaagccattggtcttatgggttataggttgagtcctcaaacattaactactattgttaaacgttatagcaagaatggcagaattttctttgatgattatgttgcttgctgtgtgaagcttcgagcattgacagatttctttaggaaaagagaccacttgcaacaagggtctgcgaatttcatatatgacgattttttgcagggcactatggcaatttgaatgcttagaattttaaacctgaagagacactgtgaattcttttgtttggaagaagtgaactggactactttaaaacttttaagggttttctatgttcttcctacctgttaaacctcttccctttctgtgtgtttttattttagcagatagttcaaagcaataaaagatttcttttttaatttgaggtattactgcttttggaaaagttattttataaatatgtgcatattgtcataaaatattgtatgattaattgatttaaataatgcttagccttaattttagataatgtaaatttagaggaatgtactttacaagatagattgtataagaagccaaataatgaaagcctagaaaaaactaatttatacttatctgaaggttacaaattagacttttaaattttctttgtagttggtggtgtttgagggttggctagaaatgaaagcctggattttgtgccatgtttgtaatatagtttgttccttgatcaaataatcagagaaaagaaacttaaagatctttgtctgtgaagaagaaaattatctccctagttcaatctgtagtgaaataagactacagaaggcattgttttttccttttttattttttgtattatatatttttcttaaatatgttttattgtcttctctaagcaaaaagttcttaataaacatagtatttctctctgcgtcctatttcattagtgaagacatagttcacctaaaatggcatcctgctctgaatctagactttttagaaatggcatatgtttttgatgatatgtcaacattcaaaattgtcctaattaaattgttgtttaaatgtaatgtcaactctttataaacttaaaaataaacaagtaattaaccactctaattgttcagaaattttacatttgacttatttgacaacattaacattagtggtggctttgccattaaaaacccagtaagtattttgagtgcatctatgtgatgtggtgttttgagcatagtaggcaccacagcaacttttctgcgtggtactaaaactgccgaaaatgcgacgtagaatcaccagatctttagtgtttaatatccctggtataagatgttataattaatgtaatttctttcttggcaaacacctcatgtctgtcttagtgaagatttaataaaccacttatttttctta

SEQ ID NO: 375913 - DNA, 2347 bp, Homo sapiens
tccgctgcccacttagagaagcagggtctaccgctctgtgcctgacaatgacgaggttgtccacagggctctcaggccggcgcgcggggctgcactcgcacctgggcaggtgggcaggcgggcaggtgggcagcggggcggcgcgcggggccgcggcaggcaggtgcggccggcaggcgcggcactttggactctgcggtgtgcgcctggggtcccggaccggggcgatcctgctgcacactcgggtaggagctttgagtccagctttctgtcaggcagttcttacagagtttgcctgactttggtttctgtttcgattctcttctcaggactttgtaaacgtaatctgcctggcggggagggagtttcctcagggagacgccaccttttggtcggggcgggtgaagagaggaggcctttggttaaggacaccgcgggaaacagaaaaggaaagcgaattctctctgacaccaagaccaacgctctagcaaagctcctccggcggatattttgttttcccagcaggttctgccttaacaataaggtcctttgtaggccaaaatgtgcagggcataaaagcatgtgatttgggactttccaaaggggaagtgaacagaaactgccacagacccggacgtgaacagggagttaccctcggctggtgaatgtaggcaggcctggctgagggtggtgagactgcgagggacaggtgagagatgaagctcagaagacatctttgcagagatgtggagaagacaggaggaagtccttcctaaaataaacctgacctcctgtgggttcccaaacactaacttgtttccctgggaatttggaggtgggtttttggaaattttagcattcaggtgccaggaatgcagatgggacagccagtgccagaaacaggcccagctatactcctcgatggatactctgggccagcatattcagacacttattcctcagctggtgactccgtgtatacttacttcagtgctgttgctggacaggatggtgaagtggatgctgaagaacttcagagatgtttgacacagtctggaattaatggaacttactctcccttcagtttggaaacctgcagaattatgattgccatgttggatagagatcacacaggaaaaatgggatttaatgcattcaaagagctatgggcagctcttaatgcctggaaggaaaacttcatgactgttgatcaagatggaagtggcacagtagaacatcatgagttgcgtcaagccattggtcttatgggttataggttgagtcctcaaacattaactactattgttaaacgttatagcaagaatggcagaattttctttgatgattatgttgcttgctgtgtgaagcttcgagcattgacagatttctttaggaaaagagaccacttgcaacaagggtctgcgaatttcatatatgacgattttttgcagggcactatggcaatttgaatgcttagaattttaaacctgaagagacactgtgaattcttttgtttggaagaagtgaactggactactttaaaacttttaagggttttctatgttcttcctacctgttaaacctcttccctttctgtgtgtttttattttagcagatagttcaaagcaataaaagatttcttttttaatttgaggtattactgcttttggaaaagttattttataaatatgtgcatattgtcataaaatattgtatgattaattgatttaaataatgcttagccttaattttagataatgtaaatttagaggaatgtactttacaagatagattgtataagaagccaaataatgaaagcctagaaaaaactaatttatacttatctgaaggttacaaattagacttttaaattttctttgtagttggtggtgtttgagggttggctagaaatgaaagcctggattttgtgccatgtttgtaatatagtttgttccttgatcaaataatcagagaaaagaaacttaaagatctttgtctgtgaagaagaaaattatctccctagttcaatctgtagtgaaataagactacagaaggcattgttttttccttttttattttttgtattatatatttttcttaaatatgttttattgtcttctctaagcaaaaagttcttaataaacatagtatttctctctgcgtcctatttcattagtgaagacatagttcacctaaaatggcatcctgctctgaatctagactttttagaaatggcatatgtttttgatgatatgtcaacattcaaaattgtcctaattaaattgttgtttaaatgtaatgtcaactctttataaacttaaaaataaacaagtaattaaccactcta

SEQ ID NO: 375914 - DNA, 1650 bp, Homo sapiens
gcgtccgcgcctggtactcggcggcgccggattccggggctgttgggggccaggcctgggcgagcattgatcctgggctgacttggagccgcaggttttctggtcgttgaggaccctcgaggagcgtcctggtggagccgagggatttggaaattttagcattcaggtgccaggaatgcagatgggacagccagtgccagaaacaggcccagctatactcctcgatggatactctgggccagcatattcagacacttattcctcagctggtgactccgtgtatacttacttcagtgctgttgctggacaggatggtgaagtggatgctgaagaacttcagagatgtttgacacagtctggaattaatggaacttactctcccttcagtttggaaacctgcagaattatgattgccatgttggatagagatcacacaggaaaaatgggatttaatgcattcaaagagctatgggcagctcttaatgcctggaaggaaaacttcatgactgttgatcaagatggaagtggcacagtagaacatcatgagttgcgtcaagccattggtcttatgggttataggttgagtcctcaaacattaactactattgttaaacgttatagcaagaatggcagaattttctttgatgattatgttgcttgctgtgtgaagcttcgagcattgacagatttctttaggaaaagagaccacttgcaacaagggtctgcgaatttcatatatgacgattttttgcagggcactatggcaatttgaatgcttagaattttaaacctgaagagacactgtgaattcttttgtttggaagaagtgaactggactactttaaaacttttaagggttttctatgttcttcctacctgttaaacctcttccctttctgtgtgtttttattttagcagatagttcaaagcaataaaagatttcttttttaatttgaggtattactgcttttggaaaagttattttataaatatgtgcatattgtcataaaatattgtatgattaattgatttaaataatgcttagccttaattttagataatgtaaatttagaggaatgtactttacaagatagattgtataagaagccaaataatgaaagcctagaaaaaactaatttatacttatctgaaggttacaaattagacttttaaattttctttgtagttggtggtgtttgagggttggctagaaatgaaagcctggattttgtgccatgtttgtaatatagtttgttccttgatcaaataatcagagaaaagaaacttaaagatctttgtctgtgaagaagaaaattatctccctagttcaatctgtagtgaaataagactacagaaggcattgttttttccttttttattttttgtattatatatttttcttaaatatgttttattgtcttctctaagcaaaaagttcttaataaacatagtatttctctctgcgtcctatttcattagtgaagacatagttcacctaaaatggcatcctgctctgaatctagactttttagaaatggcatatgtttttgatgatatgtcaacattcaaaattgtcctaattaaattgttgtttaaatgtaatgtcaactctttataaacttaaaaataaacaagtaattaaccactcta

SEQ ID NO: 375915 - DNA, 1590 bp, Homo sapiens
ggctgggcctgcggaagggggcgggttcggaggagtgaactgtgcggttagtgcgcctttcagcctcacctgcagctgcgcctccttgcacctgcgcctgtgctttttctcccagcactgcggacgcgactcgagggtgacgctcgctccgctcgtcccgctcgtcatggcctacccgggatacggaggagggagccagtgccagaaacaggcccagctatactcctcgatggatactctgggccagcatattcagacacttattcctcagctggtgactccgtgtatacttacttcagtgctgttgctggacaggatggtgaagtggatgctgaagaacttcagagatgtttgacacagtctggaattaatggaacttactctcccttcagtttggaaacctgcagaattatgattgccatgttggatgaaggaaaacttcatgactgttgatcaagatggaagtggcacagtagaacatcatgagttgcgtcaagccattggtcttatgggttataggttgagtcctcaaacattaactactattgttaaacgttatagcaagaatggcagaattttctttgatgattatgttgcttgctgtgtgaagcttcgagcattgacagatttctttaggaaaagagaccacttgcaacaagggtctgcgaatttcatatatgacgattttttgcagggcactatggcaatttgaatgcttagaattttaaacctgaagagacactgtgaattcttttgtttggaagaagtgaactggactactttaaaacttttaagggttttctatgttcttcctacctgttaaacctcttccctttctgtgtgtttttattttagcagatagttcaaagcaataaaagatttcttttttaatttgaggtattactgcttttggaaaagttattttataaatatgtgcatattgtcataaaatattgtatgattaattgatttaaataatgcttagccttaattttagataatgtaaatttagaggaatgtactttacaagatagattgtataagaagccaaataatgaaagcctagaaaaaactaatttatacttatctgaaggttacaaattagacttttaaattttctttgtagttggtggtgtttgagggttggctagaaatgaaagcctggattttgtgccatgtttgtaatatagtttgttccttgatcaaataatcagagaaaagaaacttaaagatctttgtctgtgaagaagaaaattatctccctagttcaatctgtagtgaaataagactacagaaggcattgttttttccttttttattttttgtattatatatttttcttaaatatgttttattgtcttctctaagcaaaaagttcttaataaacatagtatttctctctgcgtcctatttcattagtgaagacatagttcacctaaaatggcatcctgctctgaatctagactttttagaaatggcatatgtttttgatgatatgtcaacattcaaaattgtcctaattaaattgttgtttaaatgtaatgtcaactctttataaacttaaaaataaacaagtaattaaccactcta

SEQ ID NO: 375916 - DNA, 1393 bp, Homo sapiens
ggctgggcctgcggaagggggcgggttcggaggagtgaactgtgcggttagtgcgcctttcagcctcacctgcagctgcgcctccttgcacctgcgcctgtgctttttctcccagcactgcggacgcgactcgagggtgacgctcgctccgctcgtcccgctcgtcatggcctacccgggatacggaggagggtttggaaattttagcattcaggtgccaggaatgcagatgggacagccagtgccagaaacaggcccagctatactcctcgatggatactctgggccagcatattcagacacttattcctcagctggtgactccgtgtatacttacttcagtgctgttgctggacaggatggtgaagtggatgctgaagaacttcagagatgtttgacacagtctggaattaatggaacttactctcccttcagtttggaaacctgcagaattatgattgccatgttggatgtatccttgaatagaaatagaaaatactagaataaagagtaattgctttctgactatcaagccagtggttagatttcagtgcctgtagtaaactagtgaatttaaaaatactttgtaagatcctgtttaaattctaggctttctagtttttatgcagaagtctgttcatataatgagtttggctaagtctacagaagcatactcatgttttagtcaatgatttagagtcagataaactcaggtatcagaatttatttttgttaataaaactatcagagagatcacacaggaaaaatgggatttaatgcattcaaagagctatgggcagctcttaatgcctggaaggaaaacttcatgactgttgatcaagatggaagtggcacagtagaacatcatgagttgcgtcaagccattggtcttatgggtaagaacattaacattctttagaatctataaagctaatctttgttctttgattagatgaacttaattgcttcaatttactaactaataaagggatgtatttttttgccagcaagttcctttgtttgttttcaaggttgtaggtaaattctgaccaaagacctcaacaaaaccattttaattatgatttttttcaaaagatgatcttccatacatgcatacattctgaatttcttctgttgtgtttaaatttatttctttgttagtacttaccagttagattgtattcttttataacttggcaggatatctaattgggagccaaagcttgcctcagtcagtcaaaagtctgtacaaaataggttttcagtggtagaaaccatgtttttgtcttttttttcttagatagtgcagaacacatagcaggtgccaaaatacatcaggatggaaaggttgcattttagagtaatttagaagtatataactttattcttatac

SEQ ID NO: 375917 - DNA, 166 bp, Homo sapiens
gcggccgcctactactactactactactactgctcgaattcaagcttctaacgatgtacggggacatgttgttaagcctcacacaggtgtgctagcattgaactgtagagtgtcacatacctgagtttgaaaataaaagcacatttccaaacctcaaaaaaaaaaa

SEQ ID NO: 375918 - DNA, 6062 bp, Homo sapiens
cctctgactttgtaaacaaagccagagagccggaggaaatgaaattccaaatgccctctcctagcctggtttgacctccggtgttgatgcaaactcaagccggctctcactgtggcttgtggctccgggaaatggaacccagcttgggacagggaatggatttgacttgtccttttggcgtctccccagcctgtggagcccaggcctcttggagcatctttggggctgacgcagcggaggttccgggcacacgtggccactcccagcaggagggtgccatgccccacattcccgaggacgaggagccccccggagagtcacaggcagcccagagccctgccggccaagggtcctcctaccgcaggagtatcttgcagtccaactcccacgattgtcctgactggggatgccacttcaccagaaggagaaaccgacaaaaacctggccaacagagttcacagtccccacaagaggctttctcaccgacacttgaaggtgtccactgcctccctgacatctgtggaccccgcggggcacatcattgacctggtgaatgaccagctgccagacatcagcatctcagaggaggacaagaagaaaaacctggcgctgctggaagaagccaagttggtgagtgagcgattcctgacccgccgtgggaggaagtccaggagcagccccggagactccccatcagctgtttccccgaacctcagccccagcgcttctcctacatcctctcgaagcaactcacttacagtccccaccccgccagaagggggatgaagccgacgtctcttcacctcaccctggcgagcctaacgtcccaaagggcctagctgacaggaagcagaatgaccagaggaaagtgtctcagggcaggctggctcctcgtcctcctccagttgagaagtccaaagagattgcaatagaacaaaaggaaaacttcgatcccctccagtaccccgagaccacacccaaaggcctagctcctgttacaaacagcagtgggaaaatggccctgaacagccctcagcctggccccgtggagagcgagctggggaagcagctcttgaaaacgggctgggagggcagccctctgccgagaagtccaacccaggatgcggcaggagtgggtcccccagcctcccaggggagaggcccagctggagagccgatggggcccgaggctggctccaaagctgagcttccacccactgtgtcccggcccccgctgctgcgagggctttcctgggacagtggccctgaagaacctggcccccggctgcagaaagtgcttgccaagctgccactggcagaggaagaaaagcgttttgcaggcaaggccggcggcaagctggccaaggcccctggtctcaaagactttcagatacaagtgcagcccgtgcggatgcagaaactgaccaagctccgagaggagcacatcctgatgagaaatcagaacttagtggggctcaagcttccagaccttagtgaagcagctgagcaggaaaaagggcttccttctgaactctccccagctattgaggaagaagagtcaaagagtggcttagatgtcatgcctaatatttctgatgtgctgctgcgcaaactgcgggtccacaggagtctccctggaagtgcccctccactcactgaaaaggaagttgagaacgtgtttgtgcaactgtccttggcctttagaaatgacagctacactctggaatctagaattaaccaggctgaaagggaacgcaacctgacagaggagaacactgagaaagaactggaaaacttcaaagcttccattacgtcctcagcttcactctggcaccactgtgagcaccgggaaacctaccagaagttgctggaggacatcgctgtcctgcaccgcctggctgcccgcctctccagccgagctgaggtggtaggcgccgtccgccaggaaaagcgcatgtcgaaagcaacggaagtgatgatgcagtatgtggagaatctaaagaggacgtatgagaaggaccatgcggagctcatggagtttaaaaagcttgcaaatcagaattcaagccgcagctgtggcccctctgaagatggggtccctcgcacggcacggtccatgtccctcacgctgggaaagaatatgcctcgccggagggtcagcgttgctgtggttcctaagtttaatgccctgaatctgcctggccaaactcccagctcatcatccattccctccttaccagccttgtcggaatcacccaatgggaaaggcagcctacctgtcacttcagcactgcctgcacttttggaaaatggaaagacaaatggggacccagattgtgaagcctctgctcctgcgctgaccctgagctgcctggaggagcttagtcaggagaccaaggccaggatggaggaagaagcctacagcaagggattccaagaaggtctaaagaagaccaaagaacttcaagacctgaaggaggaggaggaagaacagaagagtgagagtcctgaggaacctgaagaggtagaagaaactgaggaagaggaaaagggcccaagaagcagcaaacttgaagaattggtccatttcttacaagtcatgtatcccaaactgtgtcagcactggcaagtgatctggatgatggctgcagtgatgctggtcttgactgttgtgctggggctctacaattcctataactcttgtgcagagcaggctgatgggccccttggaagatccacttgctcggcagcccagagggactcctggtggagctcaggactccagcatgagcagcctacagagcagtaggaaacctcacacctagccagtgccctgctctgagacactcagactaccaccctttccccaagtataacgtcaggcccaagtgtggacacactgccgcccatcccatcaggtcatgaggaagggttcttttaacactcggcacttctgtgggagctattcatacacagtgacttgatgttcttggaggatcaacaaaactgccctgggaaagcatccagtggatgaagaagtcaccttcaccaaggaactctattggaagggaaggtctcctgcccctagctcaggtggctggggagaactaaaacaccttcactggtggttgggggtaaggagcggggcacgggggaggaggaggtagggggcagtaaaaaacttactctcttttttcctctctgtaattggttatcaggaagaatttgcttaatgactaacaccctaagcatcagacctggaatttggagttgcaaagtgactatcttcccatttcccatctcattttcaataacttcagcctcccattctttcctttggaatgagagtttctttttacagaagtaggaaaggcttctcagaaaaaaaaaaaaaaagtataggctgaatttagctcagtgcttgaaatgggaagatatgaattattatatacgcatctgtccacacatacacacatactgttgtgtacacacacacaacatgcctgtgcacagagccaacaacccttcaaaagtgtgctctgggtgtgtacctctggataaataagatgcatgccaagccaacccacagattttcaccagtgtggggcagtcaccaggcacctgttcaatgagctgtccacatggattgaagatgttttaaaaacacagaaaactcatggcttcaatggcagacttactagtctccatttcaaatgccaactctgagctgctgtacagcacaatctattccctattctctctttgaaaacagttaacccacctcacaggtgaatgaggagagaagatgtgctttctgcttcagtctcttactctgtgtgtgaccacatgcaagagtaaacttgcacctcagtgcttcagttcaaatggggtttccaaccccagtataattaggggtgtttcagagcatccccagttatttagcacaacactgaaggagcacatcccctctccattttgacttctctccccacttttacagccactgccttcatcagttttgtagaggtttgatttccatgtgggttttgttgtcattgttttgcatttttgttttgttattgatattgtttgctttcattgctaaaactcatatacgacttactatgagccaagcactgttctcagtattacataggtatgaattcatttaagtcctgaagaaaaagaaaaaaaaatacgaagtggatattacccttcccattttcaaataaggaaactgaagcacaaaaagaacaagtaacttgacaaggacaccccggtagtaaatcatggggctggagctcaaccccagggtaggctggctccagagctgtgctctccttgactcttctgatggtctcctagctggaagcctcacatttcagtctcattcccccaagtggcccatcagctactccatctctggctccccaactaaacagtttctctcatagtgctggacctccactcactagttttttttccagctgttcttctcttttcttcaggtcactcttctcgaccgagtgcaaaaattatcccctccataccagctttgatgaccttccttccatactcctcaccagacacaacataataggtcacacactcctctgtgctttctggcacgttttaaacattattattattgacctttacctatagtataccatggcctatttatgtatccatctcccctagcatttttcctcaaagacaagaaccatgtcttacccatctcttgggtaagtgcctagcatggtggctgacgcttgggagggtgtcattaaatgttgctcaaaagaacaagcaaacatttaaggtggtggagagcagcctggggacagctgacatgctgcatgcttctcagtaccagcaccatcacaatgcaaaaagcaacatctttcttaacctcagcttattctgtttttcagtctactctgtgagagagcaggaatgagaccagactagcaacaccattgccaagctcaaggactgggctcaatgcagtcactccttcagagagaccccccaccccaagcatgccccactttaaaatagcatgtttattgaagggggcatcctttacagtagctagaaaatgactgaggcccaagccagggttgatcaaggatgtgccattaaggtaaagagttacagagcagggcagagggactctgggggcagaagtggatgatttgcccggcctcttccagggggtctggatacaactgaaggagctttagctacatgaggccctcagagccaaagacaggatgcaaatagagttctagagagtggccgtggaagcagaactccaggtggggaatgttcaatctctgcctcccttaaagcagggccaggctcagctggccccattgttcacttggtcacaagtttcctacctttgtttctggatgagtcaaaggccaggaaggcagttatggagagctcctgcacctccagctgccccacagaaaagcctgcaagagtacttccaggcacaggccctctcccaccctattccatttgtaagcaagggaggtcgaggaaaaggacatctccaaaagggagcataagaatagccatatatacaggggctgaaaaagtgctcatgagtccatcttttctggaaagcaaagaccagcctgaagcagtgggagctgctgcccaagcggtagtgaactggagagaaacaggccctggattttcagtgaggatgtggatctgaagagtcccccaaatgcctctgaagtctgacatctctgcttagccctaggagtctggttccctgccttcagttgcagagtgatgtgtttgtgtcattgttgatgtcacctcctaaaaagaccttcactttctggctgccacaaagccatatgtgttgctccccatatacagcctgacagagtaaatggagaggaagtgctggatttgtgtatcactggctatcagttcctcatgttgttaagcctcacacaggtgtgctagcattgaactgtagagtgtcacatacctgagtttgaaaataaaagcacatttccaaacctcaaaaaaaaaaa

SEQ ID NO: 375919 - DNA, 6169 bp, Homo sapiens
tggcgctggcccagggtcttctccaggctcacatgcttgctggaggctccaggcgggtggggagatctgcagggtccctttgttcccgtccggccaggacagtgtccagtggcacgagttgccatggggactgccatctgctgtgtggatacccatcggaggggcccagggtgagcgactgccccaaaggcccagcctgccctgagccctgaggccagctggtcggctttccctgccattatcccccgagccaggccggagtggggctcccagaggagctctcggctctaagtcccagcccctctcagaggaggcgtgcggccgaggttctgcagccagaggcttctcggctctgagctccggagccagatgtaacattgaccttaaatggtaaaagctccccagagtgaagggaggctggccagaggaggaaaggagaataactcagttttaggggtcctcctaccgcaggagtatcttgcagtccaactcccacgattgtcctgactggggatgccacttcaccagaaggagaaaccgacaaaaacctggccaacagagttcacagtccccacaagaggctttctcaccgacacttgaaggtgtccactgcctccctgacatctgtggaccccgcggggcacatcattgacctggtgaatgaccagctgccagacatcagcatctcagaggaggacaagaagaaaaacctggcgctgctggaagaagccaagttggtgagtgagcgattcctgacccgccgtgggaggaagtccaggagcagccccggagactccccatcagctgtttccccgaacctcagccccagcgcttctcctacatcctctcgaagcaactcacttacagtccccaccccgccagaagggggatgaagccgacgtctcttcacctcaccctggcgagcctaacgtcccaaagggcctagctgacaggaagcagaatgaccagaggaaagtgtctcagggcaggctggctcctcgtcctcctccagttgagaagtccaaagagattgcaatagaacaaaaggaaaacttcgatcccctccagtaccccgagaccacacccaaaggcctagctcctgttacaaacagcagtgggaaaatggccctgaacagccctcagcctggccccgtggagagcgagctggggaagcagctcttgaaaacgggctgggagggcagccctctgccgagaagtccaacccaggatgcggcaggagtgggtcccccagcctcccaggggagaggcccagctggagagccgatggggcccgaggctggctccaaagctgagcttccacccactgtgtcccggcccccgctgctgcgagggctttcctgggacagtggccctgaagaacctggcccccggctgcagaaagtgcttgccaagctgccactggcagaggaagaaaagcgttttgcaggcaaggccggcggcaagctggccaaggcccctggtctcaaagactttcagatacaagtgcagcccgtgcggatgcagaaactgaccaagctccgagaggagcacatcctgatgagaaatcagaacttagtggggctcaagcttccagaccttagtgaagcagctgagcaggaaaaagggcttccttctgaactctccccagctattgaggaagaagagtcaaagagtggcttagatgtcatgcctaatatttctgatgtgctgctgcgcaaactgcgggtccacaggagtctccctggaagtgcccctccactcactgaaaaggaagttgagaacgtgtttgtgcaactgtccttggcctttagaaatgacagctacactctggaatctagaattaaccaggctgaaagggaacgcaacctgacagaggagaacactgagaaagaactggaaaacttcaaagcttccattacgtcctcagcttcactctggcaccactgtgagcaccgggaaacctaccagaagttgctggaggacatcgctgtcctgcaccgcctggctgcccgcctctccagccgagctgaggtggtaggcgccgtccgccaggaaaagcgcatgtcgaaagcaacggaagtgatgatgcagtatgtggagaatctaaagaggacgtatgagaaggaccatgcggagctcatggagtttaaaaagcttgcaaatcagaattcaagccgcagctgtggcccctctgaagatggggtccctcgcacggcacggtccatgtccctcacgctgggaaagaatatgcctcgccggagggtcagcgttgctgtggttcctaagtttaatgccctgaatctgcctggccaaactcccagctcatcatccattccctccttaccagccttgtcggaatcacccaatgggaaaggcagcctacctgtcacttcagcactgcctgcacttttggaaaatggaaagacaaatggggacccagattgtgaagcctctgctcctgcgctgaccctgagctgcctggaggagcttagtcaggagaccaaggccaggatggaggaagaagcctacagcaagggattccaagaaggtctaaagaagaccaaagaacttcaagacctgaaggaggaggaggaagaacagaagagtgagagtcctgaggaacctgaagaggtagaagaaactgaggaagaggaaaagggcccaagaagcagcaaacttgaagaattggtccatttcttacaagtcatgtatcccaaactgtgtcagcactggcaagtgatctggatgatggctgcagtgatgctggtcttgactgttgtgctggggctctacaattcctataactcttgtgcagagcaggctgatgggccccttggaagatccacttgctcggcagcccagagggactcctggtggagctcaggactccagcatgagcagcctacagagcagtaggaaacctcacacctagccagtgccctgctctgagacactcagactaccaccctttccccaagtataacgtcaggcccaagtgtggacacactgccgcccatcccatcaggtcatgaggaagggttcttttaacactcggcacttctgtgggagctattcatacacagtgacttgatgttcttggaggatcaacaaaactgccctgggaaagcatccagtggatgaagaagtcaccttcaccaaggaactctattggaagggaaggtctcctgcccctagctcaggtggctggggagaactaaaacaccttcactggtggttgggggtaaggagcggggcacgggggaggaggaggtagggggcagtaaaaaacttactctcttttttcctctctgtaattggttatcaggaagaatttgcttaatgactaacaccctaagcatcagacctggaatttggagttgcaaagtgactatcttcccatttcccatctcattttcaataacttcagcctcccattctttcctttggaatgagagtttctttttacagaagtaggaaaggcttctcagaaaaaaaaaaaaaaagtataggctgaatttagctcagtgcttgaaatgggaagatatgaattattatatacgcatctgtccacacatacacacatactgttgtgtacacacacacaacatgcctgtgcacagagccaacaacccttcaaaagtgtgctctgggtgtgtacctctggataaataagatgcatgccaagccaacccacagattttcaccagtgtggggcagtcaccaggcacctgttcaatgagctgtccacatggattgaagatgttttaaaaacacagaaaactcatggcttcaatggcagacttactagtctccatttcaaatgccaactctgagctgctgtacagcacaatctattccctattctctctttgaaaacagttaacccacctcacaggtgaatgaggagagaagatgtgctttctgcttcagtctcttactctgtgtgtgaccacatgcaagagtaaacttgcacctcagtgcttcagttcaaatggggtttccaaccccagtataattaggggtgtttcagagcatccccagttatttagcacaacactgaaggagcacatcccctctccattttgacttctctccccacttttacagccactgccttcatcagttttgtagaggtttgatttccatgtgggttttgttgtcattgttttgcatttttgttttgttattgatattgtttgctttcattgctaaaactcatatacgacttactatgagccaagcactgttctcagtattacataggtatgaattcatttaagtcctgaagaaaaagaaaaaaaaatacgaagtggatattacccttcccattttcaaataaggaaactgaagcacaaaaagaacaagtaacttgacaaggacaccccggtagtaaatcatggggctggagctcaaccccagggtaggctggctccagagctgtgctctccttgactcttctgatggtctcctagctggaagcctcacatttcagtctcattcccccaagtggcccatcagctactccatctctggctccccaactaaacagtttctctcatagtgctggacctccactcactagttttttttccagctgttcttctcttttcttcaggtcactcttctcgaccgagtgcaaaaattatcccctccataccagctttgatgaccttccttccatactcctcaccagacacaacataataggtcacacactcctctgtgctttctggcacgttttaaacattattattattgacctttacctatagtataccatggcctatttatgtatccatctcccctagcatttttcctcaaagacaagaaccatgtcttacccatctcttgggtaagtgcctagcatggtggctgacgcttgggagggtgtcattaaatgttgctcaaaagaacaagcaaacatttaaggtggtggagagcagcctggggacagctgacatgctgcatgcttctcagtaccagcaccatcacaatgcaaaaagcaacatctttcttaacctcagcttattctgtttttcagtctactctgtgagagagcaggaatgagaccagactagcaacaccattgccaagctcaaggactgggctcaatgcagtcactccttcagagagaccccccaccccaagcatgccccactttaaaatagcatgtttattgaagggggcatcctttacagtagctagaaaatgactgaggcccaagccagggttgatcaaggatgtgccattaaggtaaagagttacagagcagggcagagggactctgggggcagaagtggatgatttgcccggcctcttccagggggtctggatacaactgaaggagctttagctacatgaggccctcagagccaaagacaggatgcaaatagagttctagagagtggccgtggaagcagaactccaggtggggaatgttcaatctctgcctcccttaaagcagggccaggctcagctggccccattgttcacttggtcacaagtttcctacctttgtttctggatgagtcaaaggccaggaaggcagttatggagagctcctgcacctccagctgccccacagaaaagcctgcaagagtacttccaggcacaggccctctcccaccctattccatttgtaagcaagggaggtcgaggaaaaggacatctccaaaagggagcataagaatagccatatatacaggggctgaaaaagtgctcatgagtccatcttttctggaaagcaaagaccagcctgaagcagtgggagctgctgcccaagcggtagtgaactggagagaaacaggccctggattttcagtgaggatgtggatctgaagagtcccccaaatgcctctgaagtctgacatctctgcttagccctaggagtctggttccctgccttcagttgcagagtgatgtgtttgtgtcattgttgatgtcacctcctaaaaagaccttcactttctggctgccacaaagccatatgtgttgctccccatatacagcctgacagagtaaatggagaggaagtgctggatttgtgtatcactggctatcagttcctcatgttgttaagcctcacacaggtgtgctagcattgaactgtagagtgtcacatacctgagtttgaaaataaaagcacatttccaaacctcaaaaaaaaaaa

SEQ ID NO: 375920 - DNA, 6485 bp, Homo sapiens
tggcgctggcccagggtcttctccaggctcacatgcttgctggaggctccaggcgggtggggagatctgcagggtccctttgttcccgtccggccaggacagtgtccagtggcacgagttgccatggggactgccatctgctgtgtggatacccatcggaggggcccagggtgagcgactgccccaaaggcccagcctgccctgagccctgaggccagctggtcggctttccctgccattatcccccgagccaggccggagtggggctcccagaggagctctcggctctaagtcccagcccctctcagaggaggcgtgcggccgaggttctgcagccagaggcttctcggctctgagctccggagccagatgtaacattgaccttaaatggtaaaagctccccagagtgaagggaggctggccagaggaggaaaggagaataactcagttttagacagggtctcgcactgtcacccaggctggagtgcagtggtgcaaccccacctcccgggttcaagcaattctcatgcctcagcctcccaagtagctgggattacagcctgtggagcccaggcctcttggagcatctttggggctgacgcagcggaggttccgggcacacgtggccactcccagcaggagggtgccatgccccacattcccgaggacgaggagccccccggagagtcacaggcagcccagagccctgccggccaagggtcctcctaccgcaggagtatcttgcagtccaactcccacgattgtcctgactggggatgccacttcaccagaaggagaaaccgacaaaaacctggccaacagagttcacagtccccacaagaggctttctcaccgacacttgaaggtgtccactgcctccctgacatctgtggaccccgcggggcacatcattgacctggtgaatgaccagctgccagacatcagcatctcagaggaggacaagaagaaaaacctggcgctgctggaagaagccaagttggtgagtgagcgattcctgacccgccgtgggaggaagtccaggagcagccccggagactccccatcagctgtttccccgaacctcagccccagcgcttctcctacatcctctcgaagcaactcacttacagtccccaccccgccaggtttggatgtgtgcagtggcccgccatcccctctgcctggagcaccaccacagaagggggatgaagccgacgtctcttcacctcaccctggcgagcctaacgtcccaaagggcctagctgacaggaagcagaatgaccagaggaaagtgtctcagggcaggctggctcctcgtcctcctccagttgagaagtccaaagagattgcaatagaacaaaaggaaaacttcgatcccctccagtaccccgagaccacacccaaaggcctagctcctgttacaaacagcagtgggaaaatggccctgaacagccctcagcctggccccgtggagagcgagctggggaagcagctcttgaaaacgggctgggagggcagccctctgccgagaagtccaacccaggatgcggcaggagtgggtcccccagcctcccaggggagaggcccagctggagagccgatggggcccgaggctggctccaaagctgagcttccacccactgtgtcccggcccccgctgctgcgagggctttcctgggacagtggccctgaagaacctggcccccggctgcagaaagtgcttgccaagctgccactggcagaggaagaaaagcgttttgcaggcaaggccggcggcaagctggccaaggcccctggtctcaaagactttcagatacaagtgcagcccgtgcggatgcagaaactgaccaagctccgagaggagcacatcctgatgagaaatcagaacttagtggggctcaagcttccagaccttagtgaagcagctgagcaggaaaaagggcttccttctgaactctccccagctattgaggaagaagagtcaaagagtggcttagatgtcatgcctaatatttctgatgtgctgctgcgcaaactgcgggtccacaggagtctccctggaagtgcccctccactcactgaaaaggaagttgagaacgtgtttgtgcaactgtccttggcctttagaaatgacagctacactctggaatctagaattaaccaggctgaaagggaacgcaacctgacagaggagaacactgagaaagaactggaaaacttcaaagcttccattacgtcctcagcttcactctggcaccactgtgagcaccgggaaacctaccagaagttgctggaggacatcgctgtcctgcaccgcctggctgcccgcctctccagccgagctgaggtggtaggcgccgtccgccaggaaaagcgcatgtcgaaagcaacggaagtgatgatgcagtatgtggagaatctaaagaggacgtatgagaaggaccatgcggagctcatggagtttaaaaagcttgcaaatcagaattcaagccgcagctgtggcccctctgaagatggggtccctcgcacggcacggtccatgtccctcacgctgggaaagaatatgcctcgccggagggtcagcgttgctgtggttcctaagtttaatgccctgaatctgcctggccaaactcccagctcatcatccattccctccttaccagccttgtcggaatcacccaatgggaaaggcagcctacctgtcacttcagcactgcctgcacttttggaaaatggaaagacaaatggggacccagattgtgaagcctctgctcctgcgctgaccctgagctgcctggaggagcttagtcaggagaccaaggccaggatggaggaagaagcctacagcaagggattccaagaaggtctaaagaagaccaaagaacttcaagacctgaaggaggaggaggaagaacagaagagtgagagtcctgaggaacctgaagaggtagaagaaactgaggaagaggaaaagggcccaagaagcagcaaacttgaagaattggtccatttcttacaagtcatgtatcccaaactgtgtcagcactggcaagtgatctggatgatggctgcagtgatgctggtcttgactgttgtgctggggctctacaattcctataactcttgtgcagagcaggctgatgggccccttggaagatccacttgctcggcagcccagagggactcctggtggagctcaggactccagcatgagcagcctacagagcagtaggaaacctcacacctagccagtgccctgctctgagacactcagactaccaccctttccccaagtataacgtcaggcccaagtgtggacacactgccgcccatcccatcaggtcatgaggaagggttcttttaacactcggcacttctgtgggagctattcatacacagtgacttgatgttcttggaggatcaacaaaactgccctgggaaagcatccagtggatgaagaagtcaccttcaccaaggaactctattggaagggaaggtctcctgcccctagctcaggtggctggggagaactaaaacaccttcactggtggttgggggtaaggagcggggcacgggggaggaggaggtagggggcagtaaaaaacttactctcttttttcctctctgtaattggttatcaggaagaatttgcttaatgactaacaccctaagcatcagacctggaatttggagttgcaaagtgactatcttcccatttcccatctcattttcaataacttcagcctcccattctttcctttggaatgagagtttctttttacagaagtaggaaaggcttctcagaaaaaaaaaaaaaaagtataggctgaatttagctcagtgcttgaaatgggaagatatgaattattatatacgcatctgtccacacatacacacatactgttgtgtacacacacacaacatgcctgtgcacagagccaacaacccttcaaaagtgtgctctgggtgtgtacctctggataaataagatgcatgccaagccaacccacagattttcaccagtgtggggcagtcaccaggcacctgttcaatgagctgtccacatggattgaagatgttttaaaaacacagaaaactcatggcttcaatggcagacttactagtctccatttcaaatgccaactctgagctgctgtacagcacaatctattccctattctctctttgaaaacagttaacccacctcacaggtgaatgaggagagaagatgtgctttctgcttcagtctcttactctgtgtgtgaccacatgcaagagtaaacttgcacctcagtgcttcagttcaaatggggtttccaaccccagtataattaggggtgtttcagagcatccccagttatttagcacaacactgaaggagcacatcccctctccattttgacttctctccccacttttacagccactgccttcatcagttttgtagaggtttgatttccatgtgggttttgttgtcattgttttgcatttttgttttgttattgatattgtttgctttcattgctaaaactcatatacgacttactatgagccaagcactgttctcagtattacataggtatgaattcatttaagtcctgaagaaaaagaaaaaaaaatacgaagtggatattacccttcccattttcaaataaggaaactgaagcacaaaaagaacaagtaacttgacaaggacaccccggtagtaaatcatggggctggagctcaaccccagggtaggctggctccagagctgtgctctccttgactcttctgatggtctcctagctggaagcctcacatttcagtctcattcccccaagtggcccatcagctactccatctctggctccccaactaaacagtttctctcatagtgctggacctccactcactagttttttttccagctgttcttctcttttcttcaggtcactcttctcgaccgagtgcaaaaattatcccctccataccagctttgatgaccttccttccatactcctcaccagacacaacataataggtcacacactcctctgtgctttctggcacgttttaaacattattattattgacctttacctatagtataccatggcctatttatgtatccatctcccctagcatttttcctcaaagacaagaaccatgtcttacccatctcttgggtaagtgcctagcatggtggctgacgcttgggagggtgtcattaaatgttgctcaaaagaacaagcaaacatttaaggtggtggagagcagcctggggacagctgacatgctgcatgcttctcagtaccagcaccatcacaatgcaaaaagcaacatctttcttaacctcagcttattctgtttttcagtctactctgtgagagagcaggaatgagaccagactagcaacaccattgccaagctcaaggactgggctcaatgcagtcactccttcagagagaccccccaccccaagcatgccccactttaaaatagcatgtttattgaagggggcatcctttacagtagctagaaaatgactgaggcccaagccagggttgatcaaggatgtgccattaaggtaaagagttacagagcagggcagagggactctgggggcagaagtggatgatttgcccggcctcttccagggggtctggatacaactgaaggagctttagctacatgaggccctcagagccaaagacaggatgcaaatagagttctagagagtggccgtggaagcagaactccaggtggggaatgttcaatctctgcctcccttaaagcagggccaggctcagctggccccattgttcacttggtcacaagtttcctacctttgtttctggatgagtcaaaggccaggaaggcagttatggagagctcctgcacctccagctgccccacagaaaagcctgcaagagtacttccaggcacaggccctctcccaccctattccatttgtaagcaagggaggtcgaggaaaaggacatctccaaaagggagcataagaatagccatatatacaggggctgaaaaagtgctcatgagtccatcttttctggaaagcaaagaccagcctgaagcagtgggagctgctgcccaagcggtagtgaactggagagaaacaggccctggattttcagtgaggatgtggatctgaagagtcccccaaatgcctctgaagtctgacatctctgcttagccctaggagtctggttccctgccttcagttgcagagtgatgtgtttgtgtcattgttgatgtcacctcctaaaaagaccttcactttctggctgccacaaagccatatgtgttgctccccatatacagcctgacagagtaaatggagaggaagtgctggatttgtgtatcactggctatcagttcctcatgttgttaagcctcacacaggtgtgctagcattgaactgtagagtgtcacatacctgagtttgaaaataaaagcacatttccaaacctcaaaaaaaaaaa

SEQ ID NO: 375921 - DNA, 6203 bp, Homo sapiens
atatcctagaataacctgcctcttcggctgggaagcggagggaaccttctcttccttaaagacagggtctcgcactgtcacccaggctggagtgcagtggtgcaaccccacctcccgggttcaagcaattctcatgcctcagcctcccaagtagctgggattacagagattccatcaagaagacttctgcactgggtttgaggctctgaccatccacagtcctgggtcctattctcaactccaaaaacaccgcaaggagagtggtggacttcctctcaagaggattgggcatctgtgtctggtgaagtctttaaggaggcccaataaataacacctctttccttcactgaagctttaaggcttgttgggaattcagagactaatatcacccgtatgactgatgaagctggtgttggaaagtgtttggatcaacaggggtcctcctaccgcaggagtatcttgcagtccaactcccacgattgtcctgactggggatgccacttcaccagaaggagaaaccgacaaaaacctggccaacagagttcacagtccccacaagaggctttctcaccgacacttgaaggtgtccactgcctccctgacatctgtggaccccgcggggcacatcattgacctggtgaatgaccagctgccagacatcagcatctcagaggaggacaagaagaaaaacctggcgctgctggaagaagccaagttggtgagtgagcgattcctgacccgccgtgggaggaagtccaggagcagccccggagactccccatcagctgtttccccgaacctcagccccagcgcttctcctacatcctctcgaagcaactcacttacagtccccaccccgccaggtttggatgtgtgcagtggcccgccatcccctctgcctggagcaccaccacagaagggggatgaagccgacgtctcttcacctcaccctggcgagcctaacgtcccaaagggcctagctgacaggaagcagaatgaccagaggaaagtgtctcagggcaggctggctcctcgtcctcctccagttgagaagtccaaagagattgcaatagaacaaaaggaaaacttcgatcccctccagtaccccgagaccacacccaaaggcctagctcctgttacaaacagcagtgggaaaatggccctgaacagccctcagcctggccccgtggagagcgagctggggaagcagctcttgaaaacgggctgggagggcagccctctgccgagaagtccaacccaggatgcggcaggagtgggtcccccagcctcccaggggagaggcccagctggagagccgatggggcccgaggctggctccaaagctgagcttccacccactgtgtcccggcccccgctgctgcgagggctttcctgggacagtggccctgaagaacctggcccccggctgcagaaagtgcttgccaagctgccactggcagaggaagaaaagcgttttgcaggcaaggccggcggcaagctggccaaggcccctggtctcaaagactttcagatacaagtgcagcccgtgcggatgcagaaactgaccaagctccgagaggagcacatcctgatgagaaatcagaacttagtggggctcaagcttccagaccttagtgaagcagctgagcaggaaaaagggcttccttctgaactctccccagctattgaggaagaagagtcaaagagtggcttagatgtcatgcctaatatttctgatgtgctgctgcgcaaactgcgggtccacaggagtctccctggaagtgcccctccactcactgaaaaggaagttgagaacgtgtttgtgcaactgtccttggcctttagaaatgacagctacactctggaatctagaattaaccaggctgaaagggaacgcaacctgacagaggagaacactgagaaagaactggaaaacttcaaagcttccattacgtcctcagcttcactctggcaccactgtgagcaccgggaaacctaccagaagttgctggaggacatcgctgtcctgcaccgcctggctgcccgcctctccagccgagctgaggtggtaggcgccgtccgccaggaaaagcgcatgtcgaaagcaacggaagtgatgatgcagtatgtggagaatctaaagaggacgtatgagaaggaccatgcggagctcatggagtttaaaaagcttgcaaatcagaattcaagccgcagctgtggcccctctgaagatggggtccctcgcacggcacggtccatgtccctcacgctgggaaagaatatgcctcgccggagggtcagcgttgctgtggttcctaagtttaatgccctgaatctgcctggccaaactcccagctcatcatccattccctccttaccagccttgtcggaatcacccaatgggaaaggcagcctacctgtcacttcagcactgcctgcacttttggaaaatggaaagacaaatggggacccagattgtgaagcctctgctcctgcgctgaccctgagctgcctggaggagcttagtcaggagaccaaggccaggatggaggaagaagcctacagcaagggattccaagaaggtctaaagaagaccaaagaacttcaagacctgaaggaggaggaggaagaacagaagagtgagagtcctgaggaacctgaagaggtagaagaaactgaggaagaggaaaagggcccaagaagcagcaaacttgaagaattggtccatttcttacaagtcatgtatcccaaactgtgtcagcactggcaagtgatctggatgatggctgcagtgatgctggtcttgactgttgtgctggggctctacaattcctataactcttgtgcagagcaggctgatgggccccttggaagatccacttgctcggcagcccagagggactcctggtggagctcaggactccagcatgagcagcctacagagcagtaggaaacctcacacctagccagtgccctgctctgagacactcagactaccaccctttccccaagtataacgtcaggcccaagtgtggacacactgccgcccatcccatcaggtcatgaggaagggttcttttaacactcggcacttctgtgggagctattcatacacagtgacttgatgttcttggaggatcaacaaaactgccctgggaaagcatccagtggatgaagaagtcaccttcaccaaggaactctattggaagggaaggtctcctgcccctagctcaggtggctggggagaactaaaacaccttcactggtggttgggggtaaggagcggggcacgggggaggaggaggtagggggcagtaaaaaacttactctcttttttcctctctgtaattggttatcaggaagaatttgcttaatgactaacaccctaagcatcagacctggaatttggagttgcaaagtgactatcttcccatttcccatctcattttcaataacttcagcctcccattctttcctttggaatgagagtttctttttacagaagtaggaaaggcttctcagaaaaaaaaaaaaaaagtataggctgaatttagctcagtgcttgaaatgggaagatatgaattattatatacgcatctgtccacacatacacacatactgttgtgtacacacacacaacatgcctgtgcacagagccaacaacccttcaaaagtgtgctctgggtgtgtacctctggataaataagatgcatgccaagccaacccacagattttcaccagtgtggggcagtcaccaggcacctgttcaatgagctgtccacatggattgaagatgttttaaaaacacagaaaactcatggcttcaatggcagacttactagtctccatttcaaatgccaactctgagctgctgtacagcacaatctattccctattctctctttgaaaacagttaacccacctcacaggtgaatgaggagagaagatgtgctttctgcttcagtctcttactctgtgtgtgaccacatgcaagagtaaacttgcacctcagtgcttcagttcaaatggggtttccaaccccagtataattaggggtgtttcagagcatccccagttatttagcacaacactgaaggagcacatcccctctccattttgacttctctccccacttttacagccactgccttcatcagttttgtagaggtttgatttccatgtgggttttgttgtcattgttttgcatttttgttttgttattgatattgtttgctttcattgctaaaactcatatacgacttactatgagccaagcactgttctcagtattacataggtatgaattcatttaagtcctgaagaaaaagaaaaaaaaatacgaagtggatattacccttcccattttcaaataaggaaactgaagcacaaaaagaacaagtaacttgacaaggacaccccggtagtaaatcatggggctggagctcaaccccagggtaggctggctccagagctgtgctctccttgactcttctgatggtctcctagctggaagcctcacatttcagtctcattcccccaagtggcccatcagctactccatctctggctccccaactaaacagtttctctcatagtgctggacctccactcactagttttttttccagctgttcttctcttttcttcaggtcactcttctcgaccgagtgcaaaaattatcccctccataccagctttgatgaccttccttccatactcctcaccagacacaacataataggtcacacactcctctgtgctttctggcacgttttaaacattattattattgacctttacctatagtataccatggcctatttatgtatccatctcccctagcatttttcctcaaagacaagaaccatgtcttacccatctcttgggtaagtgcctagcatggtggctgacgcttgggagggtgtcattaaatgttgctcaaaagaacaagcaaacatttaaggtggtggagagcagcctggggacagctgacatgctgcatgcttctcagtaccagcaccatcacaatgcaaaaagcaacatctttcttaacctcagcttattctgtttttcagtctactctgtgagagagcaggaatgagaccagactagcaacaccattgccaagctcaaggactgggctcaatgcagtcactccttcagagagaccccccaccccaagcatgccccactttaaaatagcatgtttattgaagggggcatcctttacagtagctagaaaatgactgaggcccaagccagggttgatcaaggatgtgccattaaggtaaagagttacagagcagggcagagggactctgggggcagaagtggatgatttgcccggcctcttccagggggtctggatacaactgaaggagctttagctacatgaggccctcagagccaaagacaggatgcaaatagagttctagagagtggccgtggaagcagaactccaggtggggaatgttcaatctctgcctcccttaaagcagggccaggctcagctggccccattgttcacttggtcacaagtttcctacctttgtttctggatgagtcaaaggccaggaaggcagttatggagagctcctgcacctccagctgccccacagaaaagcctgcaagagtacttccaggcacaggccctctcccaccctattccatttgtaagcaagggaggtcgaggaaaaggacatctccaaaagggagcataagaatagccatatatacaggggctgaaaaagtgctcatgagtccatcttttctggaaagcaaagaccagcctgaagcagtgggagctgctgcccaagcggtagtgaactggagagaaacaggccctggattttcagtgaggatgtggatctgaagagtcccccaaatgcctctgaagtctgacatctctgcttagccctaggagtctggttccctgccttcagttgcagagtgatgtgtttgtgtcattgttgatgtcacctcctaaaaagaccttcactttctggctgccacaaagccatatgtgttgctccccatatacagcctgacagagtaaatggagaggaagtgctggatttgtgtatcactggctatcagttcctcatgttgttaagcctcacacaggtgtgctagcattgaactgtagagtgtcacatacctgagtttgaaaataaaagcacatttccaaacctcaaaaaaaaaaa

SEQ ID NO: 375922 - DNA, 5129 bp, Homo sapiens
cctctgactttgtaaacaaagccagagagccggaggaaatgaaattccaaatgccctctcctagcctggtttgacctccggtgttgatgcaaactcaagccggctctcactgtggcttgtggctccgggaaatggaacccagcttgggacagggaatggatttgacttgtccttttggcgtctccccagcctgtggagcccaggcctcttggagcatctttggggctgacgcagcggaggttccgggcacacgtggccactcccagcaggagggtgccatgccccacattcccgaggacgaggagccccccggagagtcacaggcagcccagagccctgccggccaagggtcctcctaccgcaggagtatcttgcagtccaactcccacgattgtcctgactggggatgccacttcaccagaaggagaaaccgacaaaaacctggccaacagagttcacagtccccacaagaggctttctcaccgacacttgaaggtgtccactgcctccctgacatctgtggaccccgcggggcacatcattgacctggtgaatgaccagctgccagacatcagcatctcagaggaggacaagaagaaaaacctggcgctgctggaagaagccaagttggtgagtgagcgattcctgacccgccgtgggaggaagtccaggagcagccccggagactccccatcagctgtttccccgaacctcagccccagcgcttctcctacatcctctcgaagcaactcacttacagtccccaccccgccagaagggggatgaagccgacgtctcttcacctcaccctggcgagcctaacgtcccaaagggcctagctgacaggaagcagaatgaccagaggaaagtgtctcagggcaggctggctcctcgtcctcctccagttgagaagtccaaagagattgcaatagaacaaaaggaaaacttcgatcccctccagtaccccgagaccacacccaaaggcctagctcctgttacaaacagcagtgggaaaatggccctgaacagccctcagcctggccccgtggagagcgagctggggaagcagctcttgaaaacgggctgggagggcagccctctgccgagaagtccaacccaggatgcggcaggagtgggtcccccagcctcccaggggagaggcccagctggagagccgatggggcccgaggctggctccaaagctgagcttccacccactgtgtcccggcccccgctgctgcgagggctttcctgggacagtggccctgaagaacctggcccccggctgcagaaagtgcttgccaagctgccactggcagaggaagaaaagcgttttgcaggcaaggccggcggcaagctggccaaggcccctggtctcaaagactttcagatacaagtgcagcccgtgcggatgcagaaactgaccaagctccgagaggagcacatcctgatgagaaatcagaacttagtggggctcaagcttccagaccttagtgaagcagctgagcaggaaaaagggcttccttctgaactctccccagctattgaggaagaagagtcaaagagtggcttagatgtcatgcctaatatttctgatgtgctgctgcgcaaactgcgggtccacaggagtctccctggaagtgcccctccactcactgaaaaggaagttgagaacgtgtttgtgcaactgtccttggcctttagaaatgacagctacactctggaatctagaattaaccaggctgaaagggaacgcaacctgacagaggagaacactgagaaagaactggaaaacttcaaagcttccattacgtcctcagcttcactctggcaccactgtgagcaccgggaaacctaccagaagttgctggaggacatcgctgtcctgcaccgcctggctgcccgcctctccagccgagctgaggtggtaggcgccgtccgccaggaaaagcgcatgtcgaaagcaacggaagtgatgatgcagtatgtggagaatctaaagaggacgtatgagaaggaccatgcggagctcatggagtttaaaaagcttgcaaatcagaattcaagccgcagctgtggcccctctgaagatggggtccctcgcacggcacggtccatgtccctcacgctgggaaagaatatgcctcgccggagggtcagcgttgctgtggttcctaagtttaatgccctgaatctgcctggccaaactcccagctcatcatccattccctccttaccagccttgtcggaatcacccaatgggaaaggcagcctacctgtcacttcagcactgcctgcacttttggaaaatggaaagacaaatggggacccagattgtgaagcctctgctcctgcgctgaccctgagctgcctggaggagcttagtcaggagaccaaggccaggatggaggaagaagcctacagcaagggattccaagaaggtctaaagaagaccaaagaacttcaagacctgaaggaggaggaggaagaacagaagagtgagagtcctgaggaacctgaagaggtagaagaaactgaggaagaggaaaagggcccaagaagcagcaaacttgaagaattggtccatttcttacaagtcatgtatcccaaactgtgtcagcactggcaagtgatctggatgatggctgcagtgatgctggtcttgactgttgtgctggggctctacaattcctataactcttgtgcagagcaggctgatgggccccttggaagatccacttgctcggcagcccagagggactcctggtggagctcaggactccagcatgagcagcctacagagcagtaggaaacctcacacctagccagtgccctgctctgagacactcagactaccaccctttccccaagtataacgtcaggcccaagtgtggacacactgccgcccatcccatcaggtcatgaggaagggttcttttaacactcggcacttctgtgggagctattcatacacagtgacttgatgttcttggaggatcaacaaaactgccctgggaaagcatccagtggatgaagaagtcaccttcaccaaggaactctattggaagggaaggtctcctgcccctagctcaggtggctggggagaactaaaacaccttcactggtggttgggggtaaggagcggggcacgggggaggaggaggtagggggcagtaaaaaacttactctcttttttcctctctgtaattggttatcaggaagaatttgcttaatgactaacaccctaagcatcagacctggaatttggagttgcaaagtgactatcttcccatttcccatctcattttcaataacttcagcctcccattctttcctttggaatgagagtttctttttacagaagtaggaaaggcttctcagaaaaaaaaaaaaaaagtataggctgaatttagctcagtgcttgaaatgggaagatatgaattattatatacgcatctgtccacacatacacacatactgttgtgtacacacacacaacatgcctgtgcacagagccaacaacccttcaaaagtgtgctctgggtgtgtacctctggataaataagatgcatgccaagccaacccacagattttcaccagtgtggggcagtcaccaggcacctgttcaatgagctgtccacatggattgaagatgttttaaaaacacagaaaactcatggcttcaatggcagacttactagtctccatttcaaatgccaactctgagctgctgtacagcacaatctattccctattctctctttgaaaacagttaacccacctcacaggtgaatgaggagagaagatgtgctttctgcttcagtctcttactctgtgtgtgaccacatgcaagagtaaacttgcacctcagtgcttcagttcaaatggggtttccaaccccagtataattaggggtgtttcagagcatccccagttatttagcacaacactgaaggagcacatcccctctccattttgacttctctccccacttttacagccactgccttcatcagttttgtagaggtttgatttccatgtgggttttgttgtcattgttttgcatttttgttttgttattgatattgtttgctttcattgctaaaactcatatacgacttactatgagccaagcactgttctcagtattacataggtatgaattcatttaagtcctgaagaaaaagaaaaaaaaatacgaagtggatattacccttcccattttcaaataaggaaactgaagcacaaaaagaacaagtaacttgacaaggacaccccggtagtaaatcatggggctggagctcaaccccagggtaggctggctccagagctgtgctctccttgactcttctgatggtctcctagctggaagcctcacatttcagtctcattcccccaagtggcccatcagctactccatctctggctccccaactaaacagtttctctcatagtgctggacctccactcactagttttttttccagctgttcttctcttttcttcaggtcactcttctcgaccgagtgcaaaaattatcccctccataccagctttgatgaccttccttccatactcctcaccagacacaacataataggtcacacactcctctgtgctttctggcacgttttaaacattattattattgacctttacctatagtataccatggcctatttatgtatccatctcccctagcatttttcctcaaagacaagaaccatgtcttacccatctcttgggtaagtgcctagcatggtggctgacgcttgggagggtgtcattaaatgttgctcaaaagaacaagcaaacatttaaggtggtggagagcagcctggggacagctgacatgctgcatgcttctcagtaccagcaccatcacaatgcaaaaagcaacatctttcttaacctcagcttattctgtttttcagtctactctgtgagagagcaggaatgagaccagactagcaacaccattgccaagctcaaggactgggctcaatgcagtcactccttcagagagaccccccaccccaagcatgccccactttaaaatagcatgtttattgaagggggcagggactgcttcagtttcgtcgacgcggccgcgaatttagtagtagtag

SEQ ID NO: 375923 - DNA, 3027 bp, Homo sapiens
cctctgactttgtaaacaaagccagagagccggaggaaatgaaattccaaatgccctctcctagcctggtttgacctccggtgttgatgcaaactcaagccggctctcactgtggcttgtggctccgggaaatggaacccagcttgggacagggaatggatttgacttgtccttttggcgtctccccagcctgtggagcccaggcctcttggagcatctttggggctgacgcagcggaggttccgggcacacgtggccactcccagcaggagggtgccatgccccacattcccgaggacgaggagccccccggagagtcacaggcagcccagagccctgccggccaagggtcctcctaccgcaggagtatcttgcagtccaactcccacgattgtcctgactggggatgccacttcaccagaaggagaaaccgacaaaaacctggccaacagagttcacagtccccacaagaggctttctcaccgacacttgaaggtgtccactgcctccctgacatctgtggaccccgcggggcacatcattgacctggtgaatgaccagctgccagacatcagcatctcagaggaggacaagaagaaaaacctggcgctgctggaagaagccaagttggtgagtgagcgattcctgacccgccgtgggaggaagtccaggagcagccccggagactccccatcagctgtttccccgaacctcagccccagcgcttctcctacatcctctcgaagcaactcacttacagtccccaccccgccagaagggggatgaagccgacgtctcttcacctcaccctggcgagcctaacgtcccaaagggcctagctgacaggaagcagaatgaccagaggaaagtgtctcagggcaggctggctcctcgtcctcctccagttgagaagtccaaagagattgcaatagaacaaaaggaaaacttcgatcccctccagtaccccgagaccacacccaaaggcctagctcctgttacaaacagcagtgggaaaatggccctgaacagccctcagcctggccccgtggagagcgagctggggaagcagctcttgaaaacgggctgggagggcagccctctgccgagaagtccaacccaggatgcggcaggagtgggtcccccagcctcccaggggagaggcccagctggagagccgatggggcccgaggctggctccaaagctgagcttccacccactgtgtcccggcccccgctgctgcgagggctttcctgggacagtggccctgaagaacctggcccccggctgcagaaagtgcttgccaagctgccactggcagaggaagaaaagcgttttgcaggcaaggccggcggcaagctggccaaggcccctggtctcaaagactttcagatacaagtgcagcccgtgcggatgcagaaactgaccaagctccgagaggagcacatcctgatgagaaatcagaacttagtggggctcaagcttccagaccttagtgaagcagctgagcaggaaaaagggcttccttctgaactctccccagctattgaggaagaagagtcaaagagtggcttagatgtcatgcctaatatttctgatgtgctgctgcgcaaactgcgggtccacaggagtctccctggaagtgcccctccactcactgaaaaggaagttgagaacgtgtttgtgcaactgtccttggcctttagaaatgacagctacactctggaatctagaattaaccaggctgaaagggaacgcaacctgacagaggagaacactgagaaagaactggaaaacttcaaagcttccattacgtcctcagcttcactctggcaccactgtgagcaccgggaaacctaccagaagttgctggaggacatcgctgtcctgcaccgcctggctgcccgcctctccagccgagctgaggtggtaggcgccgtccgccaggaaaagcgcatgtcgaaagcaacggaagtgatgatgcagtatgtggagaatctaaagaggacgtatgagaaggaccatgcggagctcatggagtttaaaaagcttgcaaatcagaattcaagccgcagctgtggcccctctgaagatggggtccctcgcacggcacggtccatgtccctcacgctgggaaagaatatgcctcgccggagggtcagcgttgctgtggttcctaagtttaatgccctgaatctgcctggccaaactcccagctcatcatccattccctccttaccagccttgtcggaatcacccaatgggaaaggcagcctacctgtcacttcagcactgcctgcacttttggaaaatggaaagacaaatggggacccagattgtgaagcctctgctcctgcgctgaccctgagctgcctggaggagcttagtcaggagaccaaggccaggatggaggaagaagcctacagcaagggattccaagaaggtctaaagaagaccaaagaacttcaagacctgaaggaggaggaggaagaacagaagagtgagagtcctgaggaacctgaagaggtagaagaaactgaggaagaggaaaagggcccaagaagcagcaaacttgaagaattggtccatttcttacaagtcatgtatcccaaactgtgtcagcactggcaagtgatctggatgatggctgcagtgatgctggtcttgactgttgtgctggggctctacaattcctataactcttgtgcagagcaggctgatgggccccttggaagatccacttgctcggcagcccagagggactcctggtggagctcaggactccagcatgagcagcctacagagcagtaggaaacctcacacctagccagtgccctgctctgagacactcagactaccaccctttccccaagtagagtaaatggagaggaagtgctggatttgtgtatcactggctatcagttcctcatgttgttaagcctcacacaggtgtgctagcattgaactgtagagtgtcacatacctgagtttgaaaataaaagcacatttccaaacctcaaaaaaaaaaa

SEQ ID NO: 375924 - DNA, 1121 bp, Homo sapiens
gcggccactctctagaactctatttgcatcctgtctttggctctgagggcctcatgtagctaaagctccttcgagttgtatccagaccccccaccccaagcatgccccactttaaaatagcatgtttattgaagggggcatcctttacagtagctagaaaatgactgaggcccaagccagggttgatcaaggatgtgccattaaggtaaagagttacagagcagggcagagggactctgggggcagaagtggatgatttgcccggcctcttccagggggtctggatacaactgaaggagctttagctacatgaggccctcagagccaaagacaggatgcaaatagagttctagagagtggccgtggaagcagaactccaggtggggaatgttcaatctctgcctcccttaaagcagggccaggctcagctggccccattgttcacttggtcacaagtttcctacctttgtttctggatgagtcaaaggccaggaaggcagttatggagagctcctgcacctccagctgccccacagaaaagcctgcaagagtacttccaggcacaggccctctcccaccctattccatttgtaagcaagggaggtcgaggaaaaggacatctccaaaagggagcataagaatagccatatatacaggggctgaaaaagtgctcatgagtccatcttttctggaaagcaaagaccagcctgaagcagtgggagctgctgcccaagcggtagtgaactggagagaaacaggccctggattttcagtgaggatgtggatctgaagagtcccccaaatgcctctgaagtctgacatctctgcttagccctaggagtctggttccctgccttcagttgcagagtgatgtgtttgtgtcattgttgatgtcacctcctaaaaagaccttcactttctggctgccacaaagccatatgtgttgctccccatatacagcctgacagagtaaatggagaggaagtgctggatttgtgtatcactggctatcagttcctcatgttgttaagcctcacacaggtgtgctagcattgaactgtagagtgtcacatacctgagtttgaaaataaaagcacatttccaaacctcaaaaaaaaaaa

SEQ ID NO: 375925 - DNA, 5998 bp, Homo sapiens
cctctgactttgtaaacaaagccagagagccggaggaaatgaaattccaaatgccctctcctagcctggtttgacctccggtgttgatgcaaactcaagccggctctcactgtggcttgtggctccgggaaatggaacccagcttgggacagggaatggatttgacttgtccttttggcgtctccccagcctgtggagcccaggcctcttggagcatctttggggctgacgcagcggaggttccgggcacacgtggccactcccagcaggagggtgccatgccccacattcccgaggacgaggagccccccggagagtcacaggcagcccagagccctgccggccaagggtcctcctaccgcaggagtatcttgcagtccaactcccacgattgtcctgactggggatgccacttcaccagaaggagaaaccgacaaaaacctggccaacagagttcacagtccccacaagaggctttctcaccgacacttgaaggtgtccactgcctccctgacatctgtggaccccgcggggcacatcattgacctggtgaatgaccagctgccagacatcagcatctcagaggaggacaagaagaaaaacctggcgctgctggaagaagccaagttggtgagtgagcgattcctgacccgccgtgggaggaagtccaggagcagccccggagactccccatcagctgtttccccgaacctcagccccagcgcttctcctacatcctctcgaagcaactcacttacagtccccaccccgccagaagggggatgaagccgacgtctcttcacctcaccctggcgagcctaacgtcccaaagggcctagctgacaggaagcagaatgaccagaggaaagtgtctcagggcaggctggctcctcgtcctcctccagttgagaagtccaaagagattgcaatagaacaaaaggaaaacttcgatcccctccagtaccccgagaccacacccaaaggcctagctcctgttacaaacagcagtgggaaaatggccctgaacagccctcagcctggccccgtggagagcgagctggggaagcagctcttgaaaacgggctgggagggcagccctctgccgagaagtccaacccaggatgcggcaggagtgggtcccccagcctcccaggggagaggcccagctggagagccgatggggcccgaggctggctccaaagctgagcttccacccactgtgtcccggcccccgctgctgcgagggctttcctgggacagtggccctgaagaacctggcccccggctgcagaaagtgcttgccaagctgccactggcagaggaagaaaagcgttttgcaggcaaggccggcggcaagctggccaaggcccctggtctcaaagactttcagatacaagtgcagcccgtgcggatgcagaaactgaccaagctccgagaggagcacatcctgatgagaaatcagaacttagtggggctcaagcttccagaccttagtgaagcagctgagcaggaaaaagggcttccttctgaactctccccagctattgaggaagaagagtcaaagagtggcttagatgtcatgcctaatatttctgatgtgctgctgcgcaaactgcgggtccacaggagtctccctggaagtgcccctccactcactgaaaaggaagttgagaacgtgtttgtgcaactgtccttggcctttagaaatgacagctacactctggaatctagaattaaccaggctgaaagggaacgcaacctgacagaggagaacactgagaaagaactggaaaacttcaaagcttccattacgtcctcagcttcactctggcaccactgtgagcaccgggaaacctaccagaagttgctggaggacatcgctgtcctgcaccgcctggctgcccgcctctccagccgagctgaggtggtaggcgccgtccgccaggaaaagcgcatgtcgaaagcaacggaagtgatgatgcagtatgtggagaatctaaagaggacgtatgagaaggaccatgcggagctcatggagtttaaaaagcttgcaaatcagaattcaagccgcagctgtggcccctctgaagatggggtccctcgcacggcacggtccatgtccctcacgctgggaaagaatatgcctcgccggagggtcagcgttgctgtggttcctaagtttaatgccctgaatctgcctggccaaactcccagctcatcatccattccctccttaccagccttgtcggaatcacccaatgggaaaggcagcctacctgtcacttcagcactgcctgcacttttggaaaatggaaagacaaatggggacccagattgtgaagcctctgctcctgcgctgaccctgagctgcctggaggagcttagtcaggagaccaaggccaggatggaggaagaagcctacagcaagggattccaagaaggtctaaagaagaccaaagaacttcaagacctgaaggaggaggaggaagaacagaagagtgagagtcctgaggaacctgaagaggtagaagaaactgaggaagaggaaaagggcccaagaagcagcaaacttgaagaattggtccatttcttacaagtcatgtatcccaaactgtgtcagcactggcaagtgatctggatgatggctgcagtgatgctggtcttgactgttgtgctggggctctacaattcctataactcttgtgcagagcaggctgatgggccccttggaagatccacttgctcggcagcccagagggactcctggtggagctcaggactccagcatgagcagcctacagagcagtaggaaacctcacacctagccagtgccctgctctgagacactcagactaccaccctttccccaagtataacgtcaggcccaagtgtggacacactgccgcccatcccatcaggtcatgaggaagggttcttttaacactcggcacttctgtgggagctattcatacacagtgacttgatgttcttggaggatcaacaaaactgccctgggaaagcatccagtggatgaagaagtcaccttcaccaaggaactctattggaagggaaggtctcctgcccctagctcaggtggctggggagaactaaaacaccttcactggtggttgggggtaaggagcggggcacgggggaggaggaggtagggggcagtaaaaaacttactctcttttttcctctctgtaattggttatcaggaagaatttgcttaatgactaacaccctaagcatcagacctggaatttggagttgcaaagtgactatcttcccatttcccatctcattttcaataacttcagcctcccattctttcctttggaatgagagtttctttttacagaagtaggaaaggcttctcagaaaaaaaaaaaaaaagtataggctgaatttagctcagtgcttgaaatgggaagatatgaattattatatacgcatctgtccacacatacacacatactgttgtgtacacacacacaacatgcctgtgcacagagccaacaacccttcaaaagtgtgctctgggtgtgtacctctggataaataagatgcatgccaagccaacccacagattttcaccagtgtggggcagtcaccaggcacctgttcaatgagctgtccacatggattgaagatgttttaaaaacacagaaaactcatggcttcaatggcagacttactagtctccatttcaaatgccaactctgagctgctgtacagcacaatctattccctattctctctttgaaaacagttaacccacctcacaggtgaatgaggagagaagatgtgctttctgcttcagtctcttactctgtgtgtgaccacatgcaagagtaaacttgcacctcagtgcttcagttcaaatggggtttccaaccccagtataattaggggtgtttcagagcatccccagttatttagcacaacactgaaggagcacatcccctctccattttgacttctctccccacttttacagccactgccttcatcagttttgtagaggtttgatttccatgtgggttttgttgtcattgttttgcatttttgttttgttattgatattgtttgctttcattgctaaaactcatatacgacttactatgagccaagcactgttctcagtattacataggtatgaattcatttaagtcctgaagaaaaagaaaaaaaaatacgaagtggatattacccttcccattttcaaataaggaaactgaagcacaaaaagaacaagtaacttgacaaggacaccccggtagtaaatcatggggctggagctcaaccccagggtaggctggctccagagctgtgctctccttgactcttctgatggtctcctagctggaagcctcacatttcagtctcattcccccaagtggcccatcagctactccatctctggctccccaactaaacagtttctctcatagtgctggacctccactcactagttttttttccagctgttcttctcttttcttcaggtcactcttctcgaccgagtgcaaaaattatcccctccataccagctttgatgaccttccttccatactcctcaccagacacaacataataggtcacacactcctctgtgctttctggcacgttttaaacattattattattgacctttacctatagtataccatggcctatttatgtatccatctcccctagcatttttcctcaaagacaagaaccatgtcttacccatctcttgggtaagtgcctagcatggtggctgacgcttgggagggtgtcattaaatgttgctcaaaagaacaagcaaacatttaaggtggtggagagcagcctggggacagctgacatgctgcatgcttctcagtaccagcaccatcacaatgcaaaaagcaacatctttcttaacctcagcttattctgtttttcagtctactctgtgagagagcaggaatgagaccagactagcaacaccattgccaagctcaaggactgggctcaatgcagtcactccttcagagagaccccccaccccaagcatgccccactttaaaatagcatgtttattgaagggggcatcctttacagtagctagaaaatgactgaggcccaagccagggttgatcaaggatgtgccattaaggtaaagagttacagagcagggcagagggactctgggggcagaagtggatgatttgcccggcctcttccagggggtctggatacaactgaaggagctttagctacatgaggccctcagagccaaagacaggatgcaaatagagttctagagagtggccgtggaagcagaactccaggtggggaatgttcaatctctgcctcccttaaagcagggccaggctcagctggccccattgttcacttggtcacaagtttcctacctttgtttctggatgagtcaaaggccaggaaggcagttatggagagctcctgcacctccagctgccccacagaaaagcctgcaagagtacttccaggcacaggccctctcccaccctattccatttgtaagcaagggaggtcgaggaaaaggacatctccaaaagggagcataagaatagccatatatacaggggctgaaaaagtgctcatgagtccatcttttctggaaagcaaagaccagcctgaagcagtgggagctgctgcccaagcggtagtgaactggagagaaacaggccctggattttcagtgaggatgtggatctgaagagtcccccaaatgcctctgaagtctgacatctctgcttagccctaggagtctggttccctgccttcagttgcagagtgatgtgtttgtgtcattgttgatgtcacctcctagagtaaatggagaggaagtgctggatttgtgtatcactggctatcagttcctcatgttgttaagcctcacacaggtgtgctagcattgaactgtagagtgtcacatacctgagtttgaaaataaaagcacatttccaaacctcaaaaaaaaaaa

SEQ ID NO: 375926 - DNA, 1503 bp, Homo sapiens
tggcgctggcccagggtcttctccaggctcacatgcttgctggaggctccaggcgggtggggagatctgcagggtccctttgttcccgtccggccaggacagtgtccagtggcacgagttgccatggggactgccatctgctgtgtggatacccatcggaggggcccagggtgagcgactgccccaaaggcccagcctgccctgagccctgaggccagctggtcggctttccctgccattatcccccgagccaggccggagtggggctcccagaggagctctcggctctaagtcccagcccctctcagaggaggcgtgcggccgaggttctgcagccagaggcttctcggctctgagctccggagccagatgtaacattgaccttaaatggtaaaagctccccagagtgaagggaggctggccagaggaggaaaggagaataactcagttttagacagggtctcgcactgtcacccaggctggagtgcagtggtgcaaccccacctcccgggttcaagcaattctcatgcctcagcctcccaagtagctgggattacagcctgtggagcccaggcctcttggagcatctttggggctgacgcagcggaggttccgggcacacgtggccactcccagcaggagggtgccatgccccacattcccgaggacgaggagccccccggagagtcacaggcagcccagagccctgccggccaagggtcctcctaccgcaggagtatcttgcagtccaactcccacgattgtcctgactggggatgccacttcaccagaaggagaaaccgacaaaaacctggccaacagagttcacagtccccacaagaggctttctcaccgacacttgaaggtgtccactgcctccctgacatctgtggaccccgcggggcacatcattgacctggtgaatgaccagctgccagacatcagcatctcagaggaggacaagaagaaaaacctggcgctgctggaagaagccaagttggtgagtgagcgattcctgacccgccgtgggaggaagtccaggagcagccccggagactccccatcagctgtttccccgaacctcagccccagcgcttctcctacatcctctcgaagcaactcacttacagtccccaccccgccaggtttggatgtgtgcagtggcccgccatcccctctgcctggagcaccaccacaggtgacaggaccccccacctgctgtgctgtttctatgccaatgggtctctccccttaccccgaacaccaggaggcccttcgtgacccactggagatgagggtgctgggtggagggcatgaacaccactgctagggggcctccttggggatatttcaagaggaaacacggtctcttcccattgctgactgactcctgttcaccttctccagcagaagggggatgaagccgacgtctcttcacctcaccctggcgagcctgtgagtttgagctttgctccctttggatgatttgagtgtggggggcac

SEQ ID NO: 375927 - DNA, 1117 bp, Homo sapiens
gtgcttatctgttcttctgtgattcaacatatattcttcgatatagtgcacgacgggctcgcattctaggttttattggccatatcaaaagtgagcacaaatcaaataactgcttgatccctctgctaccacccactgagaggagaaaagtcatttagttccaagataaccttggttccaggctagatacagaggggcccttgggacagctgtgtcaccaactctggagcagtctctggaggcaagtccagagcattaacataaaagtgtcccagtcccacagtgccccaggtcccagcacccctgctccaaccctaaccttggatacttttggccctttaacaaatcgccacctctgcttgcaggacttgatcccatgtgtgggctccaaggccttgtctggcccacaccttctttagtgtctctcacttccgtgtcctggcttcctcctggctccagatgagaatgtggtaacctaggaagagtgagaccagtctgacttacaccttctgttaccaatctctcagagcctggggctggcccgcaaacctacgatttggtaaagaaatactaggaaggccgggcgcggtggctcaagtctgtaatcccagcactttgggaggctgaggtgggcggatcacgaggtcaggagaccgagaccatcctggctaacacggtgaaaccctgtctctactaaaaatacaaaaaattagctgggcgtggtagcgggcacctgtagtcctagctactcgagaggttgaggcaggagaatggcgtgaacccaggaggcggagcttgcattgagccaagatcacgccactgcactccagcccggggggacagagcgagactccgtctcaaaaaaaaaaaagaaatactaggaaactggacagtagccaggcattgcatgaccaagacaaagccagaggaatggagggccttggctatagagaccactgtctcccagccatcttcttcgtgggccactgccctggggtgaatgtggcagggcggggctgaggctggcccgcactgaaccttgggaagtaggatcggacttggcaagtcagagacattctcctcctactcacccattgcagaggccagcgtgtccccc

SEQ ID NO: 375928 - DNA, 785 bp, Homo sapiens
  misc_feature (753)..(753): n is a, c, g, or t
  misc_feature (762)..(762): n is a, c, g, or t
aggtgccacccagcgggttccagcttgtttgctgcatagattacaacggtgatggcgggcaagcggtccggctggagccgggcggctctcctccagctccttctcggcgtgaacctggtggtgatgccgcccacccaggcccggagtctgcgcttcgttaccttggaggggatgctacagcactgggaactgggccaggccctgcggcagcgctatcacggcttcctaaacacctcttatcaccggcaagaggtttatgtgcgaagcacagactttgaccggactctcatgagtgctgaggccaacctggctggactcttccctcccaacgggatgcagcgcttcaacccgaacatctcgtggcagcctattcctgtgcacactgtgcccatcactgaggacaggctgctgaagttcccgttgggcccatgtccccgttatgagcagctgcagaacgagacccggcagacaccagagtatcagaatgagagttctcggaatgcacaatttctggacatggtggccaacgagacagggcttacagacctgacactggagaccgtctggaatgtctatgacacactcttctgtgagcaaacgcacgggctgcgcctgccgccctgggcctcaccccaaaccatgcagcgtctcagccggctaaaggacttcagcttccgcttcctcttcggaatctaccagcaggcggagaaggcccggcttcaggggggggaagtccctggctggggctcaaanattaagggnaagaaaccctggaaccccttaaa

SEQ ID NO: 375929 - DNA, 161 bp, Homo sapiens
gcggccgcctactactactactactactactgctcgaattcaagcttctaacgatgtacggggacgttgtgagctggaaaagaaagttctagactgtggcccagaatagggctggggcagctcccagagaatgaatagtgctgtttcctattggactgata

SEQ ID NO: 375930 - DNA, 2086 bp, Homo sapiens
aggtgccacccagcgggttccagcttgtttgctgcatagattacaacggtgatggcgggcaagcggtccggctggagccgggcggctctcctccagctccttctcggcgtgaacctggtggtgatgccgcccacccaggcccggagtctgcgcttcgttaccttgctgtaccgccatggagaccgttcaccagtgaagacatatcccaaggacccctatcaggaagaagaatggccccaggggtttggtcagttaaccaaggaggggatgctacagcactgggaactgggccaggccctgcggcagcgctatcacggcttcctaaacacctcttatcaccggcaagaggtttatgtgcgaagcacagactttgaccggactctcatgagtgctgaggccaacctggctggactcttccctcccaacgggatgcagcgcttcaacccgaacatctcgtggcagcctattcctgtgcacactgtgcccatcactgaggacaggctgctgaagttcccgttgggcccatgtccccgttatgagcagctgcagaacgagacccggcagacaccagagtatcagaatgagagttctcggaatgcacaatttctggacatggtggccaacgagacagggcttacagacctgacactggagaccgtctggaatgtctatgacacactcttctgtgagcaaacgcacgggctgcgcctgccgccctgggcctcaccccaaaccatgcagcgtctcagccggctaaaggacttcagcttccgcttcctcttcggaatctaccagcaggcggagaaggcccggcttcaggggggagtcctgctggctcagataaggaagaacctgaccctaatggcgaccacctcccagctccccaagctgctggtttactctgcgcacgacactaccctggttgccctgcaaatggcactggatgtctacaatggtgaacaagccccctacgcctcctgccacatatttgaactgtaccaggaagattctgggaatttctcagtggagatgtactttcggaacgagagtgacaaggccccctggccgctcagcctgcctggctgccctcaccgctgcccactgcaggacttccttcgcctcacagagcccgtcgtgcccaaggattggcagcaggagtgccagctggcaagcggtcctgcagacacagtgctgctcctcaccgtcctcttccggatgcaggcccagcctcctggctaccgccacgtcgcagatggggaggaccacgcctgacaaccactcagcccccttccctccacctcctaggggaggtgggctgggccctcgctcctgactgttgctgctccccagcccatggacaggagatcctgggttgggcctccctctgatgaccccagccagatgagcgagtggggctcagcgtggcccatggtgcctgtcactcagcattcccatgcctgatgtttaccaagtgctgtgttggacactggctttctccaaacaggatttgcctcctccacgctccctacacacctgagatgtaaactggcagtcagtgttcactcaggacctaggattagaaaatggcagagttggtgctggatccaccttgcacttctatcaagccctgttctttttcctccagcctgaagtcttcggcaaatagctcagagggacacggtcttgcctctcagtgcttattttagtgggaaaaacagctaataccaggggtacaaacattggctcccaaggaactggatcacccaacagccagccagccacatttccctgtgtctggctagagccaccattagactcagacagaatgcttcaggaatcgttgtcaccccttcaactggagcaggacggaaggttgtctgtacttgggagggagtggggagtggtgggaagggagttgcttgtcacacgaatcaggaaactgctctccctcagctgggctggggtctccagggacctgagctacatgcaggttgtgagctggaaaagaaagttctagactgtggcccagaatagggctggggcagctcccagagaatgaatagtgctgtttcctattggactgata

SEQ ID NO: 375931 - DNA, 2024 bp, Homo sapiens
aggtgccacccagcgggttccagcttgtttgctgcatagattacaacggtgatggcgggcaagcggtccggctggagccgggcggctctcctccagctccttctcggcgtgaacctggtggtgatgccgcccacccaggcccggagtctgcgcttcgttaccttgctgtaccgccatggagaccgttcaccagtgaagacatatcccaaggacccctatcaggaagaagaatggccccaggggtttggtcagttaaccaaggaggggatgctacagcactgggaactgggccaggccctgcggcagcgctatcacggcttcctaaacacctcttatcaccggcaagaggtttatgtgcgaagcacagactttgaccggactctcatgagtgctgaggccaacctggctggactcttccctcccaacgggatgcagcgcttcaacccgaacatctcgtggcagcctattcctgtgcacactgtgcccatcactgaggacaggctgctgaagttcccgttgggcccatgtccccgttatgagcagctgcagaacgagacccggcagacaccagagtatcagaatgagagttctcggaatgcacaatttctggacatggtggccaacgagacagggcttacagacctgacactggagaccgtctggaatgtctatgacacactcttctgtgagcaaacgcacgggctgcgcctgccgccctgggcctcaccccaaaccatgcagcgtctcagccggctaaaggacttcagcttccgcttcctcttcggaatctaccagcaggcggagaaggcccggcttcaggggggagtcctgctggctcagataaggaagaacctgaccctaatggcgaccacctcccagctccccaagctgctggtttactctgcgcacgacactaccctggttgccctgcaaatggcactggatgtctacaatggtgaacaagccccctacgcctcctgccacatatttgaactgtaccaggaagattctgggaatttctcagtggagatgtactttcggaacgagagtgacaaggccccctggccgctcagcctgcctggctgccctcaccgctgcccactgcaggacttccttcgcctcacagagcccgtcgtgcccaaggattggcagcaggagtgccagctggcaagcggtcctgcagacacagaggtgattgtggccttggctgtatgtggctccatcctcttcctcctcatagtgctgctcctcaccgtcctcttccggatgcaggcccagcctcctggctaccgccacgtcgcagatggggaggaccacgcctgacaaccactcagcccccttccctccacctcctaggggaggtgggctgggccctcgctcctgactgttgctgctccccagcccatggacaggagatcctgggttgggcctccctctgatgaccccagccagatgagcgagtggggctcagcgtggcccatggtgcctgtcactcagcattcccatgcctgatgtttaccaagtgctgtgttggacactggctttctccaaacaggatttgcctcctccacgctccctacacacctgaagtcttcggcaaatagctcagagggacacggtcttgcctctcagtgcttattttagtgggaaaaacagctaataccaggggtacaaacattggctcccaaggaactggatcacccaacagccagccagccacatttccctgtgtctggctagagccaccattagactcagacagaatgcttcaggaatcgttgtcaccccttcaactggagcaggacggaaggttgtctgtacttgggagggagtggggagtggtgggaagggagttgcttgtcacacgaatcaggaaactgctctccctcagctgggctggggtctccagggacctgagctacatgcaggttgtgagctggaaaagaaagttctagactgtggcccagaatagggctggggcagctcccagagaatgaatagtgctgtttcctattggactgata

SEQ ID NO: 375932 - DNA, 2221 bp, Homo sapiens
aggtgccacccagcgggttccagcttgtttgctgcatagattacaacggtgatggcgggcaagcggtccggctggagccgggcggctctcctccagctccttctcggcgtgaacctggtggtgatgccgcccacccaggcccggagtctgcgcttcgttaccttgctgtaccgccatggagaccgttcaccagtgaagacatatcccaaggacccctatcaggaagaagaatggccccaggggtttggtcagttaaccaaggaggggatgctacagcactgggaactgggccaggccctgcggcagcgctatcacggcttcctaaacacctcttatcaccggcaagaggtttatgtgcgaagcacagactttgaccggactctcatgagtgctgaggccaacctggctggactcttccctcccaacgggatgcagcgcttcaacccgaacatctcgtggcagcctattcctgtgcacactgtgcccatcactgaggacaggctgctgaagttcccgttgggcccatgtccccgttatgagcagctgcagaacgagacccggcagacaccagagtatcagaatgagagttctcggaatgcacaatttctggacatggtggccaacgagacagggcttacagacctgacactggagaccgtctggaatgtctatgacacactcttctgtgaggcaccttcccactagggaagagagctgccccctggagaggctggcctaggcctggggcgctaacctgcctgctgcgatacacagcaaacgcacgggctgcgcctgccgccctgggcctcaccccaaaccatgcagcgtctcagccggctaaaggacttcagcttccgcttcctcttcggaatctaccagcaggcggagaaggcccggcttcaggggggagtcctgctggctcagataaggaagaacctgaccctaatggcgaccacctcccagctccccaagctgctggtttactctgcgcacgacactaccctggttgccctgcaaatggcactggatgtctacaatggtgaacaagccccctacgcctcctgccacatatttgaactgtaccaggaagattctgggaatttctcagtggagatgtactttcggaacgagagtgacaaggccccctggccgctcagcctgcctggctgccctcaccgctgcccactgcaggacttccttcgcctcacagagcccgtcgtgcccaaggattggcagcaggagtgccagctggcaagcggtcctgcagacacagaggtgattgtggccttggctgtatgtggctccatcctcttcctcctcatagtgctgctcctcaccgtcctcttccggatgcaggcccagcctcctggctaccgccacgtcgcagatggggaggaccacgcctgacaaccactcagcccccttccctccacctcctaggggaggtgggctgggccctcgctcctgactgttgctgctccccagcccatggacaggagatcctgggttgggcctccctctgatgaccccagccagatgagcgagtggggctcagcgtggcccatggtgcctgtcactcagcattcccatgcctgatgtttaccaagtgctgtgttggacactggctttctccaaacaggatttgcctcctccacgctccctacacacctgagatgtaaactggcagtcagtgttcactcaggacctaggattagaaaatggcagagttggtgctggatccaccttgcacttctatcaagccctgttctttttcctccagcctgaagtcttcggcaaatagctcagagggacacggtcttgcctctcagtgcttattttagtgggaaaaacagctaataccaggggtacaaacattggctcccaaggaactggatcacccaacagccagccagccacatttccctgtgtctggctagagccaccattagactcagacagaatgcttcaggaatcgttgtcaccccttcaactggagcaggacggaaggttgtctgtacttgggagggagtggggagtggtgggaagggagttgcttgtcacacgaatcaggaaactgctctccctcagctgggctggggtctccagggacctgagctacatgcaggttgtgagctggaaaagaaagttctagactgtggcccagaatagggctggggcagctcccagagaatgaatagtgctgtttcctattggactgata

SEQ ID NO: 375933 - DNA, 2574 bp, Homo sapiens
aggtgccacccagcgggttccagcttgtttgctgcatagattacaacggtgatggcgggcaagcggtccggctggagccgggcggctctcctccagctccttctcggcgtgaacctggtggtgatgccgcccacccaggcccggagtctgcgcttcgttaccttgctgtaccgccatggagaccgttcaccagtgaagacatatcccaaggacccctatcaggaagaagaatggccccaggggtttggtcagttaaccaaggaggggatgctacagcactgggaactgggccaggccctgcggcagcgctatcacggcttcctaaacacctcttatcaccggcaagaggtttatgtgcgaagcacagactttgaccggactctcatgagtgctgaggccaacctggctggactcttccctcccaacgggatgcagcgcttcaacccgaacatctcgtggcagcctattcctgtgcacactgtgcccatcactgaggacaggctgctgaagttcccgttgggcccatgtccccgttatgagcagctgcagaacgagacccggcagacaccagagtatcagaatgagagttctcggaatgcacaatttctggacatggtggccaacgagacagggcttacagacctgacactggagaccgtctggaatgtctatgacacactcttctgtgaggtgagcccactagggtgcccactgtgatcattcttttccctctcagcaggcccaggtcaccaggacggtagaacacagtgcctgataccgtcacgcccctggggaggtccagggaggctgtgcttgtgaaacacgggaacttccctcatgggtgacagagatcctcagagtgggaaatggtttattaattgtcagcagtccctgctgctctccacccagagctcctttctgctgagtctcactttttgtgcctgagcttcctttcctgtgccctgaagcatccacaccgcctgccatgtctactggttccagcccctctgcctctctcccctctccctccctcacacacacaggcaccttcccactagggaagagagctgccccctggagaggctggcctaggcctggggcgctaacctgcctgctgcgatacacagcaaacgcacgggctgcgcctgccgccctgggcctcaccccaaaccatgcagcgtctcagccggctaaaggacttcagcttccgcttcctcttcggaatctaccagcaggcggagaaggcccggcttcaggggggagtcctgctggctcagataaggaagaacctgaccctaatggcgaccacctcccagctccccaagctgctggtttactctgcgcacgacactaccctggttgccctgcaaatggcactggatgtctacaatggtgaacaagccccctacgcctcctgccacatatttgaactgtaccaggaagattctgggaatttctcagtggagatgtactttcggaacgagagtgacaaggccccctggccgctcagcctgcctggctgccctcaccgctgcccactgcaggacttccttcgcctcacagagcccgtcgtgcccaaggattggcagcaggagtgccagctggcaagcggtcctgcagacacagaggtgattgtggccttggctgtatgtggctccatcctcttcctcctcatagtgctgctcctcaccgtcctcttccggatgcaggcccagcctcctggctaccgccacgtcgcagatggggaggaccacgcctgacaaccactcagcccccttccctccacctcctaggggaggtgggctgggccctcgctcctgactgttgctgctccccagcccatggacaggagatcctgggttgggcctccctctgatgaccccagccagatgagcgagtggggctcagcgtggcccatggtgcctgtcactcagcattcccatgcctgatgtttaccaagtgctgtgttggacactggctttctccaaacaggatttgcctcctccacgctccctacacacctgagatgtaaactggcagtcagtgttcactcaggacctaggattagaaaatggcagagttggtgctggatccaccttgcacttctatcaagccctgttctttttcctccagcctgaagtcttcggcaaatagctcagagggacacggtcttgcctctcagtgcttattttagtgggaaaaacagctaataccaggggtacaaacattggctcccaaggaactggatcacccaacagccagccagccacatttccctgtgtctggctagagccaccattagactcagacagaatgcttcaggaatcgttgtcaccccttcaactggagcaggacggaaggttgtctgtacttgggagggagtggggagtggtgggaagggagttgcttgtcacacgaatcaggaaactgctctccctcagctgggctggggtctccagggacctgagctacatgcaggttgtgagctggaaaagaaagttctagactgtggcccagaatagggctggggcagctcccagagaatgaatagtgctgtttcctattggactgata

SEQ ID NO: 375934 - DNA, 2071 bp, Homo sapiens
aggtgccacccagcgggttccagcttgtttgctgcatagattacaacggtgatggcgggcaagcggtccggctggagccgggcggctctcctccagctccttctcggcgtgaacctggtggtgatgccgcccacccaggcccggagtctgcgcttcgttaccttgctgtaccgccatggagaccgttcaccagtgaagacatatcccaaggacccctatcaggaagaagaatggccccaggggtttggtcagttaaccaaggaggggatgctacagcactgggaactgggccaggccctgcggcagcgctatcacggcttcctaaacacctcttatcaccggcaagaggtttatgtgcgaagcacagactttgaccggactctcatgagtgctgaggccaacctggctggactcttccctcccaacgggatgcagcgcttcaacccgaacatctcgtggcagcctattcctgtgcacactgtgcccatcactgaggacaggagcaggactgagaccctgatccatttttcatagcaatttctggacatggtggccaacgagacagggcttacagacctgacactggagaccgtctggaatgtctatgacacactcttctgtgagcaaacgcacgggctgcgcctgccgccctgggcctcaccccaaaccatgcagcgtctcagccggctaaaggacttcagcttccgcttcctcttcggaatctaccagcaggcggagaaggcccggcttcaggggggagtcctgctggctcagataaggaagaacctgaccctaatggcgaccacctcccagctccccaagctgctggtttactctgcgcacgacactaccctggttgccctgcaaatggcactggatgtctacaatggtgaacaagccccctacgcctcctgccacatatttgaactgtaccaggaagattctgggaatttctcagtggagatgtactttcggaacgagagtgacaaggccccctggccgctcagcctgcctggctgccctcaccgctgcccactgcaggacttccttcgcctcacagagcccgtcgtgcccaaggattggcagcaggagtgccagctggcaagcggtcctgcagacacagaggtgattgtggccttggctgtatgtggctccatcctcttcctcctcatagtgctgctcctcaccgtcctcttccggatgcaggcccagcctcctggctaccgccacgtcgcagatggggaggaccacgcctgacaaccactcagcccccttccctccacctcctaggggaggtgggctgggccctcgctcctgactgttgctgctccccagcccatggacaggagatcctgggttgggcctccctctgatgaccccagccagatgagcgagtggggctcagcgtggcccatggtgcctgtcactcagcattcccatgcctgatgtttaccaagtgctgtgttggacactggctttctccaaacaggatttgcctcctccacgctccctacacacctgagatgtaaactggcagtcagtgttcactcaggacctaggattagaaaatggcagagttggtgctggatccaccttgcacttctatcaagccctgttctttttcctccagcctgaagtcttcggcaaatagctcagagggacacggtcttgcctctcagtgcttattttagtgggaaaaacagctaataccaggggtacaaacattggctcccaaggaactggatcacccaacagccagccagccacatttccctgtgtctggctagagccaccattagactcagacagaatgcttcaggaatcgttgtcaccccttcaactggagcaggacggaaggttgtctgtacttgggagggagtggggagtggtgggaagggagttgcttgtcacacgaatcaggaaactgctctccctcagctgggctggggtctccagggacctgagctacatgcaggttgtgagctggaaaagaaagttctagactgtggcccagaatagggctggggcagctcccagagaatgaatagtgctgtttcctattggactgata

SEQ ID NO: 375935 - DNA, 1930 bp, Homo sapiens
aggtgccacccagcgggttccagcttgtttgctgcatagattacaacggtgatggcgggcaagcggtccggctggagccgggcggctctcctccagctccttctcggcgtgaacctggtggtgatgccgcccacccaggcccggagtctgcgcttcgttaccttgctgtaccgccatggagaccgttcaccagtgaagacatatcccaaggacccctatcaggaagaagaatggccccaggggtttggtcagttaaccaaggaggggatgctacagcactgggaactgggccaggccctgcggcagcgctatcacggcttcctaaacacctcttatcaccggcaagaggtttatgtgcgaagcacagactttgaccggactctcatgagtgctgaggccaacctggctggactcttccctcccaacgggatgcagcgcttcaacccgaacatctcgtggcagcctattcctgtgcacactgtgcccatcactgaggacaggctgctgaagttcccgttgggcccatgtccccgttatgagcagctgcagaacgagacccggcagacaccagagtatcagaatgagagttctcggaatgcacaatttctggacatggtggccaacgagacagggcttacagacctgacactggagaccgtctggaatgtctatgacacactcttctgtgaggttgtgagctggaaaagaaagttctagactgtggcccagaatagggctggggcagctcccagagaatgaatagtgctgtttcctattggactgatagtgctgtttcctgtgctttttcttcatttctgagacgcaagaagctctctgaccaggtcacttctggaagatccacgcagaagctcagtcggtatggttttattggccatatcaaaagtgagcacaaatcaaataactgcttgatccctctgctaccacccactgagaggagaaaagtcatttagttccaagataaccttggttccaggctagatacagaggggcccttgggacagctgtgtcaccaactctggagcagtctctggaggcaagtccagagcattaacataaaagtgtcccagtcccacagtgccccaggtcccagcacccctgctccaaccctaaccttggatacttttggccctttaacaaatcgccacctctgcttgcaggacttgatcccatgtgtgggctccaaggccttgtctggcccacaccttctttagtgtctctcacttccgtgtcctggcttcctcctggctccagatgagaatgtggtaacctaggaagagtgagaccagtctgacttacaccttctgttaccaatctctcagagcctggggctggcccgcaaacctacgatttggtaaagaaatactaggaaggccgggcgcggtggctcaagtctgtaatcccagcactttgggaggctgaggtgggcggatcacgaggtcaggagaccgagaccatcctggctaacacggtgaaaccctgtctctactaaaaatacaaaaaattagctgggcgtggtagcgggcacctgtagtcctagctactcgagaggttgaggcaggagaatggcgtgaacccaggaggcggagcttgcattgagccaagatcacgccactgcactccagcccggggggacagagcgagactccgtctcaaaaaaaaaaaagaaatactaggaaactggacagtagccaggcattgcatgaccaagacaaagccagaggaatggagggccttggctatagagaccactgtctcccagccatcttcttcgtgggccactgccctggggtgaatgtggcagggcggggctgaggctggcccgcactgaaccttgggaagtaggatcggacttggcaagtcagagacattctcctcctactcacccattgcagaggccagcgtgtccccc

SEQ ID NO: 375936 - DNA, 786 bp, Homo sapiens
aggtgccacccagcgggttccagcttgtttgctgcatagattacaacggtgatggcgggcaagcggtccggctggagccgggcggctctcctccagctccttctcggcgtgaacctggtggtgatgccgcccacccaggcccggagtctgcgcttcgttaccttgctgtaccgccatggagaccgttcaccagtgaagacatatcccaaggacccctatcaggaagaagaatggccccaggggtttggtcagttaaccaaggaggggatgctacagcactgggaactgggccaggccctgcggcagcgctatcacggcttcctaaacacctcttatcaccggcaagaggtttatgtgcgaagcacagactttgaccggactctcatgagtgctgaggccaacctggctggactcttccctcccaacgggatgcagcgcttcaacccgaacatctcgtggcagcctattcctgtgcacactgtgcccatcactgaggacaggctgctgaagttcccgttgggcccatgtccccgttatgagcagctgcagaacgagacccggcagacaccagagtatcagaatgagagttctcggaatgcacaatttctggacatggtggccaacgagacagggcttacagacctgacactggagaccgtctggaatgtctatgacacactcttctgtgaggttgtgagctggaaaagaaagttctagactgtggcccagaatagggctggggcagctcccagagaatgaatagtgctgtttcctattggactgata

SEQ ID NO: 375937 - DNA, 924 bp, Homo sapiens
aggtgccacccagcgggttccagcttgtttgctgcatagattacaacggtgatggcgggcaagcggtccggctggagccgggcggctctcctccagctccttctcggcgtgaacctggtggtgatgccgcccacccaggcccggagtctgcgcttcgttaccttgctgtaccgccatggagaccgttcaccagtgaagacatatcccaaggacccctatcaggaagaagaatggccccaggggtttggtcagttaaccaaggaggggatgctacagcactgggaactgggccaggccctgcggcagcgctatcacggcttcctaaacacctcttatcaccggcaagaggtttatgtgcgaagcacagactttgaccggactctcatgagtgctgaggccaacctggctggactcttccctcccaacgggatgcagcgcttcaacccgaacatctcgtggcagcctattcctgtgcacactgtgcccatcactgaggacaggctgctgaagttcccgttgggcccatgtccccgttatgagcagctgcagaacgagacccggcagacaccagagtatcagaatgagagttctcggaatgcacaatttctggacatggtggccaacgagacagggcttacagacctgacactggagaccgtctggaatgtctatgacacactcttctgtgagcaaacgcacgggctgcgcctgccgccctgggcctcaccccaaaccatgcagcgtctcagccggctaaaggacttcagcttccgcttcctcttcggaatctaccagcaggcggagaaggcccggcttcaggggggagtcctgctggctcagataaggaagaacctgaccctaatggcgaccacctcccagctcccagagaatgaatagtgctgtttcctattggaaaaaaaaaaa

SEQ ID NO: 375938 - DNA, 2137 bp, Homo sapiens
aggtgccacccagcgggttccagcttgtttgctgcatagattacaacggtgatggcgggcaagcggtccggctggagccgggcggctctcctccagctccttctcggcgtgaacctggtggtgatgccgcccacccaggcccggagtctgcgcttcgttaccttgctgtaccgccatggagaccgttcaccagtgaagacatatcccaaggacccctatcaggaagaagaatggccccaggggtttggtcagttaaccaaggaggggatgctacagcactgggaactgggccaggccctgcggcagcgctatcacggcttcctaaacacctcttatcaccggcaagaggtttatgtgcgaagcacagactttgaccggactctcatgagtgctgaggccaacctggctggactcttccctcccaacgggatgcagcgcttcaacccgaacatctcgtggcagcctattcctgtgcacactgtgcccatcactgaggacaggctgctgaagttcccgttgggcccatgtccccgttatgagcagctgcagaacgagacccggcagacaccagagtatcagaatgagagttctcggaatgcacaatttctggacatggtggccaacgagacagggcttacagacctgacactggagaccgtctggaatgtctatgacacactcttctgtgagcaaacgcacgggctgcgcctgccgccctgggcctcaccccaaaccatgcagcgtctcagccggctaaaggacttcagcttccgcttcctcttcggaatctaccagcaggcggagaaggcccggcttcaggggggagtcctgctggctcagataaggaagaacctgaccctaatggcgaccacctcccagctccccaagctgctggtttactctgcgcacgacactaccctggttgccctgcaaatggcactggatgtctacaatggtgaacaagccccctacgcctcctgccacatatttgaactgtaccaggaagattctgggaatttctcagtggagatgtactttcggaacgagagtgacaaggccccctggccgctcagcctgcctggctgccctcaccgctgcccactgcaggacttccttcgcctcacagagcccgtcgtgcccaaggattggcagcaggagtgccagctggcaagcggtcctgcagacacagaggtgattgtggccttggctgtatgtggctccatcctcttcctcctcatagtgctgctcctcaccgtcctcttccggatgcaggcccagcctcctggctaccgccacgtcgcagatggggaggaccacgcctgacaaccactcagcccccttccctccacctcctaggggaggtgggctgggccctcgctcctgactgttgctgctccccagcccatggacaggagatcctgggttgggcctccctctgatgaccccagccagatgagcgagtggggctcagcgtggcccatggtgcctgtcactcagcattcccatgcctgatgtttaccaagtgctgtgttggacactggctttctccaaacaggatttgcctcctccacgctccctacacacctgagatgtaaactggcagtcagtgttcactcaggacctaggattagaaaatggcagagttggtgctggatccaccttgcacttctatcaagccctgttctttttcctccagcctgaagtcttcggcaaatagctcagagggacacggtcttgcctctcagtgcttattttagtgggaaaaacagctaataccaggggtacaaacattggctcccaaggaactggatcacccaacagccagccagccacatttccctgtgtctggctagagccaccattagactcagacagaatgcttcaggaatcgttgtcaccccttcaactggagcaggacggaaggttgtctgtacttgggagggagtggggagtggtgggaagggagttgcttgtcacacgaatcaggaaactgctctccctcagctgggctggggtctccagggacctgagctacatgcaggttgtgagctggaaaagaaagttctagactgtggcccagaatagggctggggcagctcccagagaatgaatagtgctgtttcctattggactgata

SEQ ID NO: 375939 - DNA, 3281 bp, Homo sapiens
aggtgccacccagcgggttccagcttgtttgctgcatagattacaacggtgatggcgggcaagcggtccggctggagccgggcggctctcctccagctccttctcggcgtgaacctggtggtgatgccgcccacccaggcccggagtctgcgcttcgttaccttgctgtaccgccatggagaccgttcaccagtgaagacatatcccaaggacccctatcaggaagaagaatggccccaggggtttggtcagttaaccaaggaggggatgctacagcactgggaactgggccaggccctgcggcagcgctatcacggcttcctaaacacctcttatcaccggcaagaggtttatgtgcgaagcacagactttgaccggactctcatgagtgctgaggccaacctggctggactcttccctcccaacgggatgcagcgcttcaacccgaacatctcgtggcagcctattcctgtgcacactgtgcccatcactgaggacaggctgctgaagttcccgttgggcccatgtccccgttatgagcagctgcagaacgagacccggcagacaccagagtatcagaatgagagttctcggaatgcacaatttctggacatggtggccaacgagacagggcttacagacctgacactggagaccgtctggaatgtctatgacacactcttctgtgagcaaacgcacgggctgcgcctgccgccctgggcctcaccccaaaccatgcagcgtctcagccggctaaaggacttcagcttccgcttcctcttcggaatctaccagcaggcggagaaggcccggcttcaggggggagtcctgctggctcagataaggaagaacctgaccctaatggcgaccacctcccagctccccaagctgctggtttactctgcgcacgacactaccctggttgccctgcaaatggcactggatgtctacaatggtgaacaagccccctacgcctcctgccacatatttgaactgtaccaggaagattctgggaatttctcagtggagatgtactttcggaacgagagtgacaaggccccctggccgctcagcctgcctggctgccctcaccgctgcccactgcaggacttccttcgcctcacagagcccgtcgtgcccaaggattggcagcaggagtgccagctggcaagcggtcctgcagacacagaggtgattgtggccttggctgtatgtggctccatcctcttcctcctcatagtgctgctcctcaccgtcctcttccggatgcaggcccagcctcctggctaccgccacgtcgcagatggggaggaccacgcctgacaaccactcagcccccttccctccacctcctaggggaggtgggctgggccctcgctcctgactgttgctgctccccagcccatggacaggagatcctgggttgggcctccctctgatgaccccagccagatgagcgagtggggctcagcgtggcccatggtgcctgtcactcagcattcccatgcctgatgtttaccaagtgctgtgttggacactggctttctccaaacaggatttgcctcctccacgctccctacacacctgagatgtaaactggcagtcagtgttcactcaggacctaggattagaaaatggcagagttggtgctggatccaccttgcacttctatcaagccctgttctttttcctccagcctgaagtcttcggcaaatagctcagagggacacggtcttgcctctcagtgcttattttagtgggaaaaacagctaataccaggggtacaaacattggctcccaaggaactggatcacccaacagccagccagccacatttccctgtgtctggctagagccaccattagactcagacagaatgcttcaggaatcgttgtcaccccttcaactggagcaggacggaaggttgtctgtacttgggagggagtggggagtggtgggaagggagttgcttgtcacacgaatcaggaaactgctctccctcagctgggctggggtctccagggacctgagctacatgcaggttgtgagctggaaaagaaagttctagactgtggcccagaatagggctggggcagctcccagagaatgaatagtgctgtttcctattggactgatagtgctgtttcctgtgctttttcttcatttctgagacgcaagaagctctctgaccaggtcacttctggaagatccacgcagaagctcagtcggtatggttttattggccatatcaaaagtgagcacaaatcaaataactgcttgatccctctgctaccacccactgagaggagaaaagtcatttagttccaagataaccttggttccaggctagatacagaggggcccttgggacagctgtgtcaccaactctggagcagtctctggaggcaagtccagagcattaacataaaagtgtcccagtcccacagtgccccaggtcccagcacccctgctccaaccctaaccttggatacttttggccctttaacaaatcgccacctctgcttgcaggacttgatcccatgtgtgggctccaaggccttgtctggcccacaccttctttagtgtctctcacttccgtgtcctggcttcctcctggctccagatgagaatgtggtaacctaggaagagtgagaccagtctgacttacaccttctgttaccaatctctcagagcctggggctggcccgcaaacctacgatttggtaaagaaatactaggaaggccgggcgcggtggctcaagtctgtaatcccagcactttgggaggctgaggtgggcggatcacgaggtcaggagaccgagaccatcctggctaacacggtgaaaccctgtctctactaaaaatacaaaaaattagctgggcgtggtagcgggcacctgtagtcctagctactcgagaggttgaggcaggagaatggcgtgaacccaggaggcggagcttgcattgagccaagatcacgccactgcactccagcccggggggacagagcgagactccgtctcaaaaaaaaaaaagaaatactaggaaactggacagtagccaggcattgcatgaccaagacaaagccagaggaatggagggccttggctatagagaccactgtctcccagccatcttcttcgtgggccactgccctggggtgaatgtggcagggcggggctgaggctggcccgcactgaaccttgggaagtaggatcggacttggcaagtcagagacattctcctcctactcacccattgcagaggccagcgtgtccccc

SEQ ID NO: 375940 - DNA, 3227 bp, Homo sapiens
aggtgccacccagcgggttccagcttgtttgctgcatagattacaacggtgatggcgggcaagcggtccggctggagccgggcggctctcctccagctccttctcggcgtgaacctggtggtgatgccgcccacccaggcccggagtctgcgcttcgttaccttgctgtaccgccatggagaccgttcaccagtgaagacatatcccaaggacccctatcaggaagaagaatggccccaggggtttggtcagttaaccaaggaggggatgctacagcactgggaactgggccaggccctgcggcagcgctatcacggcttcctaaacacctcttatcaccggcaagaggtttatgtgcgaagcacagactttgaccggactctcatgagtgctgaggccaacctggctggactcttccctcccaacgggatgcagcgcttcaacccgaacatctcgtggcagcctattcctgtgcacactgtgcccatcactgaggacaggctgctgaagttcccgttgggcccatgtccccgttatgagcagctgcagaacgagacccggcagacaccagagtatcagaatgagagttctcggaatgcacaatttctggacatggtggccaacgagacagggcttacagacctgacactggagaccgtctggaatgtctatgacacactcttctgtgagcaaacgcacgggctgcgcctgccgccctgggcctcaccccaaaccatgcagcgtctcagccggctaaaggacttcagcttccgcttcctcttcggaatctaccagcaggcggagaaggcccggcttcaggggggagtcctgctggctcagataaggaagaacctgaccctaatggcgaccacctcccagctccccaagctgctggtttactctgcgcacgacactaccctggttgccctgcaaatggcactggatgtctacaatggtgaacaagccccctacgcctcctgccacatatttgaactgtaccaggaagattctgggaatttctcagtggagatgtactttcggaacgagagtgacaaggccccctggccgctcagcctgcctggctgccctcaccgctgcccactgcaggacttccttcgcctcacagagcccgtcgtgcccaaggattggcagcaggagtgccagctggcaagcggtcctgcagacacagaggtgattgtggccttggctgtatgtggctccatcctcttcctcctcatagtgctgctcctcaccgtcctcttccggatgcaggcccagcctcctggctaccgccacgtcgcagatggggaggaccacgcctgacaaccactcagcccccttccctccacctcctaggggaggtgggctgggccctcgctcctgactgttgctgctccccagcccatggacaggagatcctgggttgggcctccctctgatgaccccagccagatgagcgagtggggctcagcgtggcccatggtgcctgtcactcagcattcccatgcctgatgtttaccaagtgctgtgttggacactggctttctccaaacaggatttgcctcctccacgctccctacacacctgagatgtaaactggcagtcagtgttcactcaggacctaggattagaaaatggcagagttggtgctggatccaccttgcacttctatcaagccctgttctttttcctccagcctgaagtcttcggcaaatagctcagagggacacggtcttgcctctcagtgcttattttagtgggaaacagccagccagccacatttccctgtgtctggctagagccaccattagactcagacagaatgcttcaggaatcgttgtcaccccttcaactggagcaggacggaaggttgtctgtacttgggagggagtggggagtggtgggaagggagttgcttgtcacacgaatcaggaaactgctctccctcagctgggctggggtctccagggacctgagctacatgcaggttgtgagctggaaaagaaagttctagactgtggcccagaatagggctggggcagctcccagagaatgaatagtgctgtttcctattggactgatagtgctgtttcctgtgctttttcttcatttctgagacgcaagaagctctctgaccaggtcacttctggaagatccacgcagaagctcagtcggtatggttttattggccatatcaaaagtgagcacaaatcaaataactgcttgatccctctgctaccacccactgagaggagaaaagtcatttagttccaagataaccttggttccaggctagatacagaggggcccttgggacagctgtgtcaccaactctggagcagtctctggaggcaagtccagagcattaacataaaagtgtcccagtcccacagtgccccaggtcccagcacccctgctccaaccctaaccttggatacttttggccctttaacaaatcgccacctctgcttgcaggacttgatcccatgtgtgggctccaaggccttgtctggcccacaccttctttagtgtctctcacttccgtgtcctggcttcctcctggctccagatgagaatgtggtaacctaggaagagtgagaccagtctgacttacaccttctgttaccaatctctcagagcctggggctggcccgcaaacctacgatttggtaaagaaatactaggaaggccgggcgcggtggctcaagtctgtaatcccagcactttgggaggctgaggtgggcggatcacgaggtcaggagaccgagaccatcctggctaacacggtgaaaccctgtctctactaaaaatacaaaaaattagctgggcgtggtagcgggcacctgtagtcctagctactcgagaggttgaggcaggagaatggcgtgaacccaggaggcggagcttgcattgagccaagatcacgccactgcactccagcccggggggacagagcgagactccgtctcaaaaaaaaaaaagaaatactaggaaactggacagtagccaggcattgcatgaccaagacaaagccagaggaatggagggccttggctatagagaccactgtctcccagccatcttcttcgtgggccactgccctggggtgaatgtggcagggcggggctgaggctggcccgcactgaaccttgggaagtaggatcggacttggcaagtcagagacattctcctcctactcacccattgcagaggccagcgtgtccccc

SEQ ID NO: 375941 - DNA, 2093 bp, Homo sapiens
aggtgccacccagcgggttccagcttgtttgctgcatagattacaacggtgatggcgggcaagcggtccggctggagccgggcggctctcctccagctccttctcggcgtgaacctggtggtgatgccgcccacccaggcccggagtctgcgcttcgttaccttgctgtaccgccatggagaccgttcaccagtgaagacatatcccaaggacccctatcaggaagaagaatggccccaggggtttggtcagttaaccaaggaggggatgctacagcactgggaactgggccaggccctgcggcagcgctatcacggcttcctaaacacctcttatcaccggcaagaggtttatgtgcgaagcacagactttgaccggactctcatgagtgctgaggccaacctggctggactcttccctcccaacgggatgcagcgcttcaacccgaacatctcgtggcagcctattcctgtgcacactgtgcccatcactgaggacaggctgctgaagttcccgttgggcccatgtccccgttatgagcagctgcagaacgagacccggcagacaccagagtatcagaatgagagttctcggaatgcacaatttctggacatggtggccaacgagacagggcttacagacctgacactggagaccgtctggaatgtctatgacacactcttctgtgagcaaacgcacgggctgcgcctgccgccctgggcctcaccccaaaccatgcagcgtctcagccggctaaaggacttcagcttccgcttcctcttcggaatctaccagcaggcggagaaggcccggcttcaggggggagtcctgctggctcagataaggaagaacctgaccctaatggcgaccacctcccagctccccaagctgctggtttactctgcgcacgacactaccctggttgccctgcaaatggcactggatgtctacaatggtgaacaagccccctacgcctcctgccacatatttgaactgtaccaggaagattctgggaatttctcagtggagatgtactttcggaacgagagtgacaaggccccctggccgctcagcctgcctggctgccctcaccgctgcccactgcaggacttccttcgcctcacagagcccgtcgtgcccaaggattggcagcaggagtgccagctggcaagcggtcctgcagacacagaggtgattgtggccttggctgtatgtggctccatcctcttcctcctcatagtgctgctcctcaccgtcctcttccggatgcaggcccagcctcctggctaccgccacgtcgcagatggggaggaccacgcctgacaaccactcagcccccttccctccacctcctaggggaggtgggctgggccctcgctcctgactgttgctgctccccagcccatggacaggagatcctgggttgggcctccctctgatgaccccagccagatgagcgagtggggctcagcgtggcccatggtgcctgtcactcagcattcccatgcctgatgtttaccaagtgctgtgttggacactggctttctccaaacaggatttgcctcctccacgctccctacacacctgagatgtaaactggcagtcagtgttcactcaggacctaggattagaaaatggcagagttggtgctggatccaccttgcacttctatcaagccctgttctttttcctccagcctgaagtcttcggcaaatagctcagagggacacggtcttgcctctcagtgcttattttagtgggaaacagccagccagccacatttccctgtgtctggctagagccaccattagactcagacagaatgcttcaggaatcgttgtcaccccttcaactggagcaggacggaaggttgtctgtacttgggagggagtggggagtggtgggaagggagttgcttgtcacacgaatcaggaaactgctctccctcagctgggctggggtctccagggacctgagctacatgcagtgtagctgaaagaagtctgatgtgcagataggctggagtcctgatggctgtcatgctgagctgtctggtttttattgacagactttcagacttgaacacctcgtgt

SEQ ID NO: 375942 - DNA, 1929 bp, Homo sapiens
aggtgccacccagcgggttccagcttgtttgctgcatagattacaacggtgatggcgggcaagcggtccggctggagccgggcggctctcctccagctccttctcggcgtgaacctggtggtgatgccgcccacccaggcccggagtctgcgcttcgttaccttgctgtaccgccatggagaccgttcaccagtgaagacatatcccaaggacccctatcaggaagaagaatggccccaggggtttggtcagttaaccaaggaggggatgctacagcactgggaactgggccaggccctgcggcagcgctatcacggcttcctaaacacctcttatcaccggcaagaggtttatgtgcgaagcacagactttgaccggactctcatgagtgctgaggccaacctggctggactcttccctcccaacgggatgcagcgcttcaacccgaacatctcgtggcagcctattcctgtgcacactgtgcccatcactgaggacaggctgctgaagttcccgttgggcccatgtccccgttatgagcagctgcagaacgagacccggcagacaccagagtatcagaatgagagttctcggaatgcacaatttctggacatggtggccaacgagacagggcttacagacctctgaccctaatggcgaccacctcccagctccccaagctgctggtttactctgcgcacgacactaccctggttgccctgcaaatggcactggatgtctacaatggtgaacaagccccctacgcctcctgccacatatttgaactgtaccaggaagattctgggaatttctcagtggagatgtactttcggaacgagagtgacaaggccccctggccgctcagcctgcctggctgccctcaccgctgcccactgcaggacttccttcgcctcacagagcccgtcgtgcccaaggattggcagcaggagtgccagctggcaagcggtcctgcagacacagaggtgattgtggccttggctgtatgtggctccatcctcttcctcctcatagtgctgctcctcaccgtcctcttccggatgcaggcccagcctcctggctaccgccacgtcgcagatggggaggaccacgcctgacaaccactcagcccccttccctccacctcctaggggaggtgggctgggccctcgctcctgactgttgctgctccccagcccatggacaggagatcctgggttgggcctccctctgatgaccccagccagatgagcgagtggggctcagcgtggcccatggtgcctgtcactcagcattcccatgcctgatgtttaccaagtgctgtgttggacactggctttctccaaacaggatttgcctcctccacgctccctacacacctgagatgtaaactggcagtcagtgttcactcaggacctaggattagaaaatggcagagttggtgctggatccaccttgcacttctatcaagccctgttctttttcctccagcctgaagtcttcggcaaatagctcagagggacacggtcttgcctctcagtgcttattttagtgggaaaaacagctaataccaggggtacaaacattggctcccaaggaactggatcacccaacagccagccagccacatttccctgtgtctggctagagccaccattagactcagacagaatgcttcaggaatcgttgtcaccccttcaactggagcaggacggaaggttgtctgtacttgggagggagtggggagtggtgggaagggagttgcttgtcacacgaatcaggaaactgctctccctcagctgggctggggtctccagggacctgagctacatgcaggttgtgagctggaaaagaaagttctagactgtggcccagaatagggctggggcagctcccagagaatgaatagtgctgtttcctattggactgata

SEQ ID NO: 375943 - DNA, 2508 bp, Homo sapiens
aggtgccacccagcgggttccagcttgtttgctgcatagattacaacggtgatggcgggcaagcggtccggctggagccgggcggctctcctccagctccttctcggcgtgaacctggtggtgatgccgcccacccaggcccggagtctgcgcttcgttaccttgctgtaccgccatggagaccgttcaccagtgaagacatatcccaaggacccctatcaggaagaagaatggccccaggggtttggtcagttaaccaaggaggggatgctacagcactgggaactgggccaggccctgcggcagcgctatcacggcttcctaaacacctcttatcaccggcaagaggtttatgtgcgaagcacagactttgaccggactctcatgagtgctgaggccaacctggctggactcttccctcccaacgggatgcagcgcttcaacccgaacatctcgtggcagcctattcctgtgcacactgtgcccatcactgaggacaggagcaggactgagaccctgatccatttttcatagcaatttctggacatggtggccaacgagacagggcttacagacctgacactggagaccgtctggaatgtctatgacacactcttctgtgaggtgagcccactagggtgcccactgtgatcattcttttccctctcagcaggcccaggtcaccaggacggtagaacacagtgcctgataccgtcacgcccctggggaggtccagggaggctgtgcttgtgaaacacgggaacttccctcatgggtgacagagatcctcagagtgggaaatggtttattaattgtcagcagtccctgctgctctccacccagagctcctttctgctgagtctcactttttgtgcctgagcttcctttcctgtgccctgaagcatccacaccgcctgccatgtctactggttccagcccctctgcctctctcccctctccctccctcacacacacaggcaccttcccactagggaagagagctgccccctggagaggctggcctaggcctggggcgctaacctgcctgctgcgatacacagcaaacgcacgggctgcgcctgccgccctgggcctcaccccaaaccatgcagcgtctcagccggctaaaggacttcagcttccgcttcctcttcggaatctaccagcaggcggagaaggcccggcttcaggggggagtcctgctggctcagataaggaagaacctgaccctaatggcgaccacctcccagctccccaagctgctggtttactctgcgcacgacactaccctggttgccctgcaaatggcactggatgtctacaatggtgaacaagccccctacgcctcctgccacatatttgaactgtaccaggaagattctgggaatttctcagtggagatgtactttcggaacgagagtgacaaggccccctggccgctcagcctgcctggctgccctcaccgctgcccactgcaggacttccttcgcctcacagagcccgtcgtgcccaaggattggcagcaggagtgccagctggcaagcggtcctgcagacacagaggtgattgtggccttggctgtatgtggctccatcctcttcctcctcatagtgctgctcctcaccgtcctcttccggatgcaggcccagcctcctggctaccgccacgtcgcagatggggaggaccacgcctgacaaccactcagcccccttccctccacctcctaggggaggtgggctgggccctcgctcctgactgttgctgctccccagcccatggacaggagatcctgggttgggcctccctctgatgaccccagccagatgagcgagtggggctcagcgtggcccatggtgcctgtcactcagcattcccatgcctgatgtttaccaagtgctgtgttggacactggctttctccaaacaggatttgcctcctccacgctccctacacacctgagatgtaaactggcagtcagtgttcactcaggacctaggattagaaaatggcagagttggtgctggatccaccttgcacttctatcaagccctgttctttttcctccagcctgaagtcttcggcaaatagctcagagggacacggtcttgcctctcagtgcttattttagtgggaaaaacagctaataccaggggtacaaacattggctcccaaggaactggatcacccaacagccagccagccacatttccctgtgtctggctagagccaccattagactcagacagaatgcttcaggaatcgttgtcaccccttcaactggagcaggacggaaggttgtctgtacttgggagggagtggggagtggtgggaagggagttgcttgtcacacgaatcaggaaactgctctccctcagctgggctggggtctccagggacctgagctacatgcaggttgtgagctggaaaagaaagttctagactgtggcccagaatagggctggggcagctcccagagaatgaatagtgctgtttcctattggactgata

SEQ ID NO: 375944 - DNA, 2059 bp, Homo sapiens
aggtgccacccagcgggttccagcttgtttgctgcatagattacaacggtgatggcgggcaagcggtccggctggagccgggcggctctcctccagctccttctcggcgtgaacctggtggtgatgccgcccacccaggcccggagtctgcgcttcgttaccttgctgtaccgccatggagaccgttcaccagtgaagacatatcccaaggacccctatcaggaagaagaatggccccaggggtttggtcagttaaccaaggaggggatgctacagcactgggaactgggccaggccctgcggcagcgctatcacggcttcctaaacacctcttatcaccggcaagaggtttatgtgcgaagcacagactttgaccggactctcatgagtgctgaggccaacctggctggactcttccctcccaacgggatgcagcgcttcaacccgaacatctcgtggcagcctattcctgtgcacactgtgcccatcactgaggacaggctgctgaagttcccgttgggcccatgtccccgttatgagcagctgcagaacgagacccggcagacgacactggagaccgtctggaatgtctatgacacactcttctgtgagcaaacgcacgggctgcgcctgccgccctgggcctcaccccaaaccatgcagcgtctcagccggctaaaggacttcagcttccgcttcctcttcggaatctaccagcaggcggagaaggcccggcttcaggggggagtcctgctggctcagataaggaagaacctgaccctaatggcgaccacctcccagctccccaagctgctggtttactctgcgcacgacactaccctggttgccctgcaaatggcactggatgtctacaatggtgaacaagccccctacgcctcctgccacatatttgaactgtaccaggaagattctgggaatttctcagtggagatgtactttcggaacgagagtgacaaggccccctggccgctcagcctgcctggctgccctcaccgctgcccactgcaggacttccttcgcctcacagagcccgtcgtgcccaaggattggcagcaggagtgccagctggcaagcggtcctgcagacacagaggtgattgtggccttggctgtatgtggctccatcctcttcctcctcatagtgctgctcctcaccgtcctcttccggatgcaggcccagcctcctggctaccgccacgtcgcagatggggaggaccacgcctgacaaccactcagcccccttccctccacctcctaggggaggtgggctgggccctcgctcctgactgttgctgctccccagcccatggacaggagatcctgggttgggcctccctctgatgaccccagccagatgagcgagtggggctcagcgtggcccatggtgcctgtcactcagcattcccatgcctgatgtttaccaagtgctgtgttggacactggctttctccaaacaggatttgcctcctccacgctccctacacacctgagatgtaaactggcagtcagtgttcactcaggacctaggattagaaaatggcagagttggtgctggatccaccttgcacttctatcaagccctgttctttttcctccagcctgaagtcttcggcaaatagctcagagggacacggtcttgcctctcagtgcttattttagtgggaaaaacagctaataccaggggtacaaacattggctcccaaggaactggatcacccaacagccagccagccacatttccctgtgtctggctagagccaccattagactcagacagaatgcttcaggaatcgttgtcaccccttcaactggagcaggacggaaggttgtctgtacttgggagggagtggggagtggtgggaagggagttgcttgtcacacgaatcaggaaactgctctccctcagctgggctggggtctccagggacctgagctacatgcaggttgtgagctggaaaagaaagttctagactgtggcccagaatagggctggggcagctcccagagaatgaatagtgctgtttcctattggactgata

SEQ ID NO: 375945 - DNA, 3533 bp, Homo sapiens
  misc_feature (1782)..(1782): n is a, c, g, or t
gcggccgtgtccctccgcggcggctgcgaggcggtgcggcggctgaggcggccgaggcggccagttgggtaccgggaggggcgaaggcgggcggcagaggcgatcagaagtttccaagggtcacttgtgtctcgtccgtgggaagaccgggggagcccagaaggccttggtgtggaattctgagagctgattcctgccttgtcttctccactgttcctggaggaatccgagaagagcagagcggagggagccccagacacggtccgcgggagagctgtggggcttggtgagtgtttcgtggcctctcgggttggtcagcacccccagccagctggcccaggacccctctacagaagtccaggagagcaggcgtcaccaagatgtccaaccccttcctgaagcaagtcttcaacaaggacaagacattccgccccaagcgcaagtttgagccgggcacccagcgcttcgagctgcacaagaaggcgcaggcgtcgctgaacgccgggctggacctgcggctggccgtgcagctgcccccgggcgaggacctgaacgactgggtggctgttcacgtggtggacttctttaaccgcgtcaacctcatctacggcaccatcagcgacggctgcacggagcagtcctgccccgtcatgtcggggggccccaagtatgagtaccgctggcaggatgagcataagttccggaagcccacggcactctccgcgcccaggtacatggacctgctgatggactggatcgaggcgcagatcaacaacgaggacctcttccccaccaacgttggcactccgtttcccaagaacttcctgcagacggtgcggaagatcctgtcgcggctgttccgcgtgttcgtgcacgtctacatccaccactttgaccgcatcgcgcagatgggctccgaggcccacgtgaacacctgctacaagcacttctactatttcgtcaaggagttcggcctcatcgacaccaaggagctggagccactgaaagaaatgaccgcccggatgtgccactgagagccccgcgggtctcccggtgcccgaaccgccgctggggcctcggagacttggaggaggacgctctggaaccatcatcccgcttctctccggcctgagcatctcagggagaccaggggccgagccgctgagcaggtgttggtcctcaggagctccaaccccggacggcagatgccttcctcagtctcgagcctcagtctcccgtctgggactaaaacgtgaactctgtaattctatgtgttactagcaaccggaaaagcccactgtgtttttaaaccacttccactttccaggaggctggatggcttccagggtcactccttgccctgggtggctcccaggctcctggaacttctgcctccacctcgctggggagcccccagggctgctgtggccacagccctgcctgggcctgtctctcaagggcacccagcttgctcggcctcctacatgtctcccgttggggaggcaagaggctgaggggcttccgagcccctgagagcggacatctcctcccgcaggcctttactccgcactccccactggcagccgctggtgtctcttcacacagaggcacaacctggacccaggcagcctctttcctccctccccaatctcttccatttttctacagatttttttttttttggtcatactagagacaggggtctcgctgaactcctggcctccagtgatcctccatcctcggcctcccaaagtgctggaatcacaggggtgagccaccgcncccagccctctctcttcctcaatgcactctgcttcttccgttcttccgaaacattcagctgactgtatccagggcttcctggactcctgggaccccacgtcctgcaccccggcttctgactcatttcctaagggcccctttgtgtatcataaagggtttgatttttatagtcacatttacaaccatcttgagatttttattttttttgaacggagtctcccactgtcgcccagactggagtccagtggcacaatctcggctcactgcatcctccacctcctgggttcaagtgattctcctgcttcagcctcccaagtagctgggattacaggtgtgcgccaccacgcccaggaaattatgtagttttagtagagacaagatttcaccatgttggccaggctggtctcaaactcctgacttcaggtgatccgcctaccttggcctccaaaagtgctgggattacaggcatgagctactgcacccggcctaaccaggctggagtgcagtggtgggatctcggctcactgcaagctccgcctcccagattcacgccattctcctgcctcagcctccccagcagctgggactacaggcacccaccgtcacgcccggctaatttttttgtattttagtagagacagggtttcaccgtgttagccaggatggtcttgatctcctgaccttgtgatccaccagcctcagcctcccaaagtgctgggattacaggcgtgagccactgtgcccggccaagaatttttttatcgataacatagtgagctctctgcctcttcggaacgatgtccactttgcttatgatcaacccaagcaggactcttctctccctggacgcctctcccctggtctggaatcttccagttctgccagaattggcctttcccagatgctgcaaacttccagttgaacccctttttctgtgtggcccctggggctgcgagaccaaaatccatgagttctgtgtaccctagacctttggaaggtgagagcagggccctgagaaaaggcagccacctcctctccctggctgaacccctgccaccctactcctcaccagaattgtcagtggcctttcaccacagtggtccttcctgcctgagccctgcactgtcccagaccacacagaagtctggtcacctctgggcgcctgggatggtcaccgaagagaagcacgctgtccccgtctctcctggcttctgccagaaaatcgaacaagtgcaattaacacactgttactgccgaagcctgaaactcccaggacttgtccttgatccttccagaaaccaccaggtccggcacttggagccccccggagagggacctcccagccgagccctcaaagaactccatgaaatcaggaactgcttgatgaaatgtatctccttgtacctggaagatgaagcccaaacacccacacctctgtctcccccagggctcgggatgtctccagcagcccggccacgcagcttcccaggtgggctcggggaggtgggagcagggaccatctctgtcccctccaccctcactccatccacctcggagaccaccctcccccagccagatacggaataaaactacagacgcagacgtcggaataaaaacacaaaaacaaaaaaaaaaacactgggggcttaattagggcgcggcaaaaaggttttaaatgcctggctctctttctcgccccttttttcaaggggaatccggcccatagggccatatcaacggcctttaccgaa

SEQ ID NO: 375946 - DNA, 707 bp, Homo sapiens
cgtacatgtcatagctttccatgagtacaccccttccccacagtgagcagtgatggcccgaatgttattatgacatggtgagctctctgcctcttcggaacgatgtccactttgcttatgatcaacccaagcaggactcttctctccctggacgcctctcccctggtctggaatcttccagttctgccagaattggcctttcccagatgcctgcactgtcccagaccacacagaagtctggtcacctctgggcgcctgggatggtcaccgaagagaagcacgctgtccccgtctctcctggcttctgccagaaaatcgaacaagtgcaattaacacactgttactgccgaagcctgaaactcccaggacttgtccttgatccttccagaaaccaccaggtccggcacttggagccccccggagagggacctcccagccgagccctcaaagaactccatgaaatcaggaactgcttgatgaaatgtatctccttgtacctggaagatgaagcccaaacacccacacctctgtctcccccagggctcgggatgtctccagcagcccggccacgcagcttcccaggtgggctcggggaggtgggagcagggaccatctctgtcccctccaccctcactccatccacctcggagaccaccctcccccagccagatacggaataaaactacagacgcagacgtcggaataaa

SEQ ID NO: 375947 - DNA, 586 bp, Homo sapiens
tccgacgtttgcgtctgtagttttattccgtatctggctgggggagggtggtctccgaggtggatggagtgagggtggagggctcagccctgcactgtcccagaccacacagaagtctggtcacctctgggcgcctgggatggtcaccgaagagaagcacgctgtccccgtctctcctggcttctgccagaaaatcgaacaagtgcaattaacacactgttactgccgaagcctgaaactcccaggacttgtccttgatccttccagaaaccaccaggtccggcacttggagccccccggagagggacctcccagccgagccctcaaagaactccatgaaatcaggaactgcttgatgaaatgtatctccttgtacctggaagatgaagcccaaacacccacacctctgtctcccccagggctcgggatgtctccagcagcccggccacgcagcttcccaggtgggctcggggaggtgggagcagggaccatctctgtcccctccaccctcactccatccacctcggagaccaccctcccccagccagatacggaataaaactacagacgcagacgtcggaataaa

SEQ ID NO: 375948 - DNA, 1163 bp, Homo sapiens
gcggccgtgtccctccgcggcggctgcgaggcggtgcggcggctgaggcggccgaggcggccagttgggtaccgggaggggcgaaggcgggcggcagaggcgatcagaagtttccaagggtcacttgtgtctcgtccgtgggaagaccgggggagcccagaaggccttggtgtggaattctgagagctgattcctgccttgtcttctccactgttcctggaggaatccgagaagagcagagcggagggagccccagacacggtccgcgggagagctgtggggcttggtgagtgtttcgtggcctctcgggttggtcagcacccccagccagctggcccaggacccctctacagaagtccaggagagcaggcgtcaccaagatgtccaaccccttcctgaagcaagtcttcaacaaggacaagacattccgccccaagcgcaagtttgagccgggcacccagcgcttcgagctgcacaagaaggcgcaggcgtcgctgaacgccgggctggacctgcggctggccgtgcagctgcccccgggcgaggacctgaacgactgggtggctgttcacgtggtggacttctttaaccgcgtcaacctcatctacggcaccatcagcgacggctgcacggagcagtcctgccccgtcatgtcggggggccccaagtatgagtaccgctggcaggatgagcataagttccggaagcccacggcactctccgcgcccaggtacatggacctgctgatggactggatcgaggcgcagatcaacaacgaggacctcttccccaccaacgttgtttgaccgcatcgcgcagatgggctccgaggcccacgtgaacacctgctacaagcacttctactatttcgtcaaggagttcggcctcatcgacaccaaggagctggagccactggtgcgcgggcttggggctgagggcgtgcggttacggtggggctggtggcccgtggcagaggaacccttccggggccaggaccctgactgcttgcggtcggcccagcagctggcggccccggctggagttgggccccggggaccctgctgatgggacaagtggtgaggtagctgggagggatcctgcgttctcccacggaacaaatgccggcgacaggtgcagtttcctccgcgccgccccgcgtccag

SEQ ID NO: 375949 - DNA, 3396 bp, Homo sapiens
  misc_feature (1782)..(1782): n is a, c, g, or t
gcggccgtgtccctccgcggcggctgcgaggcggtgcggcggctgaggcggccgaggcggccagttgggtaccgggaggggcgaaggcgggcggcagaggcgatcagaagtttccaagggtcacttgtgtctcgtccgtgggaagaccgggggagcccagaaggccttggtgtggaattctgagagctgattcctgccttgtcttctccactgttcctggaggaatccgagaagagcagagcggagggagccccagacacggtccgcgggagagctgtggggcttggtgagtgtttcgtggcctctcgggttggtcagcacccccagccagctggcccaggacccctctacagaagtccaggagagcaggcgtcaccaagatgtccaaccccttcctgaagcaagtcttcaacaaggacaagacattccgccccaagcgcaagtttgagccgggcacccagcgcttcgagctgcacaagaaggcgcaggcgtcgctgaacgccgggctggacctgcggctggccgtgcagctgcccccgggcgaggacctgaacgactgggtggctgttcacgtggtggacttctttaaccgcgtcaacctcatctacggcaccatcagcgacggctgcacggagcagtcctgccccgtcatgtcggggggccccaagtatgagtaccgctggcaggatgagcataagttccggaagcccacggcactctccgcgcccaggtacatggacctgctgatggactggatcgaggcgcagatcaacaacgaggacctcttccccaccaacgttggcactccgtttcccaagaacttcctgcagacggtgcggaagatcctgtcgcggctgttccgcgtgttcgtgcacgtctacatccaccactttgaccgcatcgcgcagatgggctccgaggcccacgtgaacacctgctacaagcacttctactatttcgtcaaggagttcggcctcatcgacaccaaggagctggagccactgaaagaaatgaccgcccggatgtgccactgagagccccgcgggtctcccggtgcccgaaccgccgctggggcctcggagacttggaggaggacgctctggaaccatcatcccgcttctctccggcctgagcatctcagggagaccaggggccgagccgctgagcaggtgttggtcctcaggagctccaaccccggacggcagatgccttcctcagtctcgagcctcagtctcccgtctgggactaaaacgtgaactctgtaattctatgtgttactagcaaccggaaaagcccactgtgtttttaaaccacttccactttccaggaggctggatggcttccagggtcactccttgccctgggtggctcccaggctcctggaacttctgcctccacctcgctggggagcccccagggctgctgtggccacagccctgcctgggcctgtctctcaagggcacccagcttgctcggcctcctacatgtctcccgttggggaggcaagaggctgaggggcttccgagcccctgagagcggacatctcctcccgcaggcctttactccgcactccccactggcagccgctggtgtctcttcacacagaggcacaacctggacccaggcagcctctttcctccctccccaatctcttccatttttctacagatttttttttttttggtcatactagagacaggggtctcgctgaactcctggcctccagtgatcctccatcctcggcctcccaaagtgctggaatcacaggggtgagccaccgcncccagccctctctcttcctcaatgcactctgcttcttccgttcttccgaaacattcagctgactgtatccagggcttcctggactcctgggaccccacgtcctgcaccccggcttctgactcatttcctaagggcccctttgtgtatcataaagggtttgatttttatagtcacatttacaaccatcttgagatttttattttttttgaacggagtctcccactgtcgcccagactggagtccagtggcacaatctcggctcactgcatcctccacctcctgggttcaagtgattctcctgcttcagcctcccaagtagctgggattacaggtgtgcgccaccacgcccaggaaattatgtagttttagtagagacaagatttcaccatgttggccaggctggtctcaaactcctgacttcaggtgatccgcctaccttggcctccaaaagtgctgggattacaggcatgagctactgcacccggcctaaccaggctggagtgcagtggtgggatctcggctcactgcaagctccgcctcccagattcacgccattctcctgcctcagcctccccagcagctgggactacaggcacccaccgtcacgcccggctaatttttttgtattttagtagagacagggtttcaccgtgttagccaggatggtcttgatctcctgaccttgtgatccaccagcctcagcctcccaaagtgctgggattacaggcgtgagccactgtgcccggccaagaatttttttatcgataacatagtgagctctctgcctcttcggaacgatgtccactttgcttatgatcaacccaagcaggactcttctctccctggacgcctctcccctggtctggaatcttccagttctgccagaattggcctttcccagatgctgcaaacttccagttgaacccctttttctgtgtggcccctggggctgcgagaccaaaatccatgagttctgtgtaccctagacctttggaaggtgagagcagggccctgagaaaaggcagccacctcctctccctggctgaacccctgccaccctactcctcaccagaattgtcagtggcctttcaccacagtggtccttcctgcctgagccctgcactgtcccagaccacacagaagtctggtcacctctgggcgcctgggatggtcaccgaagagaagcacgctgtccccgtctctcctggcttctgccagaaaatcgaacaagtgcaattaacacactgttactgccgaagcctgaaactcccaggacttgtccttgatccttccagaaaccaccaggtccggcacttggagccccccggagagggacctcccagccgagccctcaaagaactccatgaaatcaggaactgcttgatgaaatgtatctccttgtacctggaagatgaagcccaaacacccacacctctgtctcccccagggctcgggatgtctccagcagcccggccacgcagcttcccaggtgggctcggggaggtgggagcagggaccatctctgtcccctccaccctcactccatccacctcggagaccaccctcccccagccagatacggaataaaactacagacgcagacgtcggaataaa

SEQ ID NO: 375950 - DNA, 2074 bp, Homo sapiens
  misc_feature (1782)..(1782): n is a, c, g, or t
gcggccgtgtccctccgcggcggctgcgaggcggtgcggcggctgaggcggccgaggcggccagttgggtaccgggaggggcgaaggcgggcggcagaggcgatcagaagtttccaagggtcacttgtgtctcgtccgtgggaagaccgggggagcccagaaggccttggtgtggaattctgagagctgattcctgccttgtcttctccactgttcctggaggaatccgagaagagcagagcggagggagccccagacacggtccgcgggagagctgtggggcttggtgagtgtttcgtggcctctcgggttggtcagcacccccagccagctggcccaggacccctctacagaagtccaggagagcaggcgtcaccaagatgtccaaccccttcctgaagcaagtcttcaacaaggacaagacattccgccccaagcgcaagtttgagccgggcacccagcgcttcgagctgcacaagaaggcgcaggcgtcgctgaacgccgggctggacctgcggctggccgtgcagctgcccccgggcgaggacctgaacgactgggtggctgttcacgtggtggacttctttaaccgcgtcaacctcatctacggcaccatcagcgacggctgcacggagcagtcctgccccgtcatgtcggggggccccaagtatgagtaccgctggcaggatgagcataagttccggaagcccacggcactctccgcgcccaggtacatggacctgctgatggactggatcgaggcgcagatcaacaacgaggacctcttccccaccaacgttggcactccgtttcccaagaacttcctgcagacggtgcggaagatcctgtcgcggctgttccgcgtgttcgtgcacgtctacatccaccactttgaccgcatcgcgcagatgggctccgaggcccacgtgaacacctgctacaagcacttctactatttcgtcaaggagttcggcctcatcgacaccaaggagctggagccactgaaagaaatgaccgcccggatgtgccactgagagccccgcgggtctcccggtgcccgaaccgccgctggggcctcggagacttggaggaggacgctctggaaccatcatcccgcttctctccggcctgagcatctcagggagaccaggggccgagccgctgagcaggtgttggtcctcaggagctccaaccccggacggcagatgccttcctcagtctcgagcctcagtctcccgtctgggactaaaacgtgaactctgtaattctatgtgttactagcaaccggaaaagcccactgtgtttttaaaccacttccactttccaggaggctggatggcttccagggtcactccttgccctgggtggctcccaggctcctggaacttctgcctccacctcgctggggagcccccagggctgctgtggccacagccctgcctgggcctgtctctcaagggcacccagcttgctcggcctcctacatgtctcccgttggggaggcaagaggctgaggggcttccgagcccctgagagcggacatctcctcccgcaggcctttactccgcactccccactggcagccgctggtgtctcttcacacagaggcacaacctggacccaggcagcctctttcctccctccccaatctcttccatttttctacagatttttttttttttggtcatactagagacaggggtctcgctgaactcctggcctccagtgatcctccatcctcggcctcccaaagtgctggaatcacaggggtgagccaccgcncccagccctctctcttcctcaatgcactctgcttcttccgttcttccgaaacattcagctgactgtatccagggcttcctggactcctgggaccccacgtcctgcaccccggcttctgactcatttcctaagggcccctttgtgtatcataaagggtttgatttttatagtcacatttacaaccatcttgagatttttattttttttgaacggagtctcccactgtcgcccagactggagtccatgagccgagatcgcaccactgcactccagcctaggcgacagagcgaga

SEQ ID NO: 375951 - DNA, 708 bp, Homo sapiens
tgggtatacaggagccctctgttctatctttgcaacttttccacaaatctaaaactattccaaaagaaagaaggttgtttttttaaaaagcaacgctatgtacagcacaaaactatcattgtttttaaaaatatgtccacatatgtatgaatatattcattataccctaaaatgttaacagtggttctctcccgagtggtaagactgaagacgatgttcatttccttgtaccttctagatcagtggttctcaaagggtggttgccaggtcagctgcagtagcagcagcatctgggaacttgttagaaatgcagattctcaggccccaccccaaagctactgatcagacactctagaggtggggcagatgattctgatagatgcaagtttgagaacacggttctagatcacagaaactggttttgtaacaagtgccacttttatagtcacaataatagaacaatgaaacttgcaaaaggggtcagtatgttgatggatgaacagcattttaagagccaacacatgcccaaacacagtacgtgcaccaggaggcaggcgcagtctagttcaagctcacactgacctgttctgtccagtccccagccgcagccaccactaaagccagcttccatgggggtctctgggatccctacagtgataaatctcagacaaacaagtctggcatgagtttttttctttccttttgtta

SEQ ID NO: 375952 - DNA, 364 bp, Homo sapiens
ttttttttttgagacagagtccagactgtcgcccaggatggagtgcagtgtgcagtggtgcaattttggctcactgcaacctccgcctctcaggttcaagcgattctcctgcctcagcctcccgagtagccaaaaaatatacaaatcatgataccatttataaaacatttgttaactgtataaaacaaaatatttgtttaaagtaaattaaagaaaaaagaaacaaaatgatgaacaaaaaattcaaaatactacattccttaggatagaaggaaagtgattaatagagagaaacttttaggaagtactggtaagattaagtcgatttccataaaacatacatatattattattatttatattt

SEQ ID NO: 375953 - DNA, 610 bp, Homo sapiens
caggacactgtcttggcttctcccagcctatcttctgaaccacatagaagtatacagtatcagtgaagcagctagctgtaaaatgtgggctgagtagcataacacttttatctgaaaaccttcaattcatagtatctgaaagcattaatattctcagtcattaatttttccaactacaaaatgaaggcactttgcaagcatcacagacttattgtaatagttaattcttgtttttgattattgtcatcttttgggggattaaagtgttttggcatgttgggctctctaatcttttcgctactttcagaatttgtgctttcaagtgtcattgtatatgcacaggacacagttgggacatgaagataaacctcacctaatagagtagatgtcatttctgggtaaggttaactgtgggaaacagaaatgtgttcactaaggaaaccttaggtcacaacctccagtttcctgaaggaaatgccaaaaatgctccaaagacaaaaggctggaaacaaactggaatgtctctctccatctgtctgctaaggcggaaggaatgatttcatgttacattcacttcctagactttcattacagagtcaagcataatgga

SEQ ID NO: 375954 - DNA, 326 bp, Homo sapiens
accagaaaaataaatgttgggttagaaaaattgtcacaaggggctggccaggctctgtggctcacgcctgtaatcctggcactttgagaggccgaggcatgtggctcacctgaggtcaagagttcgagaccagcctggccaacatggtgaatccctgtctctactaaaaatacaaaaattagctgggcatggtggtgcgtgcctgtaattctaactactcaggagtctgagacagtagaattgcttgaacctgagaggcggagcttgcagtgagccgagtagatcgcccaactgcactccagcctgggagcaagactctgtctcga

SEQ ID NO: 375955 - DNA, 1777 bp, Homo sapiens
gaagaaatgacccaggagctgatattcatgaccctccaagagacccggcagcttgtgggcatctcagatgagccccaggcagttctgaaacccaggaccaggaaaagataagagggtgggctgaggtcacatcaccctgtaacgtttccaaaagggaactgtcaggcctctgagccgaagctcagccattgtaacccctgtgacctgcacatatatgtccaggtggcctacaggagccaagaagtctggagcagctgaaaacacaaggaagtgaaacagccaattcctgccttaactaattaacccaccttacgacattccaccattatgacgtgttcctgccctgccccaactgatcaatcgaccctgtgacattcttctggacaatgagtcccatcatctctccaccatgcaccttgtgactccctcctctgctgacaacagataaccacctttaactgtaactttccacagcctaccccagccctataaagctgcccctctcctatctcccttcgctgactctcttttcagactcagcccacttgcacccaagtgaattaacagccttgttgctcacacaaagcctgtttaggtggtcttctatacggacatgcttgacacttggtgccaaaatctgggccaggggactccttcgtgagaccggccccctgtcctggccctcattccgtgaagagatccacctgcgacctcgggtcctcagaccagcccaaggaacatctcaccaatttcaaatcggatctcctcggcttagtggctgaagactgatgctgcccgatcgcctcagaagccccttggaccatcacagatgccgagcttcgggtaactcttacggtggaggattcccagccatatgaagacaccctagctggacgatcagtccttgtcaaaagtctgacccctcaaactctacagcctcaatggaccagaccctacccggtcatttatagcacaccaactgccgtccatctgcaggaccctctccattgggttcaccattccagaataaagccatgcccatcagacagccagcttgatctctcctcttcctcctggaagccacaagattaggccgagagccgatcagacaaacaacctacaacccttaagctcctggcagcgcccagccaaggccatgcttccatgcaacactccttccaaatggccatcccagcatgcttccaagcaggcttcatccgttcctctggaccctcatctcttaagacctgccgcctataaaaaggattatatcttgagaccctatcctctaaaattttttccacacccaaaacaaaaaatctctgggtcaaaagtctaaaacgcttaggctggcaaccatcagatccttgcccatggtgtcctcaagcctactctcatgaaatggacaacagtacacgcatatggggccagttccacatatttggcaaccagaccagcatccaggacaacacaaagtatgttgtttgttgttagagggcttgggacatttcactctttgccagcctcagcttaatccaggagacaaagattattttccttattatctcttctgcataggatctgcaatcagaactattgaacttctccattcagaccgccactcacacctatgggaaaagggtaatgtatcatcggcttagcaacagggaatactattcgtatgatggaaaatggggacaaaaggctttggtacataaaacattattccttccttggcctaaaaactcatcgccacctacattaaagctaatatgcc

SEQ ID NO: 375956 - DNA, 1696 bp, Homo sapiens
gaagaaatgacccaggagctgatattcatgaccctccaagagacccggcagcttgtgggcatctcagatgagccccaggcagttctgaaacccaggaccaggaaaagataagagggtgggctgaggtcacatcaccctgtaacgtttccaaaagggaactgtcaggcctctgagccgaagctcagccattgtaacccctgtgacctgcacatatatgtccaggtggcctacaggagccaagaagtctggagcagctgaaaacacaaggaagtgaaacagccaattcctgccttaactaattaacccaccttacgacattccaccattatgacgtgttcctgccctgccccaactgatcaatcgaccctgtgacattcttctggacaatgagtcccatcatctctccaccatgcaccttgtgactccctcctctgctgacaacagataaccacctttaactgtaactttccacagcctaccccagccctataaagctgcccctctcctatctcccttcgctgactctcttttcagactcagcccacttgcacccaagtgaattaacagccttgttgctcacacaaagcctgtttaggtggtcttctatacggacatgcttgacacttggtgccaaaatctgggccaggggactccttcgtgagaccggccccctgtcctggccctcattccgtgaagagatccacctgcgacctcgggtcctcagaccagcccaaggaacatctcaccaatttcaaatcggatctcctcggcttagtggctgaagactgatgctgcccgatcgcctcagaagccccttggaccatcacagatgccgagcttcgggtaactcttacggtggagggatctgcaatcagaactattgaacttctccattcagaccgccactcacacctatgggaaaagggtgtccacgcagtccctggtcacacttgaagcagtccggagaaatatcagccctaccccagtaatccccagaaggaacttacacttttttttaatcttttcctacaacttcatattttataaataaaaagacaaaaatgtcaggcctgtgagctgaagcttagccattgtaacccctgtgacctgcacatatccgtccaggtggcctgcaggagccaagaagtctggagcagccgaaaaaccacaaagaagtgaaacagccagttcctgccttaactaattaacccaccttacgacattccaccattatgacttgtccaccattatgacttgttcctgccctgccccaactgatcaatcaaccctgtgacattcttctcctggacaatgagtcccatcatctctccaccatgcaccttgtgaccccctcctctgctgaggataaccacctttaactgtaactttccacgcctacccaagccctataaagctgcccctctcctatctcccttcactgactctcttttcggactcagcccacttgcacccaagtgaattaacagccttgttgctcacacaaagcctgattgggtgtcttctatacggacacgcgtgacaggaacctcaacccaaaggcagtctgatgaggtgtctaagataaaagtagcggcacaaaggcttttgtaaacagaggcgtttcatgtggttttcctttcctttccttatatgtgaaaaggtgacagaaaagaaatcttcctaaaagagtcagcca

SEQ ID NO: 375957 - DNA, 2685 bp, Homo sapiens
gaagaaatgacccaggagctgatattcatgaccctccaagagacccggcagcttgtgggcatctcagatgagccccaggcagttctgaaacccaggaccaggaaaagataagagggtgggctgaggtcacatcaccctgtaacgtttccaaaagggaactgtcaggcctctgagccgaagctcagccattgtaacccctgtgacctgcacatatatgtccaggtggcctacaggagccaagaagtctggagcagctgaaaacacaaggaagtgaaacagccaattcctgccttaactaattaacccaccttacgacattccaccattatgacgtgttcctgccctgccccaactgatcaatcgaccctgtgacattcttctggacaatgagtcccatcatctctccaccatgcaccttgtgactccctcctctgctgacaacagataaccacctttaactgtaactttccacagcctaccccagccctataaagctgcccctctcctatctcccttcgctgactctcttttcagactcagcccacttgcacccaagtgaattaacagccttgttgctcacacaaagcctgtttaggtggtcttctatacggacatgcttgacacttggtgccaaaatctgggccaggggactccttcgtgagaccggccccctgtcctggccctcattccgtgaagagatccacctgcgacctcgggtcctcagaccagcccaaggaacatctcaccaatttcaaatcggatctcctcggcttagtggctgaagactgatgctgcccgatcgcctcagaagccccttggaccatcacagatgccgagcttcgggtaactcttacggtggaggattcccagccatatgaagacaccctagctggacgatcagtccttgtcaaaagtctgacccctcaaactctacagcctcaatggaccagaccctacccggtcatttatagcacaccaactgccgtccatctgcaggaccctctccattgggttcaccattccagaataaagccatgcccatcagacagccagcttgatctctcctcttcctcctggaagccacaagattaggccgagagccgatcagacaaacaacctacaacccttaagctcctggcagcgcccagccaaggccatgcttccatgcaacactccttccaaatggccatcccagcatgcttccaagcaggcttcatccgttcctctggaccctcatctcttaagacctgccgcctataaaaaggattatatcttgagaccctatcctctaaaattttttccacacccaaaacaaaaaatctctgggtcaaaagtctaaaacgcttaggctggcaaccatcagatccttgcccatggtgtcctcaagcctactctcatgaaatggacaacagtacacgcatatggggccagttccacatatttggcaaccagaccagcatccaggacaacacaaagtatgttgtttgttgttagagggcttgggacatttcactctttgccagcctcagcttaatccaggagacaaagattattttccttattatctcttctgcataggatctgcaatcagaactattgaacttctccattcagaccgccactcacacctatgggaaaagggtaatgtatcatcggcttagcaacagggaatactattcgtatgatggaaaatggggacaaaaggctttggtacataaaacattattccttccttggcctaaaaactcatcgccacctacattaaagctaatatgcctgattactgtttttagagaacttattttattagggcagttccaagctcaaaaatacgctaactggcaccttgttagctacataaaaatgcaccctagacccgaaacttactagactcattataaaattttctttaaggtgtccacgcagtccctggtcacacttgaagcagtccggagaaatatcagccctaccccagtaatccccagaaggaacttacacttttttttaatcttttcctacaacttcatattttataaataaaaagacaaaaatgtcaggcctgtgagctgaagcttagccattgtaacccctgtgacctgcacatatccgtccaggtggcctgcaggagccaagaagtctggagcagccgaaaaaccacaaagaagtgaaacagccagttcctgccttaactaattaacccaccttacgacattccaccattatgacttgtccaccattatgacttgttcctgccctgccccaactgatcaatcaaccctgtgacattcttctcctggacaatgagtcccatcatctctccaccatgcaccttgtgaccccctcctctgctgaggataaccacctttaactgtaactttccacgcctacccaagccctataaagctgcccctctcctatctcccttcactgactctcttttcggactcagcccacttgcacccaagtgaattaacagccttgttgctcacacaaagcctgattgggtgtcttctatacggacacgcgtgacaggaacctcaacccaaaggcagtctgatgaggtgtctaagataaaagtagcggcacaaaggcttttgtaaacagaggcgtttcatgtggttttcctttcctttccttatatgtgaaaaggtgacagaaaagaaatcttcctaaaagagtcagcca

SEQ ID NO: 375958 - DNA, 2109 bp, Homo sapiens
gaagaaatgacccaggagctgatattcatgaccctccaagagacccggcagcttgtgggcatctcagatgagccccaggcagttctgaaacccaggaccaggaaaagataagagggtgggctgaggtcacatcaccctgtaacgtttccaaaagggaactgtcaggcctctgagccgaagctcagccattgtaacccctgtgacctgcacatatatgtccaggtggcctacaggagccaagaagtctggagcagctgaaaacacaaggaagtgaaacagccaattcctgccttaactaattaacccaccttacgacattccaccattatgacgtgttcctgccctgccccaactgatcaatcgaccctgtgacattcttctggacaatgagtcccatcatctctccaccatgcaccttgtgactccctcctctgctgacaacagataaccacctttaactgtaactttccacagcctaccccagccctataaagctgcccctctcctatctcccttcgctgactctcttttcagactcagcccacttgcacccaagtgaattaacagccttgttgctcacacaaagcctgtttaggtggtcttctatacggacatgcttgacacttggtgccaaaatctgggccaggggactccttcgtgagaccggccccctgtcctggccctcattccgtgaagagatccacctgcgacctcgggtcctcagaccagcccaaggaacatctcaccaatttcaaatcggatctcctcggcttagtggctgaagactgatgctgcccgatcgcctcagaagccccttggaccatcacagatgccgagcttcgggtaactcttacggtggaggattcccagccatatgaagacaccctagctggacgatcagtccttgtcaaaagtctgacccctcaaactctacagcctcaatggaccagaccctacccggtcatttatagcacaccaactgccgtccatctgcaggaccctctccattgggttcaccattccagaataaagccatgcccatcagacagccagcttgatctctcctcttcctcctggaagccacaagattaggccgagagccgatcagacaaacaacctacaacccttaagctcctggcagcgcccagccaaggccatgcttccatgcaacactccttccaaatggccatcccagcatgcttccaagcaggcttcatccgttcctctggaccctcatctcttaagacctgccgcctataaaaaggattatatcttgagaccctatcctctaaaattttttccacacccaaaacaaaaaatctctgggtcaaaagtctaaaacgcttaggctggcaaccatcagatccttgcccatggtgtcctcaagcctactctcatgaaatggacaacagtacacgcatatggggccagttccacatatttggcaaccagaccagcatccaggacaacacaaagatctgcaatcagaactattgaacttctccattcagaccgccactcacacctatgggaaaagggtggcctgcaggagccaagaagtctggagcagccgaaaaaccacaaagaagtgaaacagccagttcctgccttaactaattaacccaccttacgacattccaccattatgacttgtccaccattatgacttgttcctgccctgccccaactgatcaatcaaccctgtgacattcttctcctggacaatgagtcccatcatctctccaccatgcaccttgtgaccccctcctctgctgaggataaccacctttaactgtaactttccacgcctacccaagccctataaagctgcccctctcctatctcccttcactgactctcttttcggactcagcccacttgcacccaagtgaattaacagccttgttgctcacacaaagcctgattgggtgtcttctatacggacacgcgtgacaggaacctcaacccaaaggcagtctgatgaggtgtctaagataaaagtagcggcacaaaggcttttgtaaacagaggcgtttcatgtggttttcctttcctttccttatatgtgaaaaggtgacagaaaagaaatcttcctaaaagagtcagcca

SEQ ID NO: 375959 - DNA, 1583 bp, Homo sapiens
gaagaaatgacccaggagctgatattcatgaccctccaagagacccggcagcttgtgggcatctcagatgagccccaggcagttctgaaacccaggaccaggaaaagataagagggtgggctgaggtcacatcaccctgtaacgtttccaaaagggaactgtcaggcctctgagccgaagctcagccattgtaacccctgtgacctgcacatatatgtccaggtggcctacaggagccaagaagtctggagcagctgaaaacacaaggaagtgaaacagccaattcctgccttaactaattaacccaccttacgacattccaccattatgacgtgttcctgccctgccccaactgatcaatcgaccctgtgacattcttctggacaatgagtcccatcatctctccaccatgcaccttgtgactccctcctctgctgacaacagataaccacctttaactgtaactttccacagcctaccccagccctataaagctgcccctctcctatctcccttcgctgactctcttttcagactcagcccacttgcacccaagtgaattaacagccttgttgctcacacaaagcctgtttaggtggtcttctatacggacatgcttgacacttggtgccaaaatctgggccaggggactccttcgtgagaccggccccctgtcctggccctcattccgtgaagagatccacctgcgacctcgggtcctcagaccagcccaaggaacatctcaccaatttcaaatcggatctcctcggcttagtggctgaagactgatgctgcccgatcgcctcagaagccccttggaccatcacagatgccgagcttcgggtaactcttacggtggaggattcccagccatatgaagacaccctagctggacgatcagtccttgtcaaaagtctgacccctcaaactctacagcctcaatggaccagaccctacccggtcatttatagcacaccaactgccgtccatctgcaggaccctctccattgggttcaccattccagaataaagccatgcccatcagacagccagcttgatctctcctcttcctcctggaagccacaagattaggccgagagccgatcagacaaacaacctacaacccttaagctcctggcagcgcccagccaaggccatgcttccatgcaacactccttccaaatggccatcccagcatgcttccaagcaggcttcatccgttcctctggaccctcatctcttaagacctgccgcctataaaaaggattatatcttgagaccctatcctctaaaattttttccacacccaaaacaaaaaatctctgggtcaaaagtctaaaacgcttaggctggcaaccatcagatccttgcccatggtgtcctcaagcctactctcatgaaatggacaacagtacacgcatatggggccagttccacatatttggcaaccagaccagcatccaggacaacacaaagtatgttgtttgttgttagagggcttgggacatttcactctttgccagcctcagcttaatccaggattcagaatgagacggggatactctagaatcaactatcacgaa

SEQ ID NO: 375960 - DNA, 2497 bp, Homo sapiens
  misc_feature (510)..(510): n is a, c, g, or t
  misc_feature (647)..(647): n is a, c, g, or t
actccagcctctctcgctaccctccaatctccctgtccagtctttttcttctctagtagagacaaaggagacacattttatccgtggacccaaaactctggcgctggtcacagactcaggaagacagtcttcccttggtgtctaatcactgcggggacgcctgcctaattattcacccacattccactggtgtctgatcaccttggggatgcctgccttggtcattcacccacattcccatggtggcaagtcatttgcggggacgcctgctttggctgctcacccccgcccttctccgtgtctctacttttctctttaaacttacctccttcactttgggcaatcttccgccctccattcctccctcttcccccttagcctgtgtacttaaaaacttctcttaaactaacacctgatataaaactcaaacgtcttattttcttctgcaattactgcttggccgcaatataaacttgacaatggttccaaatggccagaaaacggcacttntgatttctccatcctacaacccatttcaattttatatggatgcaccttcttactcagccacaatcttgttccagacaccagccccctgggcaactatcttccagtcctctagcaggctagacaggaaatttgccaanctgctaatcttctcttgcctactccagattcccagccatatgaagacaccctagctggacgatcagtccttgtcaaaagtctgacccctcaaactctacagcctcaatggaccagaccctacccggtcatttatagcacaccaactgccgtccatctgcaggaccctctccattgggttcaccattccagaataaagccatgcccatcagacagccagcttgatctctcctcttcctcctggaagccacaagattaggccgagagccgatcagacaaacaacctacaacccttaagctcctggcagcgcccagccaaggccatgcttccatgcaacactccttccaaatggccatcccagcatgcttccaagcaggcttcatccgttcctctggaccctcatctcttaagacctgccgcctataaaaaggattatatcttgagaccctatcctctaaaattttttccacacccaaaacaaaaaatctctgggtcaaaagtctaaaacgcttaggctggcaaccatcagatccttgcccatggtgtcctcaagcctactctcatgaaatggacaacagtacacgcatatggggccagttccacatatttggcaaccagaccagcatccaggacaacacaaagtatgttgtttgttgttagagggcttgggacatttcactctttgccagcctcagcttaatccaggagacaaagattattttccttattatctcttctgcataggatctgcaatcagaactattgaacttctccattcagaccgccactcacacctatgggaaaagggtaatgtatcatcggcttagcaacagggaatactattcgtatgatggaaaatggggacaaaaggctttggtacataaaacattattccttccttggcctaaaaactcatcgccacctacattaaagctaatatgcctgattactgtttttagagaacttattttattagggcagttccaagctcaaaaatacgctaactggcaccttgttagctacataaaaatgcaccctagacccgaaacttactagactcattataaaattttctttaaggtgtccacgcagtccctggtcacacttgaagcagtccggagaaatatcagccctaccccagtaatccccagaaggaacttacacttttttttaatcttttcctacaacttcatattttataaataaaaagacaaaaatgtcaggcctgtgagctgaagcttagccattgtaacccctgtgacctgcacatatccgtccaggtggcctgcaggagccaagaagtctggagcagccgaaaaaccacaaagaagtgaaacagccagttcctgccttaactaattaacccaccttacgacattccaccattatgacttgtccaccattatgacttgttcctgccctgccccaactgatcaatcaaccctgtgacattcttctcctggacaatgagtcccatcatctctccaccatgcaccttgtgaccccctcctctgctgaggataaccacctttaactgtaactttccacgcctacccaagccctataaagctgcccctctcctatctcccttcactgactctcttttcggactcagcccacttgcacccaagtgaattaacagccttgttgctcacacaaagcctgattgggtgtcttctatacggacacgcgtgacaggaacctcaacccaaaggcagtctgatgaggtgtctaagataaaagtagcggcacaaaggcttttgtaaacagaggcgtttcatgtggttttcctttcctttccttatatgtgaaaaggtgacagaaaagaaatcttcctaaaagagtcagcca

SEQ ID NO: 375961 - DNA, 1613 bp, Homo sapiens
agaaggacccgctgctggagaaagaaccagagcggcccccccaggaggtccgggagccggcccagaagaggcggtcccccggaggacgcgccatccttcgaagcgcacgatggcgcatcccagcatgcttccaagcaggcttcatccgttcctctggaccctcatctcttaagacctgccgcctataaaaaggattatatcttgagaccctatcctctaaaattttttccacacccaaaacaaaaaatctctgggtcaaaagtctaaaacgcttaggctggcaaccatcagatccttgcccatggtgtcctcaagcctactctcatgaaatggacaacagtacacgcatatggggccagttccacatatttggcaaccagaccagcatccaggacaacacaaagtatgttgtttgttgttagagggcttgggacatttcactctttgccagcctcagcttaatccaggagacaaagattattttccttattatctcttctgcataggatctgcaatcagaactattgaacttctccattcagaccgccactcacacctatgggaaaagggtaatgtatcatcggcttagcaacagggaatactattcgtatgatggaaaatggggacaaaaggctttggtacataaaacattattccttccttggcctaaaaactcatcgccacctacattaaagctaatatgcctgattactgtttttagagaacttattttattagggcagttccaagctcaaaaatacgctaactggcaccttgttagctacataaaaatgcaccctagacccgaaacttactagactcattataaaattttctttaaggtgtccacgcagtccctggtcacacttgaagcagtccggagaaatatcagccctaccccagtaatccccagaaggaacttacacttttttttaatcttttcctacaacttcatattttataaataaaaagacaaaaatgtcaggcctgtgagctgaagcttagccattgtaacccctgtgacctgcacatatccgtccaggtggcctgcaggagccaagaagtctggagcagccgaaaaaccacaaagaagtgaaacagccagttcctgccttaactaattaacccaccttacgacattccaccattatgacttgtccaccattatgacttgttcctgccctgccccaactgatcaatcaaccctgtgacattcttctcctggacaatgagtcccatcatctctccaccatgcaccttgtgaccccctcctctgctgaggataaccacctttaactgtaactttccacgcctacccaagccctataaagctgcccctctcctatctcccttcactgactctcttttcggactcagcccacttgcacccaagtgaattaacagccttgttgctcacacaaagcctgattgggtgtcttctatacggacacgcgtgacaggaacctcaacccaaaggcagtctgatgaggtgtctaagataaaagtagcggcacaaaggcttttgtaaacagaggcgtttcatgtggttttcctttcctttccttatatgtgaaaaggtgacagaaaagaaatcttcctaaaagagtcagcca

SEQ ID NO: 375962 - DNA, 1969 bp, Homo sapiens
gaagaaatgacccaggagctgatattcatgaccctccaagagacccggcagcttgtgggcatctcagatgagccccaggcagttctgaaacccaggaccaggaaaagataagagggtgggctgaggtcacatcaccctgtaacgtttccaaaagggaactgtcaggcctctgagccgaagctcagccattgtaacccctgtgacctgcacatatatgtccaggtggcctacaggagccaagaagtctggagcagctgaaaacacaaggaagtgaaacagccaattcctgccttaactaattaacccaccttacgacattccaccattatgacgtgttcctgccctgccccaactgatcaatcgaccctgtgacattcttctggacaatgagtcccatcatctctccaccatgcaccttgtgactccctcctctgctgacaacagataaccacctttaactgtaactttccacagcctaccccagccctataaagctgcccctctcctatctcccttcgctgactctcttttcagactcagcccacttgcacccaagtgaattaacagccttgttgctcacacaaagcctgtttaggtggtcttctatacggacatgcttgacacttggtgccaaaatctgggccaggggactccttcgtgagaccggccccctgtcctggccctcattccgtgaagagatccacctgcgacctcgggtcctcagaccagcccaaggaacatctcaccaatttcaaatcggatctcctcggcttagtggctgaagactgatgctgcccgatcgcctcagaagccccttggaccatcacagatgccgagcttcgggtaactcttacggtggagggatctgcaatcagaactattgaacttctccattcagaccgccactcacacctatgggaaaagggtaatgtatcatcggcttagcaacagggaatactattcgtatgatggaaaatggggacaaaaggctttggtacataaaacattattccttccttggcctaaaaactcatcgccacctacattaaagctaatatgcctgattactgtttttagagaacttattttattagggcagttccaagctcaaaaatacgctaactggcaccttgttagctacataaaaatgcaccctagacccgaaacttactagactcattataaaattttctttaaggtgtccacgcagtccctggtcacacttgaagcagtccggagaaatatcagccctaccccagtaatccccagaaggaacttacacttttttttaatcttttcctacaacttcatattttataaataaaaagacaaaaatgtcaggcctgtgagctgaagcttagccattgtaacccctgtgacctgcacatatccgtccaggtggcctgcaggagccaagaagtctggagcagccgaaaaaccacaaagaagtgaaacagccagttcctgccttaactaattaacccaccttacgacattccaccattatgacttgtccaccattatgacttgttcctgccctgccccaactgatcaatcaaccctgtgacattcttctcctggacaatgagtcccatcatctctccaccatgcaccttgtgaccccctcctctgctgaggataaccacctttaactgtaactttccacgcctacccaagccctataaagctgcccctctcctatctcccttcactgactctcttttcggactcagcccacttgcacccaagtgaattaacagccttgttgctcacacaaagcctgattgggtgtcttctatacggacacgcgtgacaggaacctcaacccaaaggcagtctgatgaggtgtctaagataaaagtagcggcacaaaggcttttgtaaacagaggcgtttcatgtggttttcctttcctttccttatatgtgaaaaggtgacagaaaagaaatcttcctaaaagagtcagcca

SEQ ID NO: 375963 - DNA, 1471 bp, Homo sapiens
gcgaacgtgttatccctcgcgaacgtgttatctctcgcgaacgtgttatccctcgcgaacgtgttatctctcgcgaacgtgttatccctcggcgaacgtgttgatccctcgcgtaacgtgttatctctcgacgaacgtgttatccctcgcggaacgtgttatcccttggcgaacgtgttatccctcgcgaacgtgttatccctcgcgaacgtgttatccctcgcgaacgtgttatctctcgcgaacgtgttatccctcgcgaacgtgttatccattagctctagacaaggtagagccgagaccgactcagaagccccttggaccatcacagatgccgagcttcgggtaactcttacggtggagggatctgcaatcagaactattgaacttctccattcagaccgccactcacacctatgggaaaagggtaatgtatcatcggcttagcaacagggaatactattcgtatgatggaaaatggggacaaaaggctttggtacataaaacattattccttccttggcctaaaaactcatcgccacctacattaaagctaatatgcctgattactgtttttagagaacttattttattagggcagttccaagctcaaaaatacgctaactggcaccttgttagctacataaaaatgcaccctagacccgaaacttactagactcattataaaattttctttaaggtgtccacgcagtccctggtcacacttgaagcagtccggagaaatatcagccctaccccagtaatccccagaaggaacttacacttttttttaatcttttcctacaacttcatattttataaataaaaagacaaaaatgtcaggcctgtgagctgaagcttagccattgtaacccctgtgacctgcacatatccgtccaggtggcctgcaggagccaagaagtctggagcagccgaaaaaccacaaagaagtgaaacagccagttcctgccttaactaattaacccaccttacgacattccaccattatgacttgtccaccattatgacttgttcctgccctgccccaactgatcaatcaaccctgtgacattcttctcctggacaatgagtcccatcatctctccaccatgcaccttgtgaccccctcctctgctgaggataaccacctttaactgtaactttccacgcctacccaagccctataaagctgcccctctcctatctcccttcactgactctcttttcggactcagcccacttgcacccaagtgaattaacagccttgttgctcacacaaagcctgattgggtgtcttctatacggacacgcgtgacaggaacctcaacccaaaggcagtctgatgaggtgtctaagataaaagtagcggcacaaaggcttttgtaaacagaggcgtttcatgtggttttcctttcctttccttatatgtgaaaaggtgacagaaaagaaatcttcctaaaagagtcagcca

SEQ ID NO: 375964 - DNA, 404 bp, Homo sapiens
  misc_feature (57)..(57): n is a, c, g, or t
tgcttggccgcaatataaacttgacaatggttccaaatggccagaaaacggcacttntgatttctccatcctacaagacctagatcatttttgtcaaaaaatgggcacatggtctgaggtgccttgcgtccaggcattttttacacttcgctccctcccaagcctctgctcccaatgtgactcatcccaaatttttcttctttctctcccgtccgttccttcagtctctaccccaacctcagagtcccctgaatcccccttttctgcagacccctctgacctctctccccctccccaggccactccttggcaggctgaatcaagtcccaattcttcctcagcctccgctcccccatcttataattcttctatcacctcccctcctcaaacttggtcaggcttag

SEQ ID NO: 375965 - DNA, 518 bp, Homo sapiens
  misc_feature (453)..(453): n is a, c, g, or t
taaatatctcctggtttgggccaataccttcaccggatgggtcgaggcctttcccactagctctgaaaggctactacagtcatttcttcccttctgacagatataatcccccaatttggcctccctacttccacagtttctcaggctcttggtattcagtggaaacttcataccccctaccgtcctcaatcttcaggaaaggtagaacggatgaatggtcttttaaaaacacacctcaccaagctcagcctccaacttaaaaaggactggacagtacttttaccacttgccctcctcagaattagggcctgtccttgagaagccacagggtacaacccatttcaattttatatggatgcaccttcttactcagccacaatcttgttccagacaccagccccctgggcaactatcttccagtcctctagcaggctagacaggaaatttgccaanctgctaatcttctcttgcctactccagattcccagccatatgaagacaccctagctggacgatca

SEQ ID NO: 375966 - DNA, 2582 bp, Homo sapiens
gaagaaatgacccaggagctgatattcatgaccctccaagagacccggcagcttgtgggcatctcagatgagccccaggcagttctgaaacccaggaccaggaaaagataagagggtgggctgaggtcacatcaccctgtaacgtttccaaaagggaactgtcaggcctctgagccgaagctcagccattgtaacccctgtgacctgcacatatatgtccaggtggcctacaggagccaagaagtctggagcagctgaaaacacaaggaagtgaaacagccaattcctgccttaactaattaacccaccttacgacattccaccattatgacgtgttcctgccctgccccaactgatcaatcgaccctgtgacattcttctggacaatgagtcccatcatctctccaccatgcaccttgtgactccctcctctgctgacaacagataaccacctttaactgtaactttccacagcctaccccagccctataaagctgcccctctcctatctcccttcgctgactctcttttcagactcagcccacttgcacccaagtgaattaacagccttgttgctcacacaaagcctgtttaggtggtcttctatacggacatgcttgacacttggtgccaaaatctgggccaggggactccttcgtgagaccggccccctgtcctggccctcattccgtgaagagatccacctgcgacctcgggtcctcagaccagcccaaggaacatctcaccaatttcaaatcggatctcctcggcttagtggctgaagactgatgctgcccgatcgcctcagaagccccttggaccatcacagatgccgagcttcgggtaactcttacggtggaggattcccagccatatgaagacaccctagctggacgatcagtccttgtcaaaagtctgacccctcaaactctacagcctcaatggaccagaccctacccggtcatttatagcacaccaactgccgtccatctgcaggaccctctccattgggttcaccattccagaataaagccatgcccatcagacagccagcttgatctctcctcttcctcctggaagccacaagattaggccgagagccgatcagacaaacaacctacaacccttaagctcctggcagcgcccagccaaggccatgcttccatgcaacactccttccaaatggccatcccagcatgcttccaagcaggcttcatccgttcctctggaccctcatctcttaagacctgccgcctataaaaaggattatatcttgagaccctatcctctaaaattttttccacacccaaaacaaaaaatctctgggtcaaaagtctaaaacgcttaggctggcaaccatcagatccttgcccatggtgtcctcaagcctactctcatgaaatggacaacagtacacgcatatggggccagttccacatatttggcaaccagaccagcatccaggacaacacaaagatctgcaatcagaactattgaacttctccattcagaccgccactcacacctatgggaaaagggtaatgtatcatcggcttagcaacagggaatactattcgtatgatggaaaatggggacaaaaggctttggtacataaaacattattccttccttggcctaaaaactcatcgccacctacattaaagctaatatgcctgattactgtttttagagaacttattttattagggcagttccaagctcaaaaatacgctaactggcaccttgttagctacataaaaatgcaccctagacccgaaacttactagactcattataaaattttctttaaggtgtccacgcagtccctggtcacacttgaagcagtccggagaaatatcagccctaccccagtaatccccagaaggaacttacacttttttttaatcttttcctacaacttcatattttataaataaaaagacaaaaatgtcaggcctgtgagctgaagcttagccattgtaacccctgtgacctgcacatatccgtccaggtggcctgcaggagccaagaagtctggagcagccgaaaaaccacaaagaagtgaaacagccagttcctgccttaactaattaacccaccttacgacattccaccattatgacttgtccaccattatgacttgttcctgccctgccccaactgatcaatcaaccctgtgacattcttctcctggacaatgagtcccatcatctctccaccatgcaccttgtgaccccctcctctgctgaggataaccacctttaactgtaactttccacgcctacccaagccctataaagctgcccctctcctatctcccttcactgactctcttttcggactcagcccacttgcacccaagtgaattaacagccttgttgctcacacaaagcctgattgggtgtcttctatacggacacgcgtgacaggaacctcaacccaaaggcagtctgatgaggtgtctaagataaaagtagcggcacaaaggcttttgtaaacagaggcgtttcatgtggttttcctttcctttccttatatgtgaaaaggtgacagaaaagaaatcttcctaaaagagtcagcca

SEQ ID NO: 375967 - DNA, 279 bp, Homo sapiens
tttcttcctcatccttacttggtatttccccttgcagagtccctttcacctttgtaggtcttggtcttgcccttctggaacatactgtgtggtagaactgtgggagatgtgtatcaaacaagccatactttaccttctgattctgtgtgttgaacttcgcctcacgtgctgataatgggcaagtttaataatttaggttctgtcagaaaaacaaagtatactagttatcttaatagagagatttcaatatgggaaattgggtaaatgctgttggacaac

SEQ ID NO: 375968 - DNA, 462 bp, Homo sapiens
gccagaagtgaaaaaattgagaaagtccaagcctccagggaaatggagtgaggctctaaaagcattaatctaaagggcaggataggagctttgctattgaggagacctccagacagatgcctgcaagcacctttgtagtcgtaagcactgctttgctgtgtaaaccattcttggtcaacatcctaacttgatctcactcccacctgccttacctgtggaaagcccttttctccttcaagactgaaaaaactgtgctttccttgaaatggtatttgtaatcaataaggggtaaaaattaaatactgcgcaactagattcatgaaagcagaatacatagaacaagagcatattcaatacaggcaaagcatgtgttcacagatttgctcctgtgaatggagaaaaatgaaatataattttttaaattggcagtaaaatcaaaagtttattataattagtactatt

SEQ ID NO: 375969 - DNA, 543 bp, Homo sapiens
cgatgagctgagaaaaaaaattacaaaaaaaaatcataatgttttaagaaagtttacgaatttgtgttgggccacattcaaagccattctgggcatgggttggacaagcttgttctaaagggatttttagggtgttgaaaacctaacaaagtcatttggaagactaagtgggtgaaattgtgcactcaaaattaaaagatgagattctcacagtcacatattgaaaacaattataagctaataatagcatggtgtacaagaaagatgttgcctagaaggcccagaaatagaccttagtacatgaaaatatttagtgtatgattaaggtagaatttcaagtcagttggggaaaatggataaatagccaggtagtgctgtaataacaattaactatttggggagaaaattaagttagatagctctatcttcaaccatataccacaataaattgtagatgaattaatgaactattttctgggaaacttatttaaatatgcaagttaaaaaatagaagctataaagattgctagatatgactatcta

SEQ ID NO: 375970 - DNA, 293 bp, Homo sapiens
ctcccgagtagctgggactacaggtgcccactaccacgcccagctaatttttgtatctttagtagagacggggtttcaccatgttggccaggctggtcttgaactcctgacttaggtcatctgcccaccttggcctcccaaagtgctgggattatggtcatgagccaccatgcccagcctgcataccttttttttattgttgccttttgtttttatgcctgtagcttttacattacattaaacagtttttgaaaattgtcagactgttaataacattagttttatcttgtttg

SEQ ID NO: 375971 - DNA, 2065 bp, Homo sapiens
gaaagaaatgattcatttcctacttacagactttttaaagccacattcagtattctcactacctctaggttttgctaacatctactttggttagcactagaaaatttaattttttttgtcaggaaagcacagtaataaattgcctactgttgcctaccacaataatgaaagtctgaaataagtaggaaatgcattaagttacccacatgtccagagtaggcaaatctatagagacagaaagattagtgattgcttagaaatggaaatatgaggctgggtgccgtggctcacacctgtaaccccagcactttgggaggccgaggcgggtggatcatgaggtcaggagatcgagaccatcctggccaacatggggaaaccccgtttctactaaaaatacaaaaaattagccgggcgtgatggcagatgcctgtagtcccagctacttgggaggctgaggcagaagaatggcatgaacccgggaggcggagcttgcagtgagctgagatcgtgccactgcactccagcctgggtgacagagcaagactccgtctcaaaaaaaaaaaaaaagaaatggaaatatgagggtgaggacccagtgaatgacaggtaatgagtatggagtttcttttaagggagacaaaaatgttctaacattgattgtggtgatggttgcacaatcctgtgagtatactaaaatccaatgaattatatactttaaatgggtgaattatatggtatgtgaattacatctcgaagtcattttttttaaatgatggggaaatcaaagtctgaaaataagacctgcttaaaagaaattttgacagtcgatgttgatattaactactttttcctgaaataataaaccataatccttttccagaccttcatcctcttttcctaatacattttccagagaaagcaatggaatttgagaagatggctaagttcagatttatacaaactagatagaaactttgataatagtttgcaactgttgatattttctatcagatagaatactgaaattatcctcagtagtaggcttttcctctttgtgaggaaggaaacattggtagattttgttacttatcttctatagaaaatgactatagttatacagatgaaaagctgtactttgactacaaaagggaatgcaggagttattgttgggtgctacttagttacagcatactcccatttcatatcccctccagttaaaagctttgagattcatctagaacattactccaggtgactgacactcttaaacattgagcccattttcctgtatctagtgctgtttggcgatattcttctggactgtaaggaaaaaatggatttggccatacagtatcacatagatggattgtttttgctgtggtctatgaaaatgagccacatgctatcttttatttatttgtttggttatttttacagcttatctcactttggtggaagtcttcttgggctttcaattttaaagttttagctaattggatgtcttggacctgttttatttcagggttaccatccattgacccatcaggcagctccccatcttcctcttctgctcctctggcaagtttttccggcataccaggaacaagggttttcctgcaagggccagctcctgttgggactcctagtttcaacagacaacatttttctccccatccttggacaagcgcctcaaactcatgtaggaatcctggaggaactcttcccaaagagttttgaataagttattaaatcatttatttcagttacaacaccatgttgtaactttagtaaactaagtggtatacagatgcccaaggtttgttctgtggtcatgtgaaaaaattgtcagtcatttttagcatagaaaacttgagaattattctttcaagccaaaaatgttttacagtagaacttggatcaagaaaagaggtactaggctgggtgcagtggctgacacctgtaatcccagcactttgggaggcctaggcaagaggatcgcttgagcccagcagttggagaccagcctgggcaacagcaagaccctgtctctattaaaaaaaaaaaa

SEQ ID NO: 375972 - DNA, 9762 bp, Homo sapiens
  misc_feature (7619)..(7619): n is a, c, g, or t
  misc_feature (7690)..(7690): n is a, c, g, or t
ttaaggcaggggctgatatagaacttggctgctccacacctctgatggaggcatctcaggagggacacctggaattggttaaatatttgctggcttctggcgctaatgtgcatgctacaacagcaacaggagacacagccttaacctatgcttgtgaaaatggacatacggatgttgcagatgttttacttcaagcaggggctgatttagaacatgaatctgaaggtggaagaacacctttgatgaaagctgcaagagctggtcatttgtgcactgtgcagtttcttattagcaaaggtgccaatgttaacagggctacagccaataatgatcatacagtagtgtcgctggcatgtgcaggaggccacctggcagttgttgagcttctcttggctcatggggctgaccctactcatcgactcaaggatggttcaacaatgctcattgaagctgcaaagggtggccatactaatgtagtttcttatctgttggattatccaaataatgttctgtcagttcccaccacagatgtgtctcagctccctccaccttctcaagatcagtctcaggtgccacgtgtgccaacgcatacacttgccatggttgtacctccccaggaacctgacagaacttcacaggagaactctcctgcccttttaggagtgcaaaaaggtacatccaagcagaagtccagttccctccaggtagcagatcaggacctactgccatcttttcacccataccagcctttggagtgcatagtagaggagactgaaggcaagctgaatgaactgggacaaagaattagtgctattgaaaaagcacagcttaagtcactggagttaattcaaggtgaacctctgaacaaagataagatagaagaacttaaaaagaacagagaagagcaagtccagaagaagaagaaaatattgaaagaactgcagaaagtggaaaggcagttgcagatgaaaacacagcagcaatttaccaaagaatacttggaaaccaaaggtcagaaagacacagtgtctctacaccaacagtgctctcatagaggagtcttcccagaaggggaaggagatggtagtctcccagaggatcacttttcagagttacctcaggttgacacaatcttatttaaagataatgatgttgatgatgagcaacagtctccaccatcggcagaacagattgattttgtcccagtccagcctttatcatctccacagtgtaacttttccagtgacttaggttctaatgggacaaattctcttgaacttcagaaagtatcaggtaatcagcagattgtaggacagcctcagattgctattactggacatgatcaggggctgttagttcaagaaccagatggactaatggttgcaactccagctcagacgcttaccgacactcttgatgacctgatagcagctgtgagtaccagagtgcccactggttccaacagttcttctcagaccacagagtgtcttacacctgaatcctgttcgcagactacaagcaatgtggcttcccaatcgatgcctcctgtgtatccttcagttgacattgatgcacatactgagagcaatcatgacacagcattaacactagcttgtgcaggtggtcatgaagaacttgtatctgtgctcattgcacgggatgccaaaattgaacacagagacaaaaaaggtttcacaccactaatcctggcagcaacagcagggcatgttggagttgttgaaatccttttggataaaggtggagatatagaagcacagtctgaacgaactaaggatactccgctttcattggcatgttctggtggacgtcaggaggtggtagacttgctgctggctcgaggtgcaaataaagaacataggaacgtatctgattatacaccactgagtctagctgcgtctggaggatatgttaatatcattaagattctgcttaatgctggggcagaaattaattcaaggactgggagtaaactaggtatttctcccctgatgttggctgcaatgaatggacatgttcctgcagtaaaattgctgctcgatatgggttcagacattaatgcccaaatagagaccaatcggaacacggctctcaccctggcctgtttccagggccgagcagaagtagtgagtttgcttctggaccgaaaagccaatgttgaacatagggcaaagacgggtcttacccccttgatggaagcagcttctggagggtatgcagaggttggaagagttcttcttgataaaggagcagatgttaatgctccccctgtgccttcctcaagagatactgctttaacaatagcagcagacaaaggtcactacaaattttgtgaactcctgattcataggggagcccacattgatgttcgtaacaaaaagggaaatacgccactttggctggcatccaatggaggtcattttgatgttgtgcagttgctagtgcaagcaggtgctgatgtggatgcagcagataaccggaaaatcacacctcttatgtcagcatttcgcaagggtcatgtaaaagttgttcaatatttggtaaaggaagtaaatcagttcccttctgatatagaatgcatgagatacatagcaacaattacagataaggaactgttgaaaaaatgtcatcaatgtgtcgaaaccattgtgaaggctaaagaccagcaagctgcagaagcaaataagaatgcgagtattcttttaaaggaacttgatctggaaaagtcaagagaagagagcagaaagcaggctcttgctgctaaaagagaaaaaagaaaagaaaagagaaaaaagaaaaaagaggaacagaaaaggaaacaggaagaagatgaagaaaacaaacctaaggagaattcggaactaccagaggatgaagatgaagaggagaatgatgaagatgtggagcaagaagttcccatagaacctcctagtgcaaccaccaccactacgattggaatctctgcaacatctgcaacattcacaaatgtgtttgggaaaaaaagggccaatgtggtgacaactcccagcaccaatcggaaaaataagaagaacaaaacaaaagaaacccctcctacagcacatttaattttaccagaacaacatatgtctttagcccaacaaaaggcagataaaaataaaataaatggagaacctagaggtggtggtgcaggtgggaatagtgattcagataacttggacagcacagactgcaacagtgagagtagcagtggtggtaaaagccaagagttaaattttgtgatggatgtgaattcctctaaatacccctcactgctccttcattcccaagaagaaaagacaagtactgctacttccaaaactcagacacgacttgaaggtgaagtgactcctaattccttgtcaaccagctacaagacagtgtcattgccattaagctctccaaacataaagctgaatctcactagccctaaaaggggtcagaaaagagaagaagggtggaaagaagttgtacgaaggtcaaagaaattgtctgttccagcctcagtggtgtcgaggataatgggaagaggaggatgcaacatcactgcaatacaggatgttactggtgcccatattgatgtggataaacaaaaagataagaatggcgagagaatgatcacaataaggggtggcacagaatcaacaagatatgcagttcaactaatcaatgcactcattcaagatcctgctaaggaactggaagacttgattcctaaaaatcatatcagaacacctgccagcaccaaatcaattcatgctaacttctcatctggagtaggtaccacagcagcttccagtaaaaatgcatttcctttgggtgctccaactcttgtaacttcacaggcaacaacgttatctacgttccagcccgctaataaacttaataagaatgttccaacaaatgtacgttcttctttcccagtttctctacccttagcttatcctcaccctcattttgccctgctggctgctcaaactatgcaacagattcggcatcctcgcttacccatggcccagtttggaggaaccttctcaccttctcctaacacatggggaccattcccagtgagacctgtgaatcctggcaacacaaatagctctccaaagcataataacacaagccgtctacctaaccagaacgggactgttttaccctcagagtctgctggactagctactgccagttgtcctatcactgtctcttctgtagttgctgccagtcagcaactgtgtgtcactaatacccggactccttcatcagtcagaaagcagttgtttgcctgtgtgcctaagacaagtcctccagcaacagtgatttcttctgtgacaagcacttgtagttccctgccttctgtctcctctgcacctatcactagcgggcaagctcccaccacatttctacctgcaagtacttctcaagcacagctttcttcacaaaagatggagtctttctctgctgtgccacccaccaaagagaaagtgtccacacaggaccagcccatggcaaacctatgtaccccatcttcaactgcaaacagttgcagtagctctgccagcaacaccccgggagctccagaaactcacccatccagtagtcccactcctacttccagtaacacacaagaggaggcacagccatccagtgtgtctgatttaagtcctatgtcaatgccttttgcatctaactcagaacctgctccattgactttgacatcacccagaatggttgctgctgataatcaggacaccagtaatttacctcagttagctgtaccagcacctcgagtttctcatcgaatgcagcccagaggttctttttactccatggtaccaaatgcaactattcaccaggatccccagtctatttttgttacgaatccagttactttaacaccacctcaaggcccaccagctgcagtgcagctttcttcagctgtgaacattatgaatggttctcagatgcacataaacccagcaaataagtctttgccacctacatttggcccagccacacttttcaatcacttcagcagtctttttgatagtagtcaggtgccagctaaccagggctggggagatggtccactgtcctcacgagttgctacagatgcctctttcactgttcagtcagcgttcctgggtaactcagtgcttggacacttggaaaacatgcaccctgataactcaaaggcacctggcttcagaccaccttcccagcgagtttctactagtccagttgggttaccatccattgacccatcaggcagctccccatcttcctcttctgctcctctggcaagtttttccggcataccaggaacaagggttttcctgcaagggccagctcctgttgggactcctagtttcaacagacaacatttttctccccatccttggacaagcgcctcaaactcatgtgactctcctattccatctgtttcttcgggatcatcttcacctctttcagccacttctgccccaccaacgttgggccaaccaaaaggagtcagtgccagtcaagatcgaaagatacctcccccaattggaacagagagactggcccgaattcggcaaggagggtctgttgcacaagccccggcggggaccagttttgtcgctcccgttggacacagtggaatctggtcatttggtgtcaatgctgtgtcagaaggcttatcaggttggtcgcaatctgtgatggggaaccatccaatgcatcaacaattatcagacccaagcacattctcccaacatcagccaatggagagagatgattctggaatggtagccccctctaacatttttcatcagcctatggcaagtggttttgtggatttttctaaaggtctgccaatttccatgtatggaggcaccataataccctctcatcctcagcttgctgatgttccaggaggccctctgtttaatggacttcacaatccagatcctgcttggaaccctatgataaaagttatccaaaattcaactgaatgcactgatgcccagcaggtaaaatgggcttaatgctcttttgttttttagatttgtcacatcattctttttgttttgtgagaagtataagtactgaatatcaaaagtcataattgaccatttcgatctggattgctttttcaatatcaagatgatgctactgaacactttatttaatatatgtgtattcttcctaggcagaaacagtgaattgccattgcatttatatattcattttgtaactgtctaaagattcctaattagaaattccaatttttcctcccccttttcagatttggcctggcacgtgggcacctcatattggaaacatgcatctcaaatatgtcaactaagttagaaggtctttactctttagccttgtttaagaaacctatgaccttggaagaaccatggggatttttttttaatgtgcctaagaaattttctctgaggctttagcaatggaaatttgattgcccattgtataagaacaaattgatttcctatccacctgattatgttctctggttagtttagccattttgaacttaagatcatatgaccttagtgcttttggctaaacatacagaatactacttgtatgcagaagagaattagttgattacatgtttcaaccttttagggtgataaatacatgtataattgtttacatacttaaaaggaaaaagttgagtaaatttcttgtcatatagtggctctacgtaatgtagcctgtattaatgtgaaatatttaccagaatattcaataaaaagatgaacagtctttagaagtggggtgtgatcctttcagtggtcatgcaggtaccactcaatccacattatattgaaccagatggttaatactatatttgtaacaggcttctcacatttaacacttgagtcccttcttagactgccttaaaaaagcacttttaagactatttacctatttattctgtgttaaacattccttgttcccttgttgtcttccataatcctttaacatatgagaaagtttcaagctctggcaatgtgtcttatctgactttagctagcagataggccactgataggttttttctctatggatcatgagaatgtcaataagaacaattggatttaaatcagatgacactaaacaaatgtagggacacccaaattatcaacttcaggttccttctgtgcttcctgaccttttttatctgaaagatttgtctggttatagatattttaagctttatatgagttgggacataaggaggtgactcctgtcattctgttgtattattgaatcagctgagtaatatttataaatatgtgagtaattccaggcttagttccatggccctaagcatggagagtcaatatgtttaacaagctaaacagaggaaccctggaatgggctgctttggccaaaccataggctatgccgagaatcagcatagagaaggaaaagttatcccactgaaaagtatagtcatcaacttatttgtgttttaatatagctgaatttttcctggtcagtataggcaatacagaaaagaaaacaagaaaatgtttggagctgatggagaagccaaaactcatatnaaggcaaagaaggatgcacagagaaagagtagtaactagggacagaactatattagcagcacctttctacncttatgccaacaggaattcttaattttctctgcccaggtcctaaagccaggaccacatcagacacaccatgtttgttctgtgtcagatatacctgcttctttaatcttctatatcatcttacatatgagaaagcttccttaattaagcttatgtcttatgttttgttttgaatggattttgaaagtgttgtttattgaagctactactttgtagtgattgataaccacatcaagtatcattaaggggccccttgacctttgtgggggcagttgggtggggcacaaaagactccttggatcacctgtgtatcttgctgtttccacttaccattaacagcaacaagaaaaatcacctaaaattggtgaaatgaatgaaactactcttgatgaaatatatactagtgagaaataatattaaataaattattcagtgggacaaaaaggtgagttttattctatcttaactgtctacaatacatttgaattgtctggaggagccttaagtccatattctgcaccttgaggacaaccaaatgagaaattttatttcaggtcagtaagtagaatttatgaagagaaaggagataattatgaggaatccctaggaaaattgggaggaaaacaacagttgtatagttgggagtagttctttaggatacgctcctcccttccttcttaccagcacttccttcctttctttctgactatttggatcccagtagcctgctcccaacctcatttcacctgctaaatctcttcttcctctgcctgcctcttcctggcactactttactgctattttaccaacctgaacatttggataaaacctagctcaggtaagaacttaattactttcaaaatatacaagggatatgggaggagacagcatggatacagtggagcagtagtcagtagtcagagcctaaattctattttcatttctgccgcttgaagctttatggccttaggcaaatcatctcacctttctgggtttcacttttctcatctgaaattgaactcaagagtcttctagttctaacacaggatttcttcttgtgaatgagaatataagatatggaaatatttgaagccattagattgtttacagtgctgagatttgagagcccctagcattggttctgataaggaatcgaaataaatcctgccattattatgggggccagtattgagattttagtggaggcagaagaagaccttgcacatctttagtgagccttcaagttgtgaagaaacatcctgctaaggtatagatcaaacccagtgaaatgaaactataggaatgaaactacatcatcaaggtttctggacccacttatttcaacttgtgttcaatgtaataaaattccgctaccaataaaattattaatgttttaagaccctttaaacctattgtggctacagtgtgctgacttgcccttttataggccagtctgcttccttcagtccctgctctcaaaggggaaatcccatcacctcagctaaccagaccgaagaagagaattggacggccgatggtggcctctcctaaccagaggcaccaggatcatctacgaccgaaagttcctgctggagtgcaagaactcacccattgcccggacacccccctgctgcctccctcagattcccggggtcacaactcctccaacagcccctctctccaagctggaggagctgaaggagcaggagacagaggaagagatacccgatgacgcacaatttgaaatggacatctaatccagtgcagatgacctggcatgtggagttacagagggatccctcatgccactgctgccaccacctcttcctggggcatccaaaggccagctggcctcatctaatctggaagggagtgacttgttagttccaggcctcctttagttctgaggcagctagaccagggataggagtgggcaacttgccaagcccttaactctacttcctcttcagtctgtggtactcctcctaaccctaaaccctctatgctcaggggctggaactggggaatggagtaagtcaccttctgactgcttagtaaacattcaaagaaaaaa

SEQ ID NO: 375973 - DNA, 9219 bp, Homo sapiens
  misc_feature (7076)..(7076): n is a, c, g, or t
  misc_feature (7147)..(7147): n is a, c, g, or t
ttaaggcaggggctgatatagaacttggctgctccacacctctgatggaggcatctcaggagggacacctggaattggttaaatatttgctggcttctggcgctaatgtgcatgctacaacagcaacaggagacacagccttaacctatgcttgtgaaaatggacatacggatgttgcagatgttttacttcaagcaggggctgatttagaacatgaatctgaaggtggaagaacacctttgatgaaagctgcaagagctggtcatttgtgcactgtgcagtttcttattagcaaaggtgccaatgttaacagggctacagccaataatgatcatacagtagtgtcgctggcatgtgcaggaggccacctggcagttgttgagcttctcttggctcatggggctgaccctactcatcgactcaaggatggttcaacaatgctcattgaagctgcaaagggtggccatactaatgtagtttcttatctgttggattatccaaataatgttctgtcagttcccaccacagatgtgtctcagctccctccaccttctcaagatcagtctcaggtgccacgtgtgccaacgcatacacttgccatggttgtacctccccaggaacctgacagaacttcacaggagaactctcctgcccttttaggagtgcaaaaaggtacatccaagcagaagtccagttccctccaggtagcagatcaggacctactgccatcttttcacccataccagcctttggagtgcatagtagaggagactgaaggcaagctgaatgaactgggacaaagaattagtgctattgaaaaagcacagcttaagtcactggagttaattcaaggtgaacctctgaacaaagataagatagaagaacttaaaaagaacagagaagagcaagtccagaagaagaagaaaatattgaaagaactgcagaaagtggaaaggcagttgcagatgaaaacacagcagcaatttaccaaagaatacttggaaaccaaaggtcagaaagacacagtgtctctacaccaacagtgctctcatagaggagtcttcccagaaggggaaggagatggtagtctcccagaggatcacttttcagagttacctcaggttgacacaatcttatttaaagataatgatgttgatgatgagcaacagtctccaccatcggcagaacagattgattttgtcccagtccagcctttatcatctccacagtgtaacttttccagtgacttaggttctaatgggacaaattctcttgaacttcagaaagtatcaggtaatcagcagattgtaggacagcctcagattgctattactggacatgatcaggggctgttagttcaagaaccagatggactaatggttgcaactccagctcagacgcttaccgacactcttgatgacctgatagcagctgtgagtaccagagtgcccactggttccaacagttcttctcagaccacagagtgtcttacacctgaatcctgttcgcagactacaagcaatgtggcttcccaatcgatgcctcctgtgtatccttcagttgacattgatgcacatactgagagcaatcatgacacagcattaacactagcttgtgcaggtggtcatgaagaacttgtatctgtgctcattgcacgggatgccaaaattgaacacagagacaaaaaaggtttcacaccactaatcctggcagcaacagcagggcatgttggagttgttgaaatccttttggataaaggtggagatatagaagcacagtctgaacgaactaaggatactccgctttcattggcatgttctggtggacgtcaggaggtggtagacttgctgctggctcgaggtgcaaataaagaacataggaacgtatctgattatacaccactgagtctagctgcgtctggaggatatgttaatatcattaagattctgcttaatgctggggcagaaattaattcaaggactgggagtaaactaggtatttctcccctgatgttggctgcaatgaatggacatgttcctgcagtaaaattgctgctcgatatgggttcagacattaatgcccaaatagagaccaatcggaacacggctctcaccctggcctgtttccagggccgagcagaagtagtgagtttgcttctggaccgaaaagccaatgttgaacatagggcaaagacgggtcttacccccttgatggaagcagcttctggagggtatgcagaggttggaagagttcttcttgataaaggagcagatgttaatgctccccctgtgccttcctcaagagatactgctttaacaatagcagcagacaaaggtcactacaaattttgtgaactcctgattcataggggagcccacattgatgttcgtaacaaaaagggaaatacgccactttggctggcatccaatggaggtcattttgatgttgtgcagttgctagtgcaagcaggtgctgatgtggatgcagcagataaccggaaaatcacacctcttatgtcagcatttcgcaagggtcatgtaaaagttgttcaatatttggtaaaggaagtaaatcagttcccttctgatatagaatgcatgagatacatagcaacaattacagataaggaactgttgaaaaaatgtcatcaatgtgtcgaaaccattgtgaaggctaaagaccagcaagctgcagaagcaaataagaatgcgagtattcttttaaaggaacttgatctggaaaagtcaagagaagagagcagaaagcaggctcttgctgctaaaagagaaaaaagaaaagaaaagagaaaaaagaaaaaagaggaacagaaaaggaaacaggaagaagatgaagaaaacaaacctaaggagaattcggaactaccagaggatgaagatgaagaggagaatgatgaagatgtggagcaagaagttcccatagaacctcctagtgcaaccaccaccactacgattggaatctctgcaacatctgcaacattcacaaatgtgtttgggaaaaaaagggccaatgtggtgacaactcccagcaccaatcggaaaaataagaagaacaaaacagataaacaaaaagataagaatggcgagagaatgatcacaataaggggtggcacagaatcaacaagatatgcagttcaactaatcaatgcactcattcaagatcctgctaaggaactggaagacttgattcctaaaaatcatatcagaacacctgccagcaccaaatcaattcatgctaacttctcatctggagtaggtaccacagcagcttccagtaaaaatgcatttcctttgggtgctccaactcttgtaacttcacaggcaacaacgttatctacgttccagcccgctaataaacttaataagaatgttccaacaaatgtacgttcttctttcccagtttctctacccttagcttatcctcaccctcattttgccctgctggctgctcaaactatgcaacagattcggcatcctcgcttacccatggcccagtttggaggaaccttctcaccttctcctaacacatggggaccattcccagtgagacctgtgaatcctggcaacacaaatagctctccaaagcataataacacaagccgtctacctaaccagaacgggactgttttaccctcagagtctgctggactagctactgccagttgtcctatcactgtctcttctgtagttgctgccagtcagcaactgtgtgtcactaatacccggactccttcatcagtcagaaagcagttgtttgcctgtgtgcctaagacaagtcctccagcaacagtgatttcttctgtgacaagcacttgtagttccctgccttctgtctcctctgcacctatcactagcgggcaagctcccaccacatttctacctgcaagtacttctcaagcacagctttcttcacaaaagatggagtctttctctgctgtgccacccaccaaagagaaagtgtccacacaggaccagcccatggcaaacctatgtaccccatcttcaactgcaaacagttgcagtagctctgccagcaacaccccgggagctccagaaactcacccatccagtagtcccactcctacttccagtaacacacaagaggaggcacagccatccagtgtgtctgatttaagtcctatgtcaatgccttttgcatctaactcagaacctgctccattgactttgacatcacccagaatggttgctgctgataatcaggacaccagtaatttacctcagttagctgtaccagcacctcgagtttctcatcgaatgcagcccagaggttctttttactccatggtaccaaatgcaactattcaccaggatccccagtctatttttgttacgaatccagttactttaacaccacctcaaggcccaccagctgcagtgcagctttcttcagctgtgaacattatgaatggttctcagatgcacataaacccagcaaataagtctttgccacctacatttggcccagccacacttttcaatcacttcagcagtctttttgatagtagtcaggtgccagctaaccagggctggggagatggtccactgtcctcacgagttgctacagatgcctctttcactgttcagtcagcgttcctgggtaactcagtgcttggacacttggaaaacatgcaccctgataactcaaaggcacctggcttcagaccaccttcccagcgagtttctactagtccagttgggttaccatccattgacccatcaggcagctccccatcttcctcttctgctcctctggcaagtttttccggcataccaggaacaagggttttcctgcaagggccagctcctgttgggactcctagtttcaacagacaacatttttctccccatccttggacaagcgcctcaaactcatgtgactctcctattccatctgtttcttcgggatcatcttcacctctttcagccacttctgccccaccaacgttgggccaaccaaaaggagtcagtgccagtcaagatcgaaagatacctcccccaattggaacagagagactggcccgaattcggcaaggagggtctgttgcacaagccccggcggggaccagttttgtcgctcccgttggacacagtggaatctggtcatttggtgtcaatgctgtgtcagaaggcttatcaggttggtcgcaatctgtgatggggaaccatccaatgcatcaacaattatcagacccaagcacattctcccaacatcagccaatggagagagatgattctggaatggtagccccctctaacatttttcatcagcctatggcaagtggttttgtggatttttctaaaggtctgccaatttccatgtatggaggcaccataataccctctcatcctcagcttgctgatgttccaggaggccctctgtttaatggacttcacaatccagatcctgcttggaaccctatgataaaagttatccaaaattcaactgaatgcactgatgcccagcaggtaaaatgggcttaatgctcttttgttttttagatttgtcacatcattctttttgttttgtgagaagtataagtactgaatatcaaaagtcataattgaccatttcgatctggattgctttttcaatatcaagatgatgctactgaacactttatttaatatatgtgtattcttcctaggcagaaacagtgaattgccattgcatttatatattcattttgtaactgtctaaagattcctaattagaaattccaatttttcctcccccttttcagatttggcctggcacgtgggcacctcatattggaaacatgcatctcaaatatgtcaactaagttagaaggtctttactctttagccttgtttaagaaacctatgaccttggaagaaccatggggatttttttttaatgtgcctaagaaattttctctgaggctttagcaatggaaatttgattgcccattgtataagaacaaattgatttcctatccacctgattatgttctctggttagtttagccattttgaacttaagatcatatgaccttagtgcttttggctaaacatacagaatactacttgtatgcagaagagaattagttgattacatgtttcaaccttttagggtgataaatacatgtataattgtttacatacttaaaaggaaaaagttgagtaaatttcttgtcatatagtggctctacgtaatgtagcctgtattaatgtgaaatatttaccagaatattcaataaaaagatgaacagtctttagaagtggggtgtgatcctttcagtggtcatgcaggtaccactcaatccacattatattgaaccagatggttaatactatatttgtaacaggcttctcacatttaacacttgagtcccttcttagactgccttaaaaaagcacttttaagactatttacctatttattctgtgttaaacattccttgttcccttgttgtcttccataatcctttaacatatgagaaagtttcaagctctggcaatgtgtcttatctgactttagctagcagataggccactgataggttttttctctatggatcatgagaatgtcaataagaacaattggatttaaatcagatgacactaaacaaatgtagggacacccaaattatcaacttcaggttccttctgtgcttcctgaccttttttatctgaaagatttgtctggttatagatattttaagctttatatgagttgggacataaggaggtgactcctgtcattctgttgtattattgaatcagctgagtaatatttataaatatgtgagtaattccaggcttagttccatggccctaagcatggagagtcaatatgtttaacaagctaaacagaggaaccctggaatgggctgctttggccaaaccataggctatgccgagaatcagcatagagaaggaaaagttatcccactgaaaagtatagtcatcaacttatttgtgttttaatatagctgaatttttcctggtcagtataggcaatacagaaaagaaaacaagaaaatgtttggagctgatggagaagccaaaactcatatnaaggcaaagaaggatgcacagagaaagagtagtaactagggacagaactatattagcagcacctttctacncttatgccaacaggaattcttaattttctctgcccaggtcctaaagccaggaccacatcagacacaccatgtttgttctgtgtcagatatacctgcttctttaatcttctatatcatcttacatatgagaaagcttccttaattaagcttatgtcttatgttttgttttgaatggattttgaaagtgttgtttattgaagctactactttgtagtgattgataaccacatcaagtatcattaaggggccccttgacctttgtgggggcagttgggtggggcacaaaagactccttggatcacctgtgtatcttgctgtttccacttaccattaacagcaacaagaaaaatcacctaaaattggtgaaatgaatgaaactactcttgatgaaatatatactagtgagaaataatattaaataaattattcagtgggacaaaaaggtgagttttattctatcttaactgtctacaatacatttgaattgtctggaggagccttaagtccatattctgcaccttgaggacaaccaaatgagaaattttatttcaggtcagtaagtagaatttatgaagagaaaggagataattatgaggaatccctaggaaaattgggaggaaaacaacagttgtatagttgggagtagttctttaggatacgctcctcccttccttcttaccagcacttccttcctttctttctgactatttggatcccagtagcctgctcccaacctcatttcacctgctaaatctcttcttcctctgcctgcctcttcctggcactactttactgctattttaccaacctgaacatttggataaaacctagctcaggtaagaacttaattactttcaaaatatacaagggatatgggaggagacagcatggatacagtggagcagtagtcagtagtcagagcctaaattctattttcatttctgccgcttgaagctttatggccttaggcaaatcatctcacctttctgggtttcacttttctcatctgaaattgaactcaagagtcttctagttctaacacaggatttcttcttgtgaatgagaatataagatatggaaatatttgaagccattagattgtttacagtgctgagatttgagagcccctagcattggttctgataaggaatcgaaataaatcctgccattattatgggggccagtattgagattttagtggaggcagaagaagaccttgcacatctttagtgagccttcaagttgtgaagaaacatcctgctaaggtatagatcaaacccagtgaaatgaaactataggaatgaaactacatcatcaaggtttctggacccacttatttcaacttgtgttcaatgtaataaaattccgctaccaataaaattattaatgttttaagaccctttaaacctattgtggctacagtgtgctgacttgcccttttataggccagtctgcttccttcagtccctgctctcaaaggggaaatcccatcacctcagctaaccagaccgaagaagagaattggacggccgatggtggcctctcctaaccagaggcaccaggatcatctacgaccgaaagttcctgctggagtgcaagaactcacccattgcccggacacccccctgctgcctccctcagattcccggggtcacaactcctccaacagcccctctctccaagctggaggagctgaaggagcaggagacagaggaagagatacccgatgacgcacaatttgaaatggacatctaatccagtgcagatgacctggcatgtggagttacagagggatccctcatgccactgctgccaccacctcttcctggggcatccaaaggccagctggcctcatctaatctggaagggagtgacttgttagttccaggcctcctttagttctgaggcagctagaccagggataggagtgggcaacttgccaagcccttaactctacttcctcttcagtctgtggtactcctcctaaccctaaaccctctatgctcaggggctggaactggggaatggagtaagtcaccttctgactgcttagtaaacattcaaagaaaaaa

SEQ ID NO: 375974 - DNA, 9460 bp, Homo sapiens
  misc_feature (7317)..(7317): n is a, c, g, or t
  misc_feature (7388)..(7388): n is a, c, g, or t
ttaaggcaggggctgatatagaacttggctgctccacacctctgatggaggcatctcaggagggacacctggaattggttaaatatttgctggcttctggcgctaatgtgcatgctacaacagcaacaggagacacagccttaacctatgcttgtgaaaatggacatacggatgttgcagatgttttacttcaagcaggggctgatttagaacatgaatctgaaggtggaagaacacctttgatgaaagctgcaagagctggtcatttgtgcactgtgcagtttcttattagcaaaggtgccaatgttaacagggctacagccaataatgatcatacagtagtgtcgctggcatgtgcaggaggccacctggcagttgttgagcttctcttggctcatggggctgaccctactcatcgactcaaggatggttcaacaatgctcattgaagctgcaaagggtggccatactaatgtagtttcttatctgttggattatccaaataatgttctgtcagttcccaccacagatgtgtctcagctccctccaccttctcaagatcagtctcaggtgccacgtgtgccaacgcatacacttgccatggttgtacctccccaggaacctgacagaacttcacaggagaactctcctgcccttttaggagtgcaaaaaggtacatccaagcagaagtccagttccctccaggtagcagatcaggacctactgccatcttttcacccataccagcctttggagtgcatagtagaggagactgaaggcaagctgaatgaactgggacaaagaattagtgctattgaaaaagcacagcttaagtcactggagttaattcaaggtgaacctctgaacaaagataagatagaagaacttaaaaagaacagagaagagcaagtccagaagaagaagaaaatattgaaagaactgcagaaagtggaaaggcagttgcagatgaaaacacagcagcaatttaccaaagaatacttggaaaccaaaggtcagaaagacacagtgtctctacaccaacagtgctctcatagaggagtcttcccagaaggggaaggagatggtagtctcccagaggatcacttttcagagttacctcaggttgacacaatcttatttaaagataatgatgttgatgatgagcaacagtctccaccatcggcagaacagattgattttgtcccagtccagcctttatcatctccacagtgtaacttttccagtgacttaggttctaatgggacaaattctcttgaacttcagaaagtatcaggtaatcagcagattgtaggacagcctcagattgctattactggacatgatcaggggctgttagttcaagaaccagatggactaatggttgcaactccagctcagacgcttaccgacactcttgatgacctgatagcagctgtgagtaccagagtgcccactggttccaacagttcttctcagaccacagagtgtcttacacctgaatcctgttcgcagactacaagcaatgtggcttcccaatcgatgcctcctgtgtatccttcagttgacattgatgcacatactgagagcaatcatgacacagcattaacactagcttgtgcaggtggtcatgaagaacttgtatctgtgctcattgcacgggatgccaaaattgaacacagagacaaaaaaggtttcacaccactaatcctggcagcaacagcagggcatgttggagttgttgaaatccttttggataaaggtggagatatagaagcacagtctgaacgaactaaggatactccgctttcattggcatgttctggtggacgtcaggaggtggtagacttgctgctggctcgaggtgcaaataaagaacataggaacgtatctgattatacaccactgagtctagctgcgtctggaggatatgttaatatcattaagattctgcttaatgctggggcagaaattaattcaaggactgggagtaaactaggtatttctcccctgatgttggctgcaatgaatggacatgttcctgcagtaaaattgctgctcgatatgggttcagacattaatgcccaaatagagaccaatcggaacacggctctcaccctggcctgtttccagggccgagcagaagtagtgagtttgcttctggaccgaaaagccaatgttgaacatagggcaaagacgggtcttacccccttgatggaagcagcttctggagggtatgcagaggttggaagagttcttcttgataaaggagcagatgttaatgctccccctgtgccttcctcaagagatactgctttaacaatagcagcagacaaaggtcactacaaattttgtgaactcctgattcataggggagcccacattgatgttcgtaacaaaaagggaaatacgccactttggctggcatccaatggaggtcattttgatgttgtgcagttgctagtgcaagcaggtgctgatgtggatgcagcagataaccggaaaatcacacctcttatgtcagcatttcgcaagggtcatgtaaaagttgttcaatatttggtaaaggaagtaaatcagttcccttctgatatagaatgcatgagatacatagcaacaattacagataaggaactgttgaaaaaatgtcatcaatgtgtcgaaaccattgtgaaggctaaagaccagcaagctgcagaagcaaataagaatgcgagtattcttttaaaggaacttgatctggaaaagtcaagagaagagagcagaaagcaggctcttgctgctaaaagagaaaaaagaaaagaaaagagaaaaaagaaaaaagaggaacagaaaaggaaacaggaagaagatgaagaaaacaaacctaaggagaattcggaactaccagaggatgaagatgaagaggagaatgatgaagatgtggagcaagaagttcccatagaacctcctagtgcaaccaccaccactacgattggaatctctgcaacatctgcaacattcacaaatgtgtttgggaaaaaaagggccaatgtggtgacaactcccagcaccaatcggaaaaataagaagaacaaaacaaaagaaacccctcctacagcacatttaattttaccagaacaacatatgtctttagcccaacaaaaggcagataaaaataaaataaatggagaacctagaggtggtggtgcaggtgggaatagtgattcagataacttggacagcacagactgcaacagtgagagtagcagtggtggtaaaagccaagagttaaattttgtgatggatgtgaattcctctaaatacccctcactgctccttcattcccaagaagaaaagacaagtactgctacttccaaaactcagacacgacttgaaggtgaagtgactcctaattccttgtcaaccagctacaagacagtgtcattgccattaagctctccaaacataaagctgaatctcactagccctaaaaggggtcagaaaagagaagaagggtggaaagaagttgtacgaaggtcaaagaaattgtctgttccagcctcagtggtgtcgaggataatgggaagaggaggatgcaacatcactgcaatacaggatgttactggtgcccatattgatgtggataaacaaaaagataagaatggcgagagaatgatcacaataaggggtggcacagaatcaacaagatatgcagttcaactaatcaatgcactcattcaagatcctgctaaggaactggaagacttgattcctaaaaatcatatcagaacacctgccagcaccaaatcaattcatgctaacttctcatctggagtaggtaccacagcagcttccagtaaaaatgcatttcctttgggtgctccaactcttgtaacttcacaggcaacaacgttatctacgttccagcccgctaataaacttaataagaatgttccaacaaatgtacgttcttctttcccagtttctctacccttagcttatcctcaccctcattttgccctgctggctgctcaaactatgcaacagattcggcatcctcgcttacccatggcccagtttggaggaaccttctcaccttctcctaacacatggggaccattcccagtgagacctgtgaatcctggcaacacaaatagctctccaaagcataataacacaagccgtctacctaaccagaacgggactgttttaccctcagagtctgctggactagctactgccagttgtcctatcactgtctcttctgtagttgctgccagtcagcaactgtgtgtcactaatacccggactccttcatcagtcagaaagcagttgtttgcctgtgtgcctaagacaagtcctccagcaacagtgatttcttctgtgacaagcacttgtagttccctgccttctgtctcctctgcacctatcactagcgggcaagctcccaccacatttctacctgcaagtacttctcaagcacagctttcttcacaaaagatggagtctttctctgctgtgccacccaccaaagagaaagtgtccacacaggaccagcccatggcaaacctatgtaccccatcttcaactgcaaacagttgcagtagctctgccagcaacaccccgggagctccagaaactcacccatccagtagtcccactcctacttccagtaacacacaagaggaggcacagccatccagtgtgtctgatttaagtcctatgtcaatgccttttgcatctaactcagaacctgctccattgactttgacatcacccagaatggttgctgctgataatcaggacaccagtaatttacctcagttagctgtaccagcacctcgagtttctcatcgaatgcagcccagaggttctttttactccatggtaccaaatgcaactattcaccaggatccccagtctatttttgttacgaatccagttactttaacaccacctcaaggcccaccagctgcagtgcagctttcttcagctgtgaacattatgaatggttctcagatgcacataaacccagcaaataagtctttgccacctacatttggcccagccacacttttcaatcacttcagcagtctttttgatagtagtcaggtgccagctaaccagggctggggagatggtccactgtcctcacgagttgctacagatgcctctttcactgttcagtcagcgttcctgggtaactcagtgcttggacacttggaaaacatgcaccctgataactcaaaggcacctggcttcagaccaccttcccagcgagtttctactagtccagttgggttaccatccattgacccatcaggcagctccccatcttcctcttctgctcctctggcaagtttttccggcataccaggaacaagggttttcctgcaagggccagctcctgttgggactcctagtttcaacagacaacatttttctccccatccttggacaagcgcctcaaactcatgtgactctcctattccatctgtttcttcgggatcatcttcacctctttcagccacttctgccccaccaacgttgggccaaccaaaaggagtcagtgccagtcaagatcgaaagatacctcccccaattggaacagagagactggcccgaattcggcaaggagggtctgttgcacaagccccggcggggaccagttttgtcgctcccgttggacacagtggaatctggtcatttggtgtcaatgctgtgtcagaaggcttatcaggttggtcgcaatctgtgatggggaaccatccaatgcatcaacaattatcagacccaagcacattctcccaacatcagccaatggagagagatgattctggaatggtagccccctctaacatttttcatcagcctatgggtctgccaatttccatgtatggaggcaccataataccctctcatcctcagcttgctgatgttccaggaggccctctgtttaatggacttcacaatccagatcctgcttggaaccctatgataaaagttatccaaaattcaactgaatgcactgatgcccagcagatttggcctggcacgtgggcacctcatattggaaacatgcatctcaaatatgtcaactaagttagaaggtctttactctttagccttgtttaagaaacctatgaccttggaagaaccatggggatttttttttaatgtgcctaagaaattttctctgaggctttagcaatggaaatttgattgcccattgtataagaacaaattgatttcctatccacctgattatgttctctggttagtttagccattttgaacttaagatcatatgaccttagtgcttttggctaaacatacagaatactacttgtatgcagaagagaattagttgattacatgtttcaaccttttagggtgataaatacatgtataattgtttacatacttaaaaggaaaaagttgagtaaatttcttgtcatatagtggctctacgtaatgtagcctgtattaatgtgaaatatttaccagaatattcaataaaaagatgaacagtctttagaagtggggtgtgatcctttcagtggtcatgcaggtaccactcaatccacattatattgaaccagatggttaatactatatttgtaacaggcttctcacatttaacacttgagtcccttcttagactgccttaaaaaagcacttttaagactatttacctatttattctgtgttaaacattccttgttcccttgttgtcttccataatcctttaacatatgagaaagtttcaagctctggcaatgtgtcttatctgactttagctagcagataggccactgataggttttttctctatggatcatgagaatgtcaataagaacaattggatttaaatcagatgacactaaacaaatgtagggacacccaaattatcaacttcaggttccttctgtgcttcctgaccttttttatctgaaagatttgtctggttatagatattttaagctttatatgagttgggacataaggaggtgactcctgtcattctgttgtattattgaatcagctgagtaatatttataaatatgtgagtaattccaggcttagttccatggccctaagcatggagagtcaatatgtttaacaagctaaacagaggaaccctggaatgggctgctttggccaaaccataggctatgccgagaatcagcatagagaaggaaaagttatcccactgaaaagtatagtcatcaacttatttgtgttttaatatagctgaatttttcctggtcagtataggcaatacagaaaagaaaacaagaaaatgtttggagctgatggagaagccaaaactcatatnaaggcaaagaaggatgcacagagaaagagtagtaactagggacagaactatattagcagcacctttctacncttatgccaacaggaattcttaattttctctgcccaggtcctaaagccaggaccacatcagacacaccatgtttgttctgtgtcagatatacctgcttctttaatcttctatatcatcttacatatgagaaagcttccttaattaagcttatgtcttatgttttgttttgaatggattttgaaagtgttgtttattgaagctactactttgtagtgattgataaccacatcaagtatcattaaggggccccttgacctttgtgggggcagttgggtggggcacaaaagactccttggatcacctgtgtatcttgctgtttccacttaccattaacagcaacaagaaaaatcacctaaaattggtgaaatgaatgaaactactcttgatgaaatatatactagtgagaaataatattaaataaattattcagtgggacaaaaaggtgagttttattctatcttaactgtctacaatacatttgaattgtctggaggagccttaagtccatattctgcaccttgaggacaaccaaatgagaaattttatttcaggtcagtaagtagaatttatgaagagaaaggagataattatgaggaatccctaggaaaattgggaggaaaacaacagttgtatagttgggagtagttctttaggatacgctcctcccttccttcttaccagcacttccttcctttctttctgactatttggatcccagtagcctgctcccaacctcatttcacctgctaaatctcttcttcctctgcctgcctcttcctggcactactttactgctattttaccaacctgaacatttggataaaacctagctcaggtaagaacttaattactttcaaaatatacaagggatatgggaggagacagcatggatacagtggagcagtagtcagtagtcagagcctaaattctattttcatttctgccgcttgaagctttatggccttaggcaaatcatctcacctttctgggtttcacttttctcatctgaaattgaactcaagagtcttctagttctaacacaggatttcttcttgtgaatgagaatataagatatggaaatatttgaagccattagattgtttacagtgctgagatttgagagcccctagcattggttctgataaggaatcgaaataaatcctgccattattatgggggccagtattgagattttagtggaggcagaagaagaccttgcacatctttagtgagccttcaagttgtgaagaaacatcctgctaaggtatagatcaaacccagtgaaatgaaactataggaatgaaactacatcatcaaggtttctggacccacttatttcaacttgtgttcaatgtaataaaattccgctaccaataaaattattaatgttttaagaccctttaaacctattgtggctacagtgtgctgacttgcccttttataggccagtctgcttccttcagtccctgctctcaaaggggaaatcccatcacctcagctaaccagaccgaagaagagaattggacggccgatggtggcctctcctaaccagaggcaccaggatcatctacgaccgaaagttcctgctggagtgcaagaactcacccattgcccggacacccccctgctgcctccctcagattcccggggtcacaactcctccaacagcccctctctccaagctggaggagctgaaggagcaggagacagaggaagagatacccgatgacgcacaatttgaaatggacatctaatccagtgcagatgacctggcatgtggagttacagagggatccctcatgccactgctgccaccacctcttcctggggcatccaaaggccagctggcctcatctaatctggaagggagtgacttgttagttccaggcctcctttagttctgaggcagctagaccagggataggagtgggcaacttgccaagcccttaactctacttcctcttcagtctgtggtactcctcctaaccctaaaccctctatgctcaggggctggaactggggaatggagtaagtcaccttctgactgcttagtaaacattcaaagaaaaaa

SEQ ID NO: 375975 - DNA, 9436 bp, Homo sapiens
  misc_feature (7293)..(7293): n is a, c, g, or t
  misc_feature (7364)..(7364): n is a, c, g, or t
ttaaggcaggggctgatatagaacttggctgctccacacctctgatggaggcatctcaggagggacacctggaattggttaaatatttgctggcttctggcgctaatgtgcatgctacaacagcaacaggagacacagccttaacctatgcttgtgaaaatggacatacggatgttgcagatgttttacttcaagcaggggctgatttagaacatgaatctgaaggtggaagaacacctttgatgaaagctgcaagagctggtcatttgtgcactgtgcagtttcttattagcaaaggtgccaatgttaacagggctacagccaataatgatcatacagtagtgtcgctggcatgtgcaggaggccacctggcagttgttgagcttctcttggctcatggggctgaccctactcatcgactcaaggatggttcaacaatgctcattgaagctgcaaagggtggccatactaatgtagtttcttatctgttggattatccaaataatgttctgtcagttcccaccacagatgtgtctcagctccctccaccttctcaagatcagtctcaggtgccacgtgtgccaacgcatacacttgccatggttgtacctccccaggaacctgacagaacttcacaggagaactctcctgcccttttaggagtgcaaaaaggtacatccaagcagaagtccagttccctccaggtagcagatcaggacctactgccatcttttcacccataccagcctttggagtgcatagtagaggagactgaaggcaagctgaatgaactgggacaaagaattagtgctattgaaaaagcacagcttaagtcactggagttaattcaaggtgaacctctgaacaaagataagatagaagaacttaaaaagaacagagaagagcaagtccagaagaagaagaaaatattgaaagaactgcagaaagtggaaaggcagttgcagatgaaaacacagcagcaatttaccaaagaatacttggaaaccaaaggtcagaaagacacagtgtctctacaccaacagtgctctcatagaggagtcttcccagaaggggaaggagatggtagtctcccagaggatcacttttcagagttacctcaggttgacacaatcttatttaaagataatgatgttgatgatgagcaacagtctccaccatcggcagaacagattgattttgtcccagtccagcctttatcatctccacagtgtaacttttccagtgacttaggttctaatgggacaaattctcttgaacttcagaaagtatcaggtaatcagcagattgtaggacagcctcagattgctattactggacatgatcaggggctgttagttcaagaaccagatggactaatggttgcaactccagctcagacgcttaccgacactcttgatgacctgatagcagctgtgagtaccagagtgcccactggttccaacagttcttctcagaccacagagtgtcttacacctgaatcctgttcgcagactacaagcaatgtggcttcccaatcgatgcctcctgtgtatccttcagttgacattgatgcacatactgagagcaatcatgacacagcattaacactagcttgtgcaggtggtcatgaagaacttgtatctgtgctcattgcacgggatgccaaaattgaacacagagacaaaaaaggtttcacaccactaatcctggcagcaacagcagggcatgttggagttgttgaaatccttttggataaaggtggagatatagaagcacagtctgaacgaactaaggatactccgctttcattggcatgttctggtggacgtcaggaggtggtagacttgctgctggctcgaggtgcaaataaagaacataggaacgtatctgattatacaccactgagtctagctgcgtctggaggatatgttaatatcattaagattctgcttaatgctggggcagaaattaattcaaggactgggagtaaactaggtatttctcccctgatgttggctgcaatgaatggacatgttcctgcagtaaaattgctgctcgatatgggttcagacattaatgcccaaatagagaccaatcggaacacggctctcaccctggcctgtttccagggccgagcagaagtagtgagtttgcttctggaccgaaaagccaatgttgaacatagggcaaagacgggtcttacccccttgatggaagcagcttctggagggtatgcagaggttggaagagttcttcttgataaaggagcagatgttaatgctccccctgtgccttcctcaagagatactgctttaacaatagcagcagacaaaggtcactacaaattttgtgaactcctgattcataggggagcccacattgatgttcgtaacaaaaagggaaatacgccactttggctggcatccaatggaggtcattttgatgttgtgcagttgctagtgcaagcaggtgctgatgtggatgcagcagataaccggaaaatcacacctcttatgtcagcatttcgcaagggtcatgtaaaagttgttcaatatttggtaaaggaagtaaatcagttcccttctgatatagaatgcatgagatacatagcaacaattacagataaggaactgttgaaaaaatgtcatcaatgtgtcgaaaccattgtgaaggctaaagaccagcaagctgcagaagcaaataagaatgcgagtattcttttaaaggaacttgatctggaaaagtcaagagaagagagcagaaagcaggctcttgctgctaaaagagaaaaaagaaaagaaaagagaaaaaagaaaaaagaggaacagaaaaggaaacaggaagaagatgaagaaaacaaacctaaggagaattcggaactaccagaggatgaagatgaagaggagaatgatgaagatgtggagcaagaagttcccatagaacctcctagtgcaaccaccaccactacgattggaatctctgcaacatctgcaacattcacaaatgtgtttgggaaaaaaagggccaatgtggtgacaactcccagcaccaatcggaaaaataagaagaacaaaacaaaagaaacccctcctacagcacatttaattttaccagaacaacatatgtctttagcccaacaaaaggcagataaaaataaaataaatggagaacctagaggtggtggtgcaggtgggaatagtgattcagataacttggacagcacagactgcaacagtgagagtagcagtggtggtaaaagccaagagttaaattttgtgatggatgtgaattcctctaaatacccctcactgctccttcattcccaagaagaaaagacaagtactgctacttccaaaactcagacacgacttgaaggtgaagtgactcctaattccttgtcaaccagctacaagacagtgtcattgccattaagctctccaaacataaagctgaatctcactagccctaaaaggggtcagaaaagagaagaagggtggaaagaagttgtacgaaggtcaaagaaattgtctgttccagcctcagtggtgtcgaggataatgggaagaggaggatgcaacatcactgcaatacaggatgttactggtgcccatattgatgtggataaacaaaaagataagaatggcgagagaatgatcacaataaggggtggcacagaatcaacaagatatgcagttcaactaatcaatgcactcattcaagatcctgctaaggaactggaagacttgattcctaaaaatcatatcagaacacctgccagcaccaaatcaattcatgctaacttctcatctggagtaggtaccacagcagcttccagtaaaaatgcatttcctttgggtgctccaactcttgtaacttcacaggcaacaacgttatctacgttccagcccgctaataaacttaataagaatgttccaacaaatgtacgttcttctttcccagtttctctacccttagcttatcctcaccctcattttgccctgctggctgctcaaactatgcaacagattcggcatcctcgcttacccatggcccagtttggaggaaccttctcaccttctcctaacacatggggaccattcccagtgagacctgtgaatcctggcaacacaaatagctctccaaagcataataacacaagccgtctacctaaccagaacgggactgttttaccctcagagtctgctggactagctactgccagttgtcctatcactgtctcttctgtagttgctgccagtcagcaactgtgtgtcactaatacccggactccttcatcagtcagaaagcagttgtttgcctgtgtgcctaagacaagtcctccagcaacagtgatttcttctgtgacaagcacttgtagttccctgccttctgtctcctctgcacctatcactagcgggcaagctcccaccacatttctacctgcaagtacttctcaagcacagctttcttcacaaaagatggagtctttctctgctgtgccacccaccaaagagaaagtgtccacacaggaccagcccatggcaaacctatgtaccccatcttcaactgcaaacagttgcagtagctctgccagcaacaccccgggagctccagaaactcacccatccagtagtcccactcctacttccagtaacacacaagaggaggcacagccatccagtgtgtctgatttaagtcctatgtcaatgccttttgcatctaactcagaacctgctccattgactttgacatcacccagaatggttgctgctgataatcaggacaccagtaatttacctcagttagctgtaccagcacctcgagtttctcatcgaatgcagcccagaggttctttttactccatggtaccaaatgcaactattcaccaggatccccagtctatttttgttacgaatccagttactttaacaccacctcaaggcccaccagctgcagtgcagctttcttcagctgtgaacattatgaatggttctcagatgcacataaacccagcaaataagtctttgccacctacatttggcccagccacacttttcaatcacttcagcagtctttttgatagtagtcaggtgccagctaaccagggctggggagatggtccactgtcctcacgagttgctacagatgcctctttcactgttcagtcagcgttcctgggtaactcagtgcttggacacttggaaaacatgcaccctgataactcaaaggcacctggcttcagaccaccttcccagcgagtttctactagtccagttgggttaccatccattgacccatcaggcagctccccatcttcctcttctgctcctctggcaagtttttccggcataccaggaacaagggttttcctgcaagggccagctcctgttgggactcctagtttcaacagacaacatttttctccccatccttggacaagcgcctcaaactcatccacttctgccccaccaacgttgggccaaccaaaaggagtcagtgccagtcaagatcgaaagatacctcccccaattggaacagagagactggcccgaattcggcaaggagggtctgttgcacaagccccggcggggaccagttttgtcgctcccgttggacacagtggaatctggtcatttggtgtcaatgctgtgtcagaaggcttatcaggttggtcgcaatctgtgatggggaaccatccaatgcatcaacaattatcagacccaagcacattctcccaacatcagccaatggagagagatgattctggaatggtagccccctctaacatttttcatcagcctatggcaagtggttttgtggatttttctaaaggtctgccaatttccatgtatggaggcaccataataccctctcatcctcagcttgctgatgttccaggaggccctctgtttaatggacttcacaatccagatcctgcttggaaccctatgataaaagttatccaaaattcaactgaatgcactgatgcccagcagatttggcctggcacgtgggcacctcatattggaaacatgcatctcaaatatgtcaactaagttagaaggtctttactctttagccttgtttaagaaacctatgaccttggaagaaccatggggatttttttttaatgtgcctaagaaattttctctgaggctttagcaatggaaatttgattgcccattgtataagaacaaattgatttcctatccacctgattatgttctctggttagtttagccattttgaacttaagatcatatgaccttagtgcttttggctaaacatacagaatactacttgtatgcagaagagaattagttgattacatgtttcaaccttttagggtgataaatacatgtataattgtttacatacttaaaaggaaaaagttgagtaaatttcttgtcatatagtggctctacgtaatgtagcctgtattaatgtgaaatatttaccagaatattcaataaaaagatgaacagtctttagaagtggggtgtgatcctttcagtggtcatgcaggtaccactcaatccacattatattgaaccagatggttaatactatatttgtaacaggcttctcacatttaacacttgagtcccttcttagactgccttaaaaaagcacttttaagactatttacctatttattctgtgttaaacattccttgttcccttgttgtcttccataatcctttaacatatgagaaagtttcaagctctggcaatgtgtcttatctgactttagctagcagataggccactgataggttttttctctatggatcatgagaatgtcaataagaacaattggatttaaatcagatgacactaaacaaatgtagggacacccaaattatcaacttcaggttccttctgtgcttcctgaccttttttatctgaaagatttgtctggttatagatattttaagctttatatgagttgggacataaggaggtgactcctgtcattctgttgtattattgaatcagctgagtaatatttataaatatgtgagtaattccaggcttagttccatggccctaagcatggagagtcaatatgtttaacaagctaaacagaggaaccctggaatgggctgctttggccaaaccataggctatgccgagaatcagcatagagaaggaaaagttatcccactgaaaagtatagtcatcaacttatttgtgttttaatatagctgaatttttcctggtcagtataggcaatacagaaaagaaaacaagaaaatgtttggagctgatggagaagccaaaactcatatnaaggcaaagaaggatgcacagagaaagagtagtaactagggacagaactatattagcagcacctttctacncttatgccaacaggaattcttaattttctctgcccaggtcctaaagccaggaccacatcagacacaccatgtttgttctgtgtcagatatacctgcttctttaatcttctatatcatcttacatatgagaaagcttccttaattaagcttatgtcttatgttttgttttgaatggattttgaaagtgttgtttattgaagctactactttgtagtgattgataaccacatcaagtatcattaaggggccccttgacctttgtgggggcagttgggtggggcacaaaagactccttggatcacctgtgtatcttgctgtttccacttaccattaacagcaacaagaaaaatcacctaaaattggtgaaatgaatgaaactactcttgatgaaatatatactagtgagaaataatattaaataaattattcagtgggacaaaaaggtgagttttattctatcttaactgtctacaatacatttgaattgtctggaggagccttaagtccatattctgcaccttgaggacaaccaaatgagaaattttatttcaggtcagtaagtagaatttatgaagagaaaggagataattatgaggaatccctaggaaaattgggaggaaaacaacagttgtatagttgggagtagttctttaggatacgctcctcccttccttcttaccagcacttccttcctttctttctgactatttggatcccagtagcctgctcccaacctcatttcacctgctaaatctcttcttcctctgcctgcctcttcctggcactactttactgctattttaccaacctgaacatttggataaaacctagctcaggtaagaacttaattactttcaaaatatacaagggatatgggaggagacagcatggatacagtggagcagtagtcagtagtcagagcctaaattctattttcatttctgccgcttgaagctttatggccttaggcaaatcatctcacctttctgggtttcacttttctcatctgaaattgaactcaagagtcttctagttctaacacaggatttcttcttgtgaatgagaatataagatatggaaatatttgaagccattagattgtttacagtgctgagatttgagagcccctagcattggttctgataaggaatcgaaataaatcctgccattattatgggggccagtattgagattttagtggaggcagaagaagaccttgcacatctttagtgagccttcaagttgtgaagaaacatcctgctaaggtatagatcaaacccagtgaaatgaaactataggaatgaaactacatcatcaaggtttctggacccacttatttcaacttgtgttcaatgtaataaaattccgctaccaataaaattattaatgttttaagaccctttaaacctattgtggctacagtgtgctgacttgcccttttataggccagtctgcttccttcagtccctgctctcaaaggggaaatcccatcacctcagctaaccagaccgaagaagagaattggacggccgatggtggcctctcctaaccagaggcaccaggatcatctacgaccgaaagttcctgctggagtgcaagaactcacccattgcccggacacccccctgctgcctccctcagattcccggggtcacaactcctccaacagcccctctctccaagctggaggagctgaaggagcaggagacagaggaagagatacccgatgacgcacaatttgaaatggacatctaatccagtgcagatgacctggcatgtggagttacagagggatccctcatgccactgctgccaccacctcttcctggggcatccaaaggccagctggcctcatctaatctggaagggagtgacttgttagttccaggcctcctttagttctgaggcagctagaccagggataggagtgggcaacttgccaagcccttaactctacttcctcttcagtctgtggtactcctcctaaccctaaaccctctatgctcaggggctggaactggggaatggagtaagtcaccttctgactgcttagtaaacattcaaagaaaaaa

SEQ ID NO: 375976 - DNA, 9310 bp, Homo sapiens
  misc_feature (7167)..(7167): n is a, c, g, or t
  misc_feature (7238)..(7238): n is a, c, g, or t
ttaaggcaggggctgatatagaacttggctgctccacacctctgatggaggcatctcaggagggacacctggaattggttaaatatttgctggcttctggcgctaatgtgcatgctacaacagcaacaggagacacagccttaacctatgcttgtgaaaatggacatacggatgttgcagatgttttacttcaagcaggggctgatttagaacatgaatctgaaggtggaagaacacctttgatgaaagctgcaagagctggtcatttgtgcactgtgcagtttcttattagcaaaggtgccaatgttaacagggctacagccaataatgatcatacagtagtgtcgctggcatgtgcaggaggccacctggcagttgttgagcttctcttggctcatggggctgaccctactcatcgactcaaggatggttcaacaatgctcattgaagctgcaaagggtggccatactaatgtagtttcttatctgttggattatccaaataatgttctgtcagttcccaccacagatgtgtctcagctccctccaccttctcaagatcagtctcaggtgccacgtgtgccaacgcatacacttgccatggttgtacctccccaggaacctgacagaacttcacaggagaactctcctgcccttttaggagtgcaaaaaggtacatccaagcagaagtccagttccctccaggtagcagatcaggacctactgccatcttttcacccataccagcctttggagtgcatagtagaggagactgaaggcaagctgaatgaactgggacaaagaattagtgctattgaaaaagcacagcttaagtcactggagttaattcaaggtgaacctctgaacaaagataagatagaagaacttaaaaagaacagagaagagcaagtccagaagaagaagaaaatattgaaagaactgcagaaagtggaaaggcagttgcagatgaaaacacagcagcaatttaccaaagaatacttggaaaccaaaggtcagaaagacacagtgtctctacaccaacagtgctctcatagaggagtcttcccagaaggggaaggagatggtagtctcccagaggatcacttttcagagttacctcaggttgacacaatcttatttaaagataatgatgttgatgatgagcaacagtctccaccatcggcagaacagattgattttgtcccagtccagcctttatcatctccacagtgtaacttttccagtgacttaggttctaatgggacaaattctcttgaacttcagaaagtatcaggtaatcagcagattgtaggacagcctcagattgctattactggacatgatcaggggctgttagttcaagaaccagatggactaatggttgcaactccagctcagacgcttaccgacactcttgatgacctgatagcagctgtgagtaccagagtgcccactggttccaacagttcttctcagaccacagagtgtcttacacctgaatcctgttcgcagactacaagcaatgtggcttcccaatcgatgcctcctgtgtatccttcagttgacattgatgcacatactgagagcaatcatgacacagcattaacactagcttgtgcaggtggtcatgaagaacttgtatctgtgctcattgcacgggatgccaaaattgaacacagagacaaaaaaggtttcacaccactaatcctggcagcaacagcagggcatgttggagttgttgaaatccttttggataaaggtggagatatagaagcacagtctgaacgaactaaggatactccgctttcattggcatgttctggtggacgtcaggaggtggtagacttgctgctggctcgaggtgcaaataaagaacataggaacgtatctgattatacaccactgagtctagctgcgtctggaggatatgttaatatcattaagattctgcttaatgctggggcagaaattaattcaaggactgggagtaaactaggtatttctcccctgatgttggctgcaatgaatggacatgttcctgcagtaaaattgctgctcgatatgggttcagacattaatgcccaaatagagaccaatcggaacacggctctcaccctggcctgtttccagggccgagcagaagtagtgagtttgcttctggaccgaaaagccaatgttgaacatagggcaaagacgggtcttacccccttgatggaagcagcttctggagggtatgcagaggttggaagagttcttcttgataaaggagcagatgttaatgctccccctgtgccttcctcaagagatactgctttaacaatagcagcagacaaaggtcactacaaattttgtgaactcctgattcataggggagcccacattgatgttcgtaacaaaaagggaaatacgccactttggctggcatccaatggaggtcattttgatgttgtgcagttgctagtgcaagcaggtgctgatgtggatgcagcagataaccggaaaatcacacctcttatgtcagcatttcgcaagggtcatgtaaaagttgttcaatatttggtaaaggaagtaaatcagttcccttctgatatagaatgcatgagatacatagcaacaattacagataaggaactgttgaaaaaatgtcatcaatgtgtcgaaaccattgtgaaggctaaagaccagcaagctgcagaagcaaataagaatgcgagtattcttttaaaggaacttgatctggaaaagtcaagagaagagagcagaaagcaggctcttgctgctaaaagagaaaaaagaaaagaaaagagaaaaaagaaaaaagaggaacagaaaaggaaacaggaagaagatgaagaaaacaaacctaaggagaattcggaactaccagaggatgaagatgaagaggagaatgatgaagatgtggagcaagaagttcccatagaacctcctagtgcaaccaccaccactacgattggaatctctgcaacatctgcaacattcacaaatgtgtttgggaaaaaaagggccaatgtggtgacaactcccagcaccaatcggaaaaataagaagaacaaaacaaaagaaacccctcctacagcacatttaattttaccagaacaacatatgtctttagcccaacaaaaggcagataaaaataaaataaatggagaacctagaggtggtggtgcaggtgggaatagtgattcagataacttggacagcacagactgcaacagtgagagtagcagtggtggtaaaagccaagagttaaattttgtgatggatgtgaattcctctaaatacccctcactgctccttcattcccaagaagaaaagacaagtactgctacttccaaaactcagacacgacttgaaggtgaagtgactcctaattccttgtcaaccagctacaagacagtgtcattgccattaagctctccaaacataaagctgaatctcactagccctaaaaggggtcagaaaagagaagaagggtggaaagaagttgtacgaaggtcaaagaaattgtctgttccagcctcagtggtgtcgaggataatgggaagaggaggatgcaacatcactgcaatacaggatgttactggtgcccatattgatgtggataaacaaaaagataagaatggcgagagaatgatcacaataaggggtggcacagaatcaacaagatatgcagttcaactaatcaatgcactcattcaagatcctgctaaggaactggaagacttgattcctaaaaatcatatcagaacacctgccagcaccaaatcaattcatgctaacttctcatctggagtaggtaccacagcagcttccagtaaaaatgcatttcctttgggtgctccaactcttgtaacttcacaggcaacaacgttatctacgttccagcccgctaataaacttaataagaatgttccaacaaatgtacgttcttctttcccagtttctctacccttagcttatcctcaccctcattttgccctgctggctgctcaaactatgcaacagattcggcatcctcgcttacccatggcccagtttggaggaaccttctcaccttctcctaacacatggggaccattcccagtgagacctgtgaatcctggcaacacaaatagctctccaaagcataataacacaagccgtctacctaaccagaacgggactgttttaccctcagagtctgctggactagctactgccagttgtcctatcactgtctcttctgtagttgctgccagtcagcaactgtgtgtcactaatacccggactccttcatcagtcagaaagcagttgtttgcctgtgtgcctaagacaagtcctccagcaacagtgatttcttctgtgacaagcacttgtagttccctgccttctgtctcctctgcacctatcactagcgggcaagctcccaccacatttctacctgcaagtacttctcaagcacagctttcttcacaaaagatggagtctttctctgctgtgccacccaccaaagagaaagtgtccacacaggaccagcccatggcaaacctatgtaccccatcttcaactgcaaacagttgcagtagctctgccagcaacaccccgggagctccagaaactcacccatccagtagtcccactcctacttccagtaacacacaagaggaggcacagccatccagtgtgtctgatttaagtcctatgtcaatgccttttgcatctaactcagaacctgctccattgactttgacatcacccagaatggttgctgctgataatcaggacaccagtaatttacctcagttagctgtaccagcacctcgagtttctcatcgaatgcagcccagaggttctttttactccatggtaccaaatgcaactattcaccaggatccccagtctatttttgttacgaatccagttactttaacaccacctcaaggcccaccagctgcagtgcagctttcttcagctgtgaacattatgaatggttctcagatgcacataaacccagcaaataagtctttgccacctacatttggcccagccacacttttcaatcacttcagcagtctttttgatagtagtcaggtgccagctaaccagggctggggagatggtccactgtcctcacgagttgctacagatgcctctttcactgttcagtcagcgttcctgggtaactcagtgcttggacacttggaaaacatgcaccctgataactcaaaggcacctggcttcagaccaccttcccagcgagtttctactagtccagttggtgactctcctattccatctgtttcttcgggatcatcttcacctctttcagccacttctgccccaccaacgttgggccaaccaaaaggagtcagtgccagtcaagatcgaaagatacctcccccaattggaacagagagactggcccgaattcggcaaggagggtctgttgcacaagccccggcggggaccagttttgtcgctcccgttggacacagtggaatctggtcatttggtgtcaatgctgtgtcagaaggcttatcaggttggtcgcaatctgtgatggggaaccatccaatgcatcaacaattatcagacccaagcacattctcccaacatcagccaatggagagagatgattctggaatggtagccccctctaacatttttcatcagcctatggcaagtggttttgtggatttttctaaaggtctgccaatttccatgtatggaggcaccataataccctctcatcctcagcttgctgatgttccaggaggccctctgtttaatggacttcacaatccagatcctgcttggaaccctatgataaaagttatccaaaattcaactgaatgcactgatgcccagcagatttggcctggcacgtgggcacctcatattggaaacatgcatctcaaatatgtcaactaagttagaaggtctttactctttagccttgtttaagaaacctatgaccttggaagaaccatggggatttttttttaatgtgcctaagaaattttctctgaggctttagcaatggaaatttgattgcccattgtataagaacaaattgatttcctatccacctgattatgttctctggttagtttagccattttgaacttaagatcatatgaccttagtgcttttggctaaacatacagaatactacttgtatgcagaagagaattagttgattacatgtttcaaccttttagggtgataaatacatgtataattgtttacatacttaaaaggaaaaagttgagtaaatttcttgtcatatagtggctctacgtaatgtagcctgtattaatgtgaaatatttaccagaatattcaataaaaagatgaacagtctttagaagtggggtgtgatcctttcagtggtcatgcaggtaccactcaatccacattatattgaaccagatggttaatactatatttgtaacaggcttctcacatttaacacttgagtcccttcttagactgccttaaaaaagcacttttaagactatttacctatttattctgtgttaaacattccttgttcccttgttgtcttccataatcctttaacatatgagaaagtttcaagctctggcaatgtgtcttatctgactttagctagcagataggccactgataggttttttctctatggatcatgagaatgtcaataagaacaattggatttaaatcagatgacactaaacaaatgtagggacacccaaattatcaacttcaggttccttctgtgcttcctgaccttttttatctgaaagatttgtctggttatagatattttaagctttatatgagttgggacataaggaggtgactcctgtcattctgttgtattattgaatcagctgagtaatatttataaatatgtgagtaattccaggcttagttccatggccctaagcatggagagtcaatatgtttaacaagctaaacagaggaaccctggaatgggctgctttggccaaaccataggctatgccgagaatcagcatagagaaggaaaagttatcccactgaaaagtatagtcatcaacttatttgtgttttaatatagctgaatttttcctggtcagtataggcaatacagaaaagaaaacaagaaaatgtttggagctgatggagaagccaaaactcatatnaaggcaaagaaggatgcacagagaaagagtagtaactagggacagaactatattagcagcacctttctacncttatgccaacaggaattcttaattttctctgcccaggtcctaaagccaggaccacatcagacacaccatgtttgttctgtgtcagatatacctgcttctttaatcttctatatcatcttacatatgagaaagcttccttaattaagcttatgtcttatgttttgttttgaatggattttgaaagtgttgtttattgaagctactactttgtagtgattgataaccacatcaagtatcattaaggggccccttgacctttgtgggggcagttgggtggggcacaaaagactccttggatcacctgtgtatcttgctgtttccacttaccattaacagcaacaagaaaaatcacctaaaattggtgaaatgaatgaaactactcttgatgaaatatatactagtgagaaataatattaaataaattattcagtgggacaaaaaggtgagttttattctatcttaactgtctacaatacatttgaattgtctggaggagccttaagtccatattctgcaccttgaggacaaccaaatgagaaattttatttcaggtcagtaagtagaatttatgaagagaaaggagataattatgaggaatccctaggaaaattgggaggaaaacaacagttgtatagttgggagtagttctttaggatacgctcctcccttccttcttaccagcacttccttcctttctttctgactatttggatcccagtagcctgctcccaacctcatttcacctgctaaatctcttcttcctctgcctgcctcttcctggcactactttactgctattttaccaacctgaacatttggataaaacctagctcaggtaagaacttaattactttcaaaatatacaagggatatgggaggagacagcatggatacagtggagcagtagtcagtagtcagagcctaaattctattttcatttctgccgcttgaagctttatggccttaggcaaatcatctcacctttctgggtttcacttttctcatctgaaattgaactcaagagtcttctagttctaacacaggatttcttcttgtgaatgagaatataagatatggaaatatttgaagccattagattgtttacagtgctgagatttgagagcccctagcattggttctgataaggaatcgaaataaatcctgccattattatgggggccagtattgagattttagtggaggcagaagaagaccttgcacatctttagtgagccttcaagttgtgaagaaacatcctgctaaggtatagatcaaacccagtgaaatgaaactataggaatgaaactacatcatcaaggtttctggacccacttatttcaacttgtgttcaatgtaataaaattccgctaccaataaaattattaatgttttaagaccctttaaacctattgtggctacagtgtgctgacttgcccttttataggccagtctgcttccttcagtccctgctctcaaaggggaaatcccatcacctcagctaaccagaccgaagaagagaattggacggccgatggtggcctctcctaaccagaggcaccaggatcatctacgaccgaaagttcctgctggagtgcaagaactcacccattgcccggacacccccctgctgcctccctcagattcccggggtcacaactcctccaacagcccctctctccaagctggaggagctgaaggagcaggagacagaggaagagatacccgatgacgcacaatttgaaatggacatctaatccagtgcagatgacctggcatgtggagttacagagggatccctcatgccactgctgccaccacctcttcctggggcatccaaaggccagctggcctcatctaatctggaagggagtgacttgttagttccaggcctcctttagttctgaggcagctagaccagggataggagtgggcaacttgccaagcccttaactctacttcctcttcagtctgtggtactcctcctaaccctaaaccctctatgctcaggggctggaactggggaatggagtaagtcaccttctgactgcttagtaaacattcaaagaaaaaa

SEQ ID NO: 375977 - DNA, 6674 bp, Homo sapiens
ttaaggcaggggctgatatagaacttggctgctccacacctctgatggaggcatctcaggagggacacctggaattggttaaatatttgctggcttctggcgctaatgtgcatgctacaacagcaacaggagacacagccttaacctatgcttgtgaaaatggacatacggatgttgcagatgttttacttcaagcaggggctgatttagaacatgaatctgaaggtggaagaacacctttgatgaaagctgcaagagctggtcatttgtgcactgtgcagtttcttattagcaaaggtgccaatgttaacagggctacagccaataatgatcatacagtagtgtcgctggcatgtgcaggaggccacctggcagttgttgagcttctcttggctcatggggctgaccctactcatcgactcaaggatggttcaacaatgctcattgaagctgcaaagggtggccatactaatgtagtttcttatctgttggattatccaaataatgttctgtcagttcccaccacagatgtgtctcagctccctccaccttctcaagatcagtctcaggtgccacgtgtgccaacgcatacacttgccatggttgtacctccccaggaacctgacagaacttcacaggagaactctcctgcccttttaggagtgcaaaaaggtacatccaagcagaagtccagttccctccaggtagcagatcaggacctactgccatcttttcacccataccagcctttggagtgcatagtagaggagactgaaggcaagctgaatgaactgggacaaagaattagtgctattgaaaaagcacagcttaagtcactggagttaattcaaggtgaacctctgaacaaagataagatagaagaacttaaaaagaacagagaagagcaagtccagaagaagaagaaaatattgaaagaactgcagaaagtggaaaggcagttgcagatgaaaacacagcagcaatttaccaaagaatacttggaaaccaaaggtcagaaagacacagtgtctctacaccaacagtgctctcatagaggagtcttcccagaaggggaaggagatggtagtctcccagaggatcacttttcagagttacctcaggttgacacaatcttatttaaagataatgatgttgatgatgagcaacagtctccaccatcggcagaacagattgattttgtcccagtccagcctttatcatctccacagtgtaacttttccagtgacttaggttctaatgggacaaattctcttgaacttcagaaagtatcaggtaatcagcagattgtaggacagcctcagattgctattactggacatgatcaggggctgttagttcaagaaccagatggactaatggttgcaactccagctcagacgcttaccgacactcttgatgacctgatagcagctgtgagtaccagagtgcccactggttccaacagttcttctcagaccacagagtgtcttacacctgaatcctgttcgcagactacaagcaatgtggcttcccaatcgatgcctcctgtgtatccttcagttgacattgatgcacatactgagagcaatcatgacacagcattaacactagcttgtgcaggtggtcatgaagaacttgtatctgtgctcattgcacgggatgccaaaattgaacacagagacaaaaaaggtttcacaccactaatcctggcagcaacagcagggcatgttggagttgttgaaatccttttggataaaggtggagatatagaagcacagtctgaacgaactaaggatactccgctttcattggcatgttctggtggacgtcaggaggtggtagacttgctgctggctcgaggtgcaaataaagaacataggaacgtatctgattatacaccactgagtctagctgcgtctggaggatatgttaatatcattaagattctgcttaatgctggggcagaaattaattcaaggactgggagtaaactaggtatttctcccctgatgttggctgcaatgaatggacatgttcctgcagtaaaattgctgctcgatatgggttcagacattaatgcccaaatagagaccaatcggaacacggctctcaccctggcctgtttccagggccgagcagaagtagtgagtttgcttctggaccgaaaagccaatgttgaacatagggcaaagacgggtcttacccccttgatggaagcagcttctggagggtatgcagaggttggaagagttcttcttgataaaggagcagatgttaatgctccccctgtgccttcctcaagagatactgctttaacaatagcagcagacaaaggtcactacaaattttgtgaactcctgattcataggggagcccacattgatgttcgtaacaaaaagggaaatacgccactttggctggcatccaatggaggtcattttgatgttgtgcagttgctagtgcaagcaggtgctgatgtggatgcagcagataaccggaaaatcacacctcttatgtcagcatttcgcaagggtcatgtaaaagttgttcaatatttggtaaaggaagtaaatcagttcccttctgatatagaatgcatgagatacatagcaacaattacagataaggaactgttgaaaaaatgtcatcaatgtgtcgaaaccattgtgaaggctaaagaccagcaagctgcagaagcaaataagaatgcgagtattcttttaaaggaacttgatctggaaaagtcaagagaagagagcagaaagcaggctcttgctgctaaaagagaaaaaagaaaagaaaagagaaaaaagaaaaaagaggaacagaaaaggaaacaggaagaagatgaagaaaacaaacctaaggagaattcggaactaccagaggatgaagatgaagaggagaatgatgaagatgtggagcaagaagttcccatagaacctcctagtgcaaccaccaccactacgattggaatctctgcaacatctgcaacattcacaaatgtgtttgggaaaaaaagggccaatgtggtgacaactcccagcaccaatcggaaaaataagaagaacaaaacaaaagaaacccctcctacagcacatttaattttaccagaacaacatatgtctttagcccaacaaaaggcagataaaaataaaataaatggagaacctagaggtggtggtgcaggtgggaatagtgattcagataacttggacagcacagactgcaacagtgagagtagcagtggtggtaaaagccaagagttaaattttgtgatggatgtgaattcctctaaatacccctcactgctccttcattcccaagaagaaaagacaagtactgctacttccaaaactcagacacgacttgaaggtgaagtgactcctaattccttgtcaaccagctacaagacagtgtcattgccattaagctctccaaacataaagctgaatctcactagccctaaaaggggtcagaaaagagaagaagggtggaaagaagttgtacgaaggtcaaagaaattgtctgttccagcctcagtggtgtcgaggataatgggaagaggaggatgcaacatcactgcaatacaggatgttactggtgcccatattgatgtggataaacaaaaagataagaatggcgagagaatgatcacaataaggggtggcacagaatcaacaagatatgcagttcaactaatcaatgcactcattcaagatcctgctaaggaactggaagacttgattcctaaaaatcatatcagaacacctgccagcaccaaatcaattcatgctaacttctcatctggagtaggtaccacagcagcttccagtaaaaatgcatttcctttgggtgctccaactcttgtaacttcacaggcaacaacgttatctacgttccagcccgctaataaacttaataagaatgttccaacaaatgtacgttcttctttcccagtttctctacccttagcttatcctcaccctcattttgccctgctggctgctcaaactatgcaacagattcggcatcctcgcttacccatggcccagtttggaggaaccttctcaccttctcctaacacatggggaccattcccagtgagacctgtgaatcctggcaacacaaatagctctccaaagcataataacacaagccgtctacctaaccagaacgggactgttttaccctcagagtctgctggactagctactgccagttgtcctatcactgtctcttctgtagttgctgccagtcagcaactgtgtgtcactaatacccggactccttcatcagtcagaaagcagttgtttgcctgtgtgcctaagacaagtcctccagcaacagtgatttcttctgtgacaagcacttgtagttccctgccttctgtctcctctgcacctatcactagcgggcaagctcccaccacatttctacctgcaagtacttctcaagcacagctttcttcacaaaagatggagtctttctctgctgtgccacccaccaaagagaaagtgtccacacaggaccagcccatggcaaacctatgtaccccatcttcaactgcaaacagttgcagtagctctgccagcaacaccccgggagctccagaaactcacccatccagtagtcccactcctacttccagtaacacacaagaggaggcacagccatccagtgtgtctgatttaagtcctatgtcaatgccttttgcatctaactcagaacctgctccattgactttgacatcacccagaatggttgctgctgataatcaggacaccagtaatttacctcagttagctgtaccagcacctcgagtttctcatcgaatgcagcccagaggttctttttactccatggtaccaaatgcaactattcaccaggatccccagtctatttttgttacgaatccagttactttaacaccacctcaaggcccaccagctgcagtgcagctttcttcagctgtgaacattatgaatggttctcagatgcacataaacccagcaaataagtctttgccacctacatttggcccagccacacttttcaatcacttcagcagtctttttgatagtagtcaggtgccagctaaccagggctggggagatggtccactgtcctcacgagttgctacagatgcctctttcactgttcagtcagcgttcctgggtaactcagtgcttggacacttggaaaacatgcaccctgataactcaaaggcacctggcttcagaccaccttcccagcgagtttctactagtccagttgggttaccatccattgacccatcaggcagctccccatcttcctcttctgctcctctggcaagtttttccggcataccaggaacaagggttttcctgcaagggccagctcctgttgggactcctagtttcaacagacaacatttttctccccatccttggacaagcgcctcaaactcatgtgactctcctattccatctgtttcttcgggatcatcttcacctctttcagccacttctgccccaccaacgttgggccaaccaaaaggagtcagtgccagtcaagatcgaaagatacctcccccaattggaacagagagactggcccgaattcggcaaggagggtctgttgcacaagccccggcggggaccagttttgtcgctcccgttggacacagtggaatctggtcatttggtgtcaatgctgtgtcagaaggcttatcaggttggtcgcaatctgtgatggggaaccatccaatgcatcaacaattatcagacccaagcacattctcccaacatcagccaatggagagagatgattctggaatggtagccccctctaacatttttcatcagcctatggcaagtggttttgtggatttttctaaaggtctgccaatttccatgtatggaggcaccataataccctctcatcctcagcttgctgatgttccaggaggccctctgtttaatggacttcacaatccagatcctgcttggaaccctatgataaaagttatccaaaattcaactgaatgcactgatgcccagcaggccagtctgcttccttcagtccctgctctcaaaggggaaatcccatcacctcagctaaccagaccgaagaagagaattggacggccgatggtggcctctcctaaccagaggcaccaggatcatctacgaccgaaagttcctgctggagtgcaagaactcacccattgcccggacacccccctgctgcctccctcagattcccggggtcacaactcctccaacagcccctctctccaagctggaggagctgaaggagcaggagacagaggaagagatacccgatgacgcacaatttgaaatggacatctaatccagtgcagatgacctggcatgtggagttacagagggatccctcatgccactgctgccaccacctcttcctggggcatccaaaggccagctggcctcatctaatctggaagggagtgacttgttagttccaggcctcctttagttctgaggcagctagaccagggataggagtgggcaacttgccaagcccttaactctacttcctcttcagtctgtggtactcctcctaaccctaaaccctctatgctcaggggctggaactggggaatggagtaagtcaccttctgactgcttagtaaacattcaaagaaaaaa

SEQ ID NO: 375978 - DNA, 6623 bp, Homo sapiens
ttaaggcaggggctgatatagaacttggctgctccacacctctgatggaggcatctcaggagggacacctggaattggttaaatatttgctggcttctggcgctaatgtgcatgctacaacagcaacaggagacacagccttaacctatgcttgtgaaaatggacatacggatgttgcagatgttttacttcaagcaggggctgatttagaacatgaatctgaaggtggaagaacacctttgatgaaagctgcaagagctggtcatttgtgcactgtgcagtttcttattagcaaaggtgccaatgttaacagggctacagccaataatgatcatacagtagtgtcgctggcatgtgcaggaggccacctggcagttgttgagcttctcttggctcatggggctgaccctactcatcgactcaaggatggttcaacaatgctcattgaagctgcaaagggtggccatactaatgtagtttcttatctgttggattatccaaataatgttctgtcagttcccaccacagatgtgtctcagctccctccaccttctcaagatcagtctcaggtgccacgtgtgccaacgcatacacttgccatggttgtacctccccaggaacctgacagaacttcacaggagaactctcctgcccttttaggagtgcaaaaaggtacatccaagcagaagtccagttccctccaggtagcagatcaggacctactgccatcttttcacccataccagcctttggagtgcatagtagaggagactgaaggcaagctgaatgaactgggacaaagaattagtgctattgaaaaagcacagcttaagtcactggagttaattcaaggtgaacctctgaacaaagataagatagaagaacttaaaaagaacagagaagagcaagtccagaagaagaagaaaatattgaaagaactgcagaaagtggaaaggcagttgcagatgaaaacacagcagcaatttaccaaagaatacttggaaaccaaaggtcagaaagacacagtgtctctacaccaacagtgctctcatagaggagtcttcccagaaggggaaggagatggtagtctcccagaggatcacttttcagagttacctcaggttgacacaatcttatttaaagataatgatgttgatgatgagcaacagtctccaccatcggcagaacagattgattttgtcccagtccagcctttatcatctccacagtgtaacttttccagtgacttaggttctaatgggacaaattctcttgaacttcagaaagtatcaggtaatcagcagattgtaggacagcctcagattgctattactggacatgatcaggggctgttagttcaagaaccagatggactaatggttgcaactccagctcagacgcttaccgacactcttgatgacctgatagcagctgtgagtaccagagtgcccactggttccaacagttcttctcagaccacagagtgtcttacacctgaatcctgttcgcagactacaagcaatgtggcttcccaatcgatgcctcctgtgtatccttcagttgacattgatgcacatactgagagcaatcatgacacagcattaacactagcttgtgcaggtggtcatgaagaacttgtatctgtgctcattgcacgggatgccaaaattgaacacagagacaaaaaaggtttcacaccactaatcctggcagcaacagcagggcatgttggagttgttgaaatccttttggataaaggtggagatatagaagcacagtctgaacgaactaaggatactccgctttcattggcatgttctggtggacgtcaggaggtggtagacttgctgctggctcgaggtgcaaataaagaacataggaacgtatctgattatacaccactgagtctagctgcgtctggaggatatgttaatatcattaagattctgcttaatgctggggcagaaattaattcaaggactgggagtaaactaggtatttctcccctgatgttggctgcaatgaatggacatgttcctgcagtaaaattgctgctcgatatgggttcagacattaatgcccaaatagagaccaatcggaacacggctctcaccctggcctgtttccagggccgagcagaagtagtgagtttgcttctggaccgaaaagccaatgttgaacatagggcaaagacgggtcttacccccttgatggaagcagcttctggagggtatgcagaggttggaagagttcttcttgataaaggagcagatgttaatgctccccctgtgccttcctcaagagatactgctttaacaatagcagcagacaaaggtcactacaaattttgtgaactcctgattcataggggagcccacattgatgttcgtaacaaaaagggaaatacgccactttggctggcatccaatggaggtcattttgatgttgtgcagttgctagtgcaagcaggtgctgatgtggatgcagcagataaccggaaaatcacacctcttatgtcagcatttcgcaagggtcatgtaaaagttgttcaatatttggtaaaggaagtaaatcagttcccttctgatatagaatgcatgagatacatagcaacaattacagataaggaactgttgaaaaaatgtcatcaatgtgtcgaaaccattgtgaaggctaaagaccagcaagctgcagaagcaaataagaatgcgagtattcttttaaaggaacttgatctggaaaagtcaagagaagagagcagaaagcaggctcttgctgctaaaagagaaaaaagaaaagaaaagagaaaaaagaaaaaagaggaacagaaaaggaaacaggaagaagatgaagaaaacaaacctaaggagaattcggaactaccagaggatgaagatgaagaggagaatgatgaagatgtggagcaagaagttcccatagaacctcctagtgcaaccaccaccactacgattggaatctctgcaacatctgcaacattcacaaatgtgtttgggaaaaaaagggccaatgtggtgacaactcccagcaccaatcggaaaaataagaagaacaaaacaaaagaaacccctcctacagcacatttaattttaccagaacaacatatgtctttagcccaacaaaaggcagataaaaataaaataaatggagaacctagaggtggtggtgcaggtgggaatagtgattcagataacttggacagcacagactgcaacagtgagagtagcagtggtggtaaaagccaagagttaaattttgtgatggatgtgaattcctctaaatacccctcactgctccttcattcccaagaagaaaagacaagtactgctacttccaaaactcagacacgacttgaaggtgaagtgactcctaattccttgtcaaccagctacaagacagtgtcattgccattaagctctccaaacataaagctgaatctcactagccctaaaaggggtcagaaaagagaagaagggtggaaagaagttgtacgaaggtcaaagaaattgtctgttccagcctcagtggtgtcgaggataatgggaagaggaggatgcaacatcactgcaatacaggatgttactggtgcccatattgatgtggataaacaaaaagataagaatggcgagagaatgatcacaataaggggtggcacagaatcaacaagatatgcagttcaactaatcaatgcactcattcaagatcctgctaaggaactggaagacttgattcctaaaaatcatatcagaacacctgccagcaccaaatcaattcatgctaacttctcatctggagtaggtaccacagcagcttccagtaaaaatgcatttcctttgggtgctccaactcttgtaacttcacaggcaacaacgttatctacgttccagcccgctaataaacttaataagaatgttccaacaaatgtacgttcttctttcccagtttctctacccttagcttatcctcaccctcattttgccctgctggctgctcaaactatgcaacagattcggcatcctcgcttacccatggcccagtttggaggaaccttctcaccttctcctaacacatggggaccattcccagtgagacctgtgaatcctggcaacacaaatagctctccaaagcataataacacaagccgtctacctaaccagaacgggactgttttaccctcagagtctgctggactagctactgccagttgtcctatcactgtctcttctgtagttgctgccagtcagcaactgtgtgtcactaatacccggactccttcatcagtcagaaagcagttgtttgcctgtgtgcctaagacaagtcctccagcaacagtgatttcttctgtgacaagcacttgtagttccctgccttctgtctcctctgcacctatcactagcgggcaagctcccaccacatttctacctgcaagtacttctcaagcacagctttcttcacaaaagatggagtctttctctgctgtgccacccaccaaagagaaagtgtccacacaggaccagcccatggcaaacctatgtaccccatcttcaactgcaaacagttgcagtagctctgccagcaacaccccgggagctccagaaactcacccatccagtagtcccactcctacttccagtaacacacaagaggaggcacagccatccagtgtgtctgatttaagtcctatgtcaatgccttttgcatctaactcagaacctgctccattgactttgacatcacccagaatggttgctgctgataatcaggacaccagtaatttacctcagttagctgtaccagcacctcgagtttctcatcgaatgcagcccagaggttctttttactccatggtaccaaatgcaactattcaccaggatccccagtctatttttgttacgaatccagttactttaacaccacctcaaggcccaccagctgcagtgcagctttcttcagctgtgaacattatgaatggttctcagatgcacataaacccagcaaataagtctttgccacctacatttggcccagccacacttttcaatcacttcagcagtctttttgatagtagtcaggtgccagctaaccagggctggggagatggtccactgtcctcacgagttgctacagatgcctctttcactgttcagtcagcgttcctgggtaactcagtgcttggacacttggaaaacatgcaccctgataactcaaaggcacctggcttcagaccaccttcccagcgagtttctactagtccagttgggttaccatccattgacccatcaggcagctccccatcttcctcttctgctcctctggcaagtttttccggcataccaggaacaagggttttcctgcaagggccagctcctgttgggactcctagtttcaacagacaacatttttctccccatccttggacaagcgcctcaaactcatccacttctgccccaccaacgttgggccaaccaaaaggagtcagtgccagtcaagatcgaaagatacctcccccaattggaacagagagactggcccgaattcggcaaggagggtctgttgcacaagccccggcggggaccagttttgtcgctcccgttggacacagtggaatctggtcatttggtgtcaatgctgtgtcagaaggcttatcaggttggtcgcaatctgtgatggggaaccatccaatgcatcaacaattatcagacccaagcacattctcccaacatcagccaatggagagagatgattctggaatggtagccccctctaacatttttcatcagcctatggcaagtggttttgtggatttttctaaaggtctgccaatttccatgtatggaggcaccataataccctctcatcctcagcttgctgatgttccaggaggccctctgtttaatggacttcacaatccagatcctgcttggaaccctatgataaaagttatccaaaattcaactgaatgcactgatgcccagcaggccagtctgcttccttcagtccctgctctcaaaggggaaatcccatcacctcagctaaccagaccgaagaagagaattggacggccgatggtggcctctcctaaccagaggcaccaggatcatctacgaccgaaagttcctgctggagtgcaagaactcacccattgcccggacacccccctgctgcctccctcagattcccggggtcacaactcctccaacagcccctctctccaagctggaggagctgaaggagcaggagacagaggaagagatacccgatgacgcacaatttgaaatggacatctaatccagtgcagatgacctggcatgtggagttacagagggatccctcatgccactgctgccaccacctcttcctggggcatccaaaggccagctggcctcatctaatctggaagggagtgacttgttagttccaggcctcctttagttctgaggcagctagaccagggataggagtgggcaacttgccaagcccttaactctacttcctcttcagtctgtggtactcctcctaaccctaaaccctctatgctcaggggctggaactggggaatggagtaagtcaccttctgactgcttagtaaacattcaaagaaaaaa

SEQ ID NO: 375979 - DNA, 10201 bp, Homo sapiens
  misc_feature (8058)..(8058): n is a, c, g, or t
  misc_feature (8129)..(8129): n is a, c, g, or t
ttaaggcaggggctgatatagaacttggctgctccacacctctgatggaggcatctcaggagggacacctggaattggttaaatatttgctggcttctggcgctaatgtgcatgctacaacagcaacaggagacacagccttaacctatgcttgtgaaaatggacatacggatgttgcagatgttttacttcaagcaggggctgatttagaacatgaatctgaaggtggaagaacacctttgatgaaagctgcaagagctggtcatttgtgcactgtgcagtttcttattagcaaaggtgccaatgttaacagggctacagccaataatgatcatacagtagtgtcgctggcatgtgcaggaggccacctggcagttgttgagcttctcttggctcatggggctgaccctactcatcgactcaaggatggttcaacaatgctcattgaagctgcaaagggtggccatactaatgtagtttcttatctgttggattatccaaataatgttctgtcagttcccaccacagatgtgtctcagctccctccaccttctcaagatcagtctcaggtgccacgtgtgccaacgcatacacttgccatggttgtacctccccaggaacctgacagaacttcacaggagaactctcctgcccttttaggagtgcaaaaaggtacatccaagcagaagtccagttccctccaggtagcagatcaggacctactgccatcttttcacccataccagcctttggagtgcatagtagaggagactgaaggcaagctgaatgaactgggacaaagaattagtgctattgaaaaagcacagcttaagtcactggagttaattcaaggtgaacctctgaacaaagataagatagaagaacttaaaaagaacagagaagagcaagtccagaagaagaagaaaatattgaaagaactgcagaaagtggaaaggcagttgcagatgaaaacacagcagcaatttaccaaagaatacttggaaaccaaaggtcagaaagacacagtgtctctacaccaacagtgctctcatagaggagtcttcccagaaggggaaggagatggtagtctcccagaggatcacttttcagagttacctcaggttgacacaatcttatttaaagataatgatgttgatgatgagcaacagtctccaccatcggcagaacagattgattttgtcccagtccagcctttatcatctccacagtgtaacttttccagtgacttaggttctaatgggacaaattctcttgaacttcagaaagtatcaggtaatcagcagattgtaggacagcctcagattgctattactggacatgatcaggggctgttagttcaagaaccagatggactaatggttgcaactccagctcagacgcttaccgacactcttgatgacctgatagcagctgtgagtaccagagtgcccactggttccaacagttcttctcagaccacagagtgtcttacacctgaatcctgttcgcagactacaagcaatgtggcttcccaatcgatgcctcctgtgtatccttcagttgacattgatgcacatactgagagcaatcatgacacagcattaacactagcttgtgcaggtggtcatgaagaacttgtatctgtgctcattgcacgggatgccaaaattgaacacagagacaaaaaaggtttcacaccactaatcctggcagcaacagcagggcatgttggagttgttgaaatccttttggataaaggtggagatatagaagcacagtctgaacgaactaaggatactccgctttcattggcatgttctggtggacgtcaggaggtggtagacttgctgctggctcgaggtgcaaataaagaacataggaacgtatctgattatacaccactgagtctagctgcgtctggaggatatgttaatatcattaagattctgcttaatgctggggcagaaattaattcaaggactgggagtaaactaggtatttctcccctgatgttggctgcaatgaatggacatgttcctgcagtaaaattgctgctcgatatgggttcagacattaatgcccaaatagagaccaatcggaacacggctctcaccctggcctgtttccagggccgagcagaagtagtgagtttgcttctggaccgaaaagccaatgttgaacatagggcaaagacgggtcttacccccttgatggaagcagcttctggagggtatgcagaggttggaagagttcttcttgataaaggagcagatgttaatgctccccctgtgccttcctcaagagatactgctttaacaatagcagcagacaaaggtcactacaaattttgtgaactcctgattcataggggagcccacattgatgttcgtaacaaaaagggaaatacgccactttggctggcatccaatggaggtcattttgatgttgtgcagttgctagtgcaagcaggtgctgatgtggatgcagcagataaccggaaaatcacacctcttatgtcagcatttcgcaagggtcatgtaaaagttgttcaatatttggtaaaggaagtaaatcagttcccttctgatatagaatgcatgagatacatagcaacaattacagataaggtaagtttaatatgctactgaagcacatttttgttctttgtggaatgatatgccaaagtgtgcagttaggaacttgttctttttatattctgaaaggttggtcacctgatctctttatgcgtttgtttctccatttgcaaaatagaggggtataatacttttgataaactattttgagatttctactgtggaccatagtcacagtgactacactaaggtactaaaccattagcctaatgagaaggcttcctaaggacatgcaggtttttagggaaatggtgtcttatttttgtgaaagattggactcaaaggataacttaatttggtttagtgacttttcagtttgaactttaacctctggactttaatgtgctcatcagcttaagttttatttggcctctttcattatatatttacataattctatttcctgctgtaggaactgttgaaaaaatgtcatcaatgtgtcgaaaccattgtgaaggctaaagaccagcaagctgcagaagcaaataagaatgcgagtattcttttaaaggaacttgatctggaaaagtcaagagaagagagcagaaagcaggctcttgctgctaaaagagaaaaaagaaaagaaaagagaaaaaagaaaaaagaggaacagaaaaggaaacaggaagaagatgaagaaaacaaacctaaggagaattcggaactaccagaggatgaagatgaagaggagaatgatgaagatgtggagcaagaagttcccatagaacctcctagtgcaaccaccaccactacgattggaatctctgcaacatctgcaacattcacaaatgtgtttgggaaaaaaagggccaatgtggtgacaactcccagcaccaatcggaaaaataagaagaacaaaacaaaagaaacccctcctacagcacatttaattttaccagaacaacatatgtctttagcccaacaaaaggcagataaaaataaaataaatggagaacctagaggtggtggtgcaggtgggaatagtgattcagataacttggacagcacagactgcaacagtgagagtagcagtggtggtaaaagccaagagttaaattttgtgatggatgtgaattcctctaaatacccctcactgctccttcattcccaagaagaaaagacaagtactgctacttccaaaactcagacacgacttgaaggtgaagtgactcctaattccttgtcaaccagctacaagacagtgtcattgccattaagctctccaaacataaagctgaatctcactagccctaaaaggggtcagaaaagagaagaagggtggaaagaagttgtacgaaggtcaaagaaattgtctgttccagcctcagtggtgtcgaggataatgggaagaggaggatgcaacatcactgcaatacaggatgttactggtgcccatattgatgtggataaacaaaaagataagaatggcgagagaatgatcacaataaggggtggcacagaatcaacaagatatgcagttcaactaatcaatgcactcattcaagatcctgctaaggaactggaagacttgattcctaaaaatcatatcagaacacctgccagcaccaaatcaattcatgctaacttctcatctggagtaggtaccacagcagcttccagtaaaaatgcatttcctttgggtgctccaactcttgtaacttcacaggcaacaacgttatctacgttccagcccgctaataaacttaataagaatgttccaacaaatgtacgttcttctttcccagtttctctacccttagcttatcctcaccctcattttgccctgctggctgctcaaactatgcaacagattcggcatcctcgcttacccatggcccagtttggaggaaccttctcaccttctcctaacacatggggaccattcccagtgagacctgtgaatcctggcaacacaaatagctctccaaagcataataacacaagccgtctacctaaccagaacgggactgttttaccctcagagtctgctggactagctactgccagttgtcctatcactgtctcttctgtagttgctgccagtcagcaactgtgtgtcactaatacccggactccttcatcagtcagaaagcagttgtttgcctgtgtgcctaagacaagtcctccagcaacagtgatttcttctgtgacaagcacttgtagttccctgccttctgtctcctctgcacctatcactagcgggcaagctcccaccacatttctacctgcaagtacttctcaagcacagctttcttcacaaaagatggagtctttctctgctgtgccacccaccaaagagaaagtgtccacacaggaccagcccatggcaaacctatgtaccccatcttcaactgcaaacagttgcagtagctctgccagcaacaccccgggagctccagaaactcacccatccagtagtcccactcctacttccagtaacacacaagaggaggcacagccatccagtgtgtctgatttaagtcctatgtcaatgccttttgcatctaactcagaacctgctccattgactttgacatcacccagaatggttgctgctgataatcaggacaccagtaatttacctcagttagctgtaccagcacctcgagtttctcatcgaatgcagcccagaggttctttttactccatggtaccaaatgcaactattcaccaggatccccagtctatttttgttacgaatccagttactttaacaccacctcaaggcccaccagctgcagtgcagctttcttcagctgtgaacattatgaatggttctcagatgcacataaacccagcaaataagtctttgccacctacatttggcccagccacacttttcaatcacttcagcagtctttttgatagtagtcaggtgccagctaaccagggctggggagatggtccactgtcctcacgagttgctacagatgcctctttcactgttcagtcagcgttcctgggtaactcagtgcttggacacttggaaaacatgcaccctgataactcaaaggcacctggcttcagaccaccttcccagcgagtttctactagtccagttgggttaccatccattgacccatcaggcagctccccatcttcctcttctgctcctctggcaagtttttccggcataccaggaacaagggttttcctgcaagggccagctcctgttgggactcctagtttcaacagacaacatttttctccccatccttggacaagcgcctcaaactcatgtgactctcctattccatctgtttcttcgggatcatcttcacctctttcagccacttctgccccaccaacgttgggccaaccaaaaggagtcagtgccagtcaagatcgaaagatacctcccccaattggaacagagagactggcccgaattcggcaaggagggtctgttgcacaagccccggcggggaccagttttgtcgctcccgttggacacagtggaatctggtcatttggtgtcaatgctgtgtcagaaggcttatcaggttggtcgcaatctgtgatggggaaccatccaatgcatcaacaattatcagacccaagcacattctcccaacatcagccaatggagagagatgattctggaatggtagccccctctaacatttttcatcagcctatggcaagtggttttgtggatttttctaaaggtctgccaatttccatgtatggaggcaccataataccctctcatcctcagcttgctgatgttccaggaggccctctgtttaatggacttcacaatccagatcctgcttggaaccctatgataaaagttatccaaaattcaactgaatgcactgatgcccagcaggtaaaatgggcttaatgctcttttgttttttagatttgtcacatcattctttttgttttgtgagaagtataagtactgaatatcaaaagtcataattgaccatttcgatctggattgctttttcaatatcaagatgatgctactgaacactttatttaatatatgtgtattcttcctaggcagaaacagtgaattgccattgcatttatatattcattttgtaactgtctaaagattcctaattagaaattccaatttttcctcccccttttcagatttggcctggcacgtgggcacctcatattggaaacatgcatctcaaatatgtcaactaagttagaaggtctttactctttagccttgtttaagaaacctatgaccttggaagaaccatggggatttttttttaatgtgcctaagaaattttctctgaggctttagcaatggaaatttgattgcccattgtataagaacaaattgatttcctatccacctgattatgttctctggttagtttagccattttgaacttaagatcatatgaccttagtgcttttggctaaacatacagaatactacttgtatgcagaagagaattagttgattacatgtttcaaccttttagggtgataaatacatgtataattgtttacatacttaaaaggaaaaagttgagtaaatttcttgtcatatagtggctctacgtaatgtagcctgtattaatgtgaaatatttaccagaatattcaataaaaagatgaacagtctttagaagtggggtgtgatcctttcagtggtcatgcaggtaccactcaatccacattatattgaaccagatggttaatactatatttgtaacaggcttctcacatttaacacttgagtcccttcttagactgccttaaaaaagcacttttaagactatttacctatttattctgtgttaaacattccttgttcccttgttgtcttccataatcctttaacatatgagaaagtttcaagctctggcaatgtgtcttatctgactttagctagcagataggccactgataggttttttctctatggatcatgagaatgtcaataagaacaattggatttaaatcagatgacactaaacaaatgtagggacacccaaattatcaacttcaggttccttctgtgcttcctgaccttttttatctgaaagatttgtctggttatagatattttaagctttatatgagttgggacataaggaggtgactcctgtcattctgttgtattattgaatcagctgagtaatatttataaatatgtgagtaattccaggcttagttccatggccctaagcatggagagtcaatatgtttaacaagctaaacagaggaaccctggaatgggctgctttggccaaaccataggctatgccgagaatcagcatagagaaggaaaagttatcccactgaaaagtatagtcatcaacttatttgtgttttaatatagctgaatttttcctggtcagtataggcaatacagaaaagaaaacaagaaaatgtttggagctgatggagaagccaaaactcatatnaaggcaaagaaggatgcacagagaaagagtagtaactagggacagaactatattagcagcacctttctacncttatgccaacaggaattcttaattttctctgcccaggtcctaaagccaggaccacatcagacacaccatgtttgttctgtgtcagatatacctgcttctttaatcttctatatcatcttacatatgagaaagcttccttaattaagcttatgtcttatgttttgttttgaatggattttgaaagtgttgtttattgaagctactactttgtagtgattgataaccacatcaagtatcattaaggggccccttgacctttgtgggggcagttgggtggggcacaaaagactccttggatcacctgtgtatcttgctgtttccacttaccattaacagcaacaagaaaaatcacctaaaattggtgaaatgaatgaaactactcttgatgaaatatatactagtgagaaataatattaaataaattattcagtgggacaaaaaggtgagttttattctatcttaactgtctacaatacatttgaattgtctggaggagccttaagtccatattctgcaccttgaggacaaccaaatgagaaattttatttcaggtcagtaagtagaatttatgaagagaaaggagataattatgaggaatccctaggaaaattgggaggaaaacaacagttgtatagttgggagtagttctttaggatacgctcctcccttccttcttaccagcacttccttcctttctttctgactatttggatcccagtagcctgctcccaacctcatttcacctgctaaatctcttcttcctctgcctgcctcttcctggcactactttactgctattttaccaacctgaacatttggataaaacctagctcaggtaagaacttaattactttcaaaatatacaagggatatgggaggagacagcatggatacagtggagcagtagtcagtagtcagagcctaaattctattttcatttctgccgcttgaagctttatggccttaggcaaatcatctcacctttctgggtttcacttttctcatctgaaattgaactcaagagtcttctagttctaacacaggatttcttcttgtgaatgagaatataagatatggaaatatttgaagccattagattgtttacagtgctgagatttgagagcccctagcattggttctgataaggaatcgaaataaatcctgccattattatgggggccagtattgagattttagtggaggcagaagaagaccttgcacatctttagtgagccttcaagttgtgaagaaacatcctgctaaggtatagatcaaacccagtgaaatgaaactataggaatgaaactacatcatcaaggtttctggacccacttatttcaacttgtgttcaatgtaataaaattccgctaccaataaaattattaatgttttaagaccctttaaacctattgtggctacagtgtgctgacttgcccttttataggccagtctgcttccttcagtccctgctctcaaaggggaaatcccatcacctcagctaaccagaccgaagaagagaattggacggccgatggtggcctctcctaaccagaggcaccaggatcatctacgaccgaaagttcctgctggagtgcaagaactcacccattgcccggacacccccctgctgcctccctcagattcccggggtcacaactcctccaacagcccctctctccaagctggaggagctgaaggagcaggagacagaggaagagatacccgatgacgcacaatttgaaatggacatctaatccagtgcagatgacctggcatgtggagttacagagggatccctcatgccactgctgccaccacctcttcctggggcatccaaaggccagctggcctcatctaatctggaagggagtgacttgttagttccaggcctcctttagttctgaggcagctagaccagggataggagtgggcaacttgccaagcccttaactctacttcctcttcagtctgtggtactcctcctaaccctaaaccctctatgctcaggggctggaactggggaatggagtaagtcaccttctgactgcttagtaaacattcaaagaaaaaa

SEQ ID NO: 375980 - DNA, 9666 bp, Homo sapiens
  misc_feature (7523)..(7523): n is a, c, g, or t
  misc_feature (7594)..(7594): n is a, c, g, or t
ttaaggcaggggctgatatagaacttggctgctccacacctctgatggaggcatctcaggagggacacctggaattggttaaatatttgctggcttctggcgctaatgtgcatgctacaacagcaacaggagacacagccttaacctatgcttgtgaaaatggacatacggatgttgcagatgttttacttcaagcaggggctgatttagaacatgaatctgaaggtggaagaacacctttgatgaaagctgcaagagctggtcatttgtgcactgtgcagtttcttattagcaaaggtgccaatgttaacagggctacagccaataatgatcatacagtagtgtcgctggcatgtgcaggaggccacctggcagttgttgagcttctcttggctcatggggctgaccctactcatcgactcaaggatggttcaacaatgctcattgaagctgcaaagggtggccatactaatgtagtttcttatctgttggattatccaaataatgttctgtcagttcccaccacagatgtgtctcagctccctccaccttctcaagatcagtctcaggtgccacgtgtgccaacgcatacacttgccatggttgtacctccccaggaacctgacagaacttcacaggagaactctcctgcccttttaggagtgcaaaaaggtacatccaagcagaagtccagttccctccaggtagcagatcaggacctactgccatcttttcacccataccagcctttggagtgcatagtagaggagactgaaggcaagctgaatgaactgggacaaagaattagtgctattgaaaaagcacagcttaagtcactggagttaattcaaggtgaacctctgaacaaagataagatagaagaacttaaaaagaacagagaagagcaagtccagaagaagaagaaaatattgaaagaactgcagaaagtggaaaggcagttgcagatgaaaacacagcagcaatttaccaaagaatacttggaaaccaaaggtcagaaagacacagtgtctctacaccaacagtgctctcatagaggagtcttcccagaaggggaaggagatggtagtctcccagaggatcacttttcagagttacctcaggttgacacaatcttatttaaagataatgatgttgatgatgagcaacagtctccaccatcggcagaacagattgattttgtcccagtccagcctttatcatctccacagtgtaacttttccagtgacttaggttctaatgggacaaattctcttgaacttcagaaagtatcaggtaatcagcagattgtaggacagcctcagattgctattactggacatgatcaggggctgttagttcaagaaccagatggactaatggttgcaactccagctcagacgcttaccgacactcttgatgacctgatagcagctgtgagtaccagagtgcccactggttccaacagttcttctcagaccacagagtgtcttacacctgaatcctgttcgcagactacaagcaatgtggcttcccaatcgatgcctcctgtgtatccttcagttgacattgatgcacatactgagagcaatcatgacacagcattaacactagcttgtgcaggtggtcatgaagaacttgtatctgtgctcattgcacgggatgccaaaattgaacacagagacaaaaaaggtttcacaccactaatcctggcagcaacagcagggcatgttggagttgttgaaatccttttggataaaggtggagatatagaagcacagtctgaacgaactaaggatactccgctttcattggcatgttctggtggacgtcaggaggtggtagacttgctgctggctcgaggtgcaaataaagaacataggaacgtatctgattatacaccactgagtctagctgcgtctggaggatatgttaatatcattaagattctgcttaatgctggggcagaaattaattcaaggactgggagtaaactaggtatttctcccctgatgttggctgcaatgaatggacatgttcctgcagtaaaattgctgctcgatatgggttcagacattaatgcccaaatagagaccaatcggaacacggctctcaccctggcctgtttccagggccgagcagaagtagtgagtttgcttctggaccgaaaagccaatgttgaacatagggcaaagacgggtcttacccccttgatggaagcagcttctggagggtatgcagaggttggaagagttcttcttgataaaggagcagatgttaatgctccccctgtgccttcctcaagagatactgctttaacaatagcagcagacaaaggtcactacaaattttgtgaactcctgattcataggggagcccacattgatgttcgtaacaaaaagggaaatacgccactttggctggcatccaatggaggtcattttgatgttgtgcagttgctagtgcaagcaggtgctgatgtggatgcagcagataaccggaaaatcacacctcttatgtcagcatttcgcaaggaactgttgaaaaaatgtcatcaatgtgtcgaaaccattgtgaaggctaaagaccagcaagctgcagaagcaaataagaatgcgagtattcttttaaaggaacttgatctggaaaagtcaagagaagagagcagaaagcaggctcttgctgctaaaagagaaaaaagaaaagaaaagagaaaaaagaaaaaagaggaacagaaaaggaaacaggaagaagatgaagaaaacaaacctaaggagaattcggaactaccagaggatgaagatgaagaggagaatgatgaagatgtggagcaagaagttcccatagaacctcctagtgcaaccaccaccactacgattggaatctctgcaacatctgcaacattcacaaatgtgtttgggaaaaaaagggccaatgtggtgacaactcccagcaccaatcggaaaaataagaagaacaaaacaaaagaaacccctcctacagcacatttaattttaccagaacaacatatgtctttagcccaacaaaaggcagataaaaataaaataaatggagaacctagaggtggtggtgcaggtgggaatagtgattcagataacttggacagcacagactgcaacagtgagagtagcagtggtggtaaaagccaagagttaaattttgtgatggatgtgaattcctctaaatacccctcactgctccttcattcccaagaagaaaagacaagtactgctacttccaaaactcagacacgacttgaaggtgaagtgactcctaattccttgtcaaccagctacaagacagtgtcattgccattaagctctccaaacataaagctgaatctcactagccctaaaaggggtcagaaaagagaagaagggtggaaagaagttgtacgaaggtcaaagaaattgtctgttccagcctcagtggtgtcgaggataatgggaagaggaggatgcaacatcactgcaatacaggatgttactggtgcccatattgatgtggataaacaaaaagataagaatggcgagagaatgatcacaataaggggtggcacagaatcaacaagatatgcagttcaactaatcaatgcactcattcaagatcctgctaaggaactggaagacttgattcctaaaaatcatatcagaacacctgccagcaccaaatcaattcatgctaacttctcatctggagtaggtaccacagcagcttccagtaaaaatgcatttcctttgggtgctccaactcttgtaacttcacaggcaacaacgttatctacgttccagcccgctaataaacttaataagaatgttccaacaaatgtacgttcttctttcccagtttctctacccttagcttatcctcaccctcattttgccctgctggctgctcaaactatgcaacagattcggcatcctcgcttacccatggcccagtttggaggaaccttctcaccttctcctaacacatggggaccattcccagtgagacctgtgaatcctggcaacacaaatagctctccaaagcataataacacaagccgtctacctaaccagaacgggactgttttaccctcagagtctgctggactagctactgccagttgtcctatcactgtctcttctgtagttgctgccagtcagcaactgtgtgtcactaatacccggactccttcatcagtcagaaagcagttgtttgcctgtgtgcctaagacaagtcctccagcaacagtgatttcttctgtgacaagcacttgtagttccctgccttctgtctcctctgcacctatcactagcgggcaagctcccaccacatttctacctgcaagtacttctcaagcacagctttcttcacaaaagatggagtctttctctgctgtgccacccaccaaagagaaagtgtccacacaggaccagcccatggcaaacctatgtaccccatcttcaactgcaaacagttgcagtagctctgccagcaacaccccgggagctccagaaactcacccatccagtagtcccactcctacttccagtaacacacaagaggaggcacagccatccagtgtgtctgatttaagtcctatgtcaatgccttttgcatctaactcagaacctgctccattgactttgacatcacccagaatggttgctgctgataatcaggacaccagtaatttacctcagttagctgtaccagcacctcgagtttctcatcgaatgcagcccagaggttctttttactccatggtaccaaatgcaactattcaccaggatccccagtctatttttgttacgaatccagttactttaacaccacctcaaggcccaccagctgcagtgcagctttcttcagctgtgaacattatgaatggttctcagatgcacataaacccagcaaataagtctttgccacctacatttggcccagccacacttttcaatcacttcagcagtctttttgatagtagtcaggtgccagctaaccagggctggggagatggtccactgtcctcacgagttgctacagatgcctctttcactgttcagtcagcgttcctgggtaactcagtgcttggacacttggaaaacatgcaccctgataactcaaaggcacctggcttcagaccaccttcccagcgagtttctactagtccagttgggttaccatccattgacccatcaggcagctccccatcttcctcttctgctcctctggcaagtttttccggcataccaggaacaagggttttcctgcaagggccagctcctgttgggactcctagtttcaacagacaacatttttctccccatccttggacaagcgcctcaaactcatgtgactctcctattccatctgtttcttcgggatcatcttcacctctttcagccacttctgccccaccaacgttgggccaaccaaaaggagtcagtgccagtcaagatcgaaagatacctcccccaattggaacagagagactggcccgaattcggcaaggagggtctgttgcacaagccccggcggggaccagttttgtcgctcccgttggacacagtggaatctggtcatttggtgtcaatgctgtgtcagaaggcttatcaggttggtcgcaatctgtgatggggaaccatccaatgcatcaacaattatcagacccaagcacattctcccaacatcagccaatggagagagatgattctggaatggtagccccctctaacatttttcatcagcctatggcaagtggttttgtggatttttctaaaggtctgccaatttccatgtatggaggcaccataataccctctcatcctcagcttgctgatgttccaggaggccctctgtttaatggacttcacaatccagatcctgcttggaaccctatgataaaagttatccaaaattcaactgaatgcactgatgcccagcaggtaaaatgggcttaatgctcttttgttttttagatttgtcacatcattctttttgttttgtgagaagtataagtactgaatatcaaaagtcataattgaccatttcgatctggattgctttttcaatatcaagatgatgctactgaacactttatttaatatatgtgtattcttcctaggcagaaacagtgaattgccattgcatttatatattcattttgtaactgtctaaagattcctaattagaaattccaatttttcctcccccttttcagatttggcctggcacgtgggcacctcatattggaaacatgcatctcaaatatgtcaactaagttagaaggtctttactctttagccttgtttaagaaacctatgaccttggaagaaccatggggatttttttttaatgtgcctaagaaattttctctgaggctttagcaatggaaatttgattgcccattgtataagaacaaattgatttcctatccacctgattatgttctctggttagtttagccattttgaacttaagatcatatgaccttagtgcttttggctaaacatacagaatactacttgtatgcagaagagaattagttgattacatgtttcaaccttttagggtgataaatacatgtataattgtttacatacttaaaaggaaaaagttgagtaaatttcttgtcatatagtggctctacgtaatgtagcctgtattaatgtgaaatatttaccagaatattcaataaaaagatgaacagtctttagaagtggggtgtgatcctttcagtggtcatgcaggtaccactcaatccacattatattgaaccagatggttaatactatatttgtaacaggcttctcacatttaacacttgagtcccttcttagactgccttaaaaaagcacttttaagactatttacctatttattctgtgttaaacattccttgttcccttgttgtcttccataatcctttaacatatgagaaagtttcaagctctggcaatgtgtcttatctgactttagctagcagataggccactgataggttttttctctatggatcatgagaatgtcaataagaacaattggatttaaatcagatgacactaaacaaatgtagggacacccaaattatcaacttcaggttccttctgtgcttcctgaccttttttatctgaaagatttgtctggttatagatattttaagctttatatgagttgggacataaggaggtgactcctgtcattctgttgtattattgaatcagctgagtaatatttataaatatgtgagtaattccaggcttagttccatggccctaagcatggagagtcaatatgtttaacaagctaaacagaggaaccctggaatgggctgctttggccaaaccataggctatgccgagaatcagcatagagaaggaaaagttatcccactgaaaagtatagtcatcaacttatttgtgttttaatatagctgaatttttcctggtcagtataggcaatacagaaaagaaaacaagaaaatgtttggagctgatggagaagccaaaactcatatnaaggcaaagaaggatgcacagagaaagagtagtaactagggacagaactatattagcagcacctttctacncttatgccaacaggaattcttaattttctctgcccaggtcctaaagccaggaccacatcagacacaccatgtttgttctgtgtcagatatacctgcttctttaatcttctatatcatcttacatatgagaaagcttccttaattaagcttatgtcttatgttttgttttgaatggattttgaaagtgttgtttattgaagctactactttgtagtgattgataaccacatcaagtatcattaaggggccccttgacctttgtgggggcagttgggtggggcacaaaagactccttggatcacctgtgtatcttgctgtttccacttaccattaacagcaacaagaaaaatcacctaaaattggtgaaatgaatgaaactactcttgatgaaatatatactagtgagaaataatattaaataaattattcagtgggacaaaaaggtgagttttattctatcttaactgtctacaatacatttgaattgtctggaggagccttaagtccatattctgcaccttgaggacaaccaaatgagaaattttatttcaggtcagtaagtagaatttatgaagagaaaggagataattatgaggaatccctaggaaaattgggaggaaaacaacagttgtatagttgggagtagttctttaggatacgctcctcccttccttcttaccagcacttccttcctttctttctgactatttggatcccagtagcctgctcccaacctcatttcacctgctaaatctcttcttcctctgcctgcctcttcctggcactactttactgctattttaccaacctgaacatttggataaaacctagctcaggtaagaacttaattactttcaaaatatacaagggatatgggaggagacagcatggatacagtggagcagtagtcagtagtcagagcctaaattctattttcatttctgccgcttgaagctttatggccttaggcaaatcatctcacctttctgggtttcacttttctcatctgaaattgaactcaagagtcttctagttctaacacaggatttcttcttgtgaatgagaatataagatatggaaatatttgaagccattagattgtttacagtgctgagatttgagagcccctagcattggttctgataaggaatcgaaataaatcctgccattattatgggggccagtattgagattttagtggaggcagaagaagaccttgcacatctttagtgagccttcaagttgtgaagaaacatcctgctaaggtatagatcaaacccagtgaaatgaaactataggaatgaaactacatcatcaaggtttctggacccacttatttcaacttgtgttcaatgtaataaaattccgctaccaataaaattattaatgttttaagaccctttaaacctattgtggctacagtgtgctgacttgcccttttataggccagtctgcttccttcagtccctgctctcaaaggggaaatcccatcacctcagctaaccagaccgaagaagagaattggacggccgatggtggcctctcctaaccagaggcaccaggatcatctacgaccgaaagttcctgctggagtgcaagaactcacccattgcccggacacccccctgctgcctccctcagattcccggggtcacaactcctccaacagcccctctctccaagctggaggagctgaaggagcaggagacagaggaagagatacccgatgacgcacaatttgaaatggacatctaatccagtgcagatgacctggcatgtggagttacagagggatccctcatgccactgctgccaccacctcttcctggggcatccaaaggccagctggcctcatctaatctggaagggagtgacttgttagttccaggcctcctttagttctgaggcagctagaccagggataggagtgggcaacttgccaagcccttaactctacttcctcttcagtctgtggtactcctcctaaccctaaaccctctatgctcaggggctggaactggggaatggagtaagtcaccttctgactgcttagtaaacattcaaagaaaaaa

SEQ ID NO: 375981 - DNA, 7643 bp, Homo sapiens
  misc_feature (5500)..(5500): n is a, c, g, or t
  misc_feature (5571)..(5571): n is a, c, g, or t
atatcgtcgacccacgcgtccgattctcacttatttgtgggatctaaaaatcaaaacaatggaactcctagacacagatagcagaaggattgttaccagaggctgggaagggtatgcagaggttggaagagttcttcttgataaaggagcagatgttaatgctccccctgtgccttcctcaagagatactgctttaacaatagcagcagacaaaggtcactacaaattttgtgaactcctgattcataggggagcccacattgatgttcgtaacaaaaagggaaatacgccactttggctggcatccaatggaggtcattttgatgttgtgcagttgctagtgcaagcaggtgctgatgtggatgcagcagataaccggaaaatcacacctcttatgtcagcatttcgcaagggtcatgtaaaagttgttcaatatttggtaaaggaagtaaatcagttcccttctgatatagaatgcatgagatacatagcaacaattacagataaggaactgttgaaaaaatgtcatcaatgtgtcgaaaccattgtgaaggctaaagaccagcaagctgcagaagcaaataagaatgcgagtattcttttaaaggaacttgatctggaaaagtcaagagaagagagcagaaagcaggctcttgctgctaaaagagaaaaaagaaaagaaaagagaaaaaagaaaaaagaggaacagaaaaggaaacaggaagaagatgaagaaaacaaacctaaggagaattcggaactaccagaggatgaagatgaagaggagaatgatgaagatgtggagcaagaagttcccatagaacctcctagtgcaaccaccaccactacgattggaatctctgcaacatctgcaacattcacaaatgtgtttgggaaaaaaagggccaatgtggtgacaactcccagcaccaatcggaaaaataagaagaacaaaacaaaagaaacccctcctacagcacatttaattttaccagaacaacatatgtctttagcccaacaaaaggcagataaaaataaaataaatggagaacctagaggtggtggtgcaggtgggaatagtgattcagataacttggacagcacagactgcaacagtgagagtagcagtggtggtaaaagccaagagttaaattttgtgatggatgtgaattcctctaaatacccctcactgctccttcattcccaagaagaaaagacaagtactgctacttccaaaactcagacacgacttgaaggtgaagtgactcctaattccttgtcaaccagctacaagacagtgtcattgccattaagctctccaaacataaagctgaatctcactagccctaaaaggggtcagaaaagagaagaagggtggaaagaagttgtacgaaggtcaaagaaattgtctgttccagcctcagtggtgtcgaggataatgggaagaggaggatgcaacatcactgcaatacaggatgttactggtgcccatattgatgtggataaacaaaaagataagaatggcgagagaatgatcacaataaggggtggcacagaatcaacaagatatgcagttcaactaatcaatgcactcattcaagatcctgctaaggaactggaagacttgattcctaaaaatcatatcagaacacctgccagcaccaaatcaattcatgctaacttctcatctggagtaggtaccacagcagcttccagtaaaaatgcatttcctttgggtgctccaactcttgtaacttcacaggcaacaacgttatctacgttccagcccgctaataaacttaataagaatgttccaacaaatgtacgttcttctttcccagtttctctacccttagcttatcctcaccctcattttgccctgctggctgctcaaactatgcaacagattcggcatcctcgcttacccatggcccagtttggaggaaccttctcaccttctcctaacacatggggaccattcccagtgagacctgtgaatcctggcaacacaaatagctctccaaagcataataacacaagccgtctacctaaccagaacgggactgttttaccctcagagtctgctggactagctactgccagttgtcctatcactgtctcttctgtagttgctgccagtcagcaactgtgtgtcactaatacccggactccttcatcagtcagaaagcagttgtttgcctgtgtgcctaagacaagtcctccagcaacagtgatttcttctgtgacaagcacttgtagttccctgccttctgtctcctctgcacctatcactagcgggcaagctcccaccacatttctacctgcaagtacttctcaagcacagctttcttcacaaaagatggagtctttctctgctgtgccacccaccaaagagaaagtgtccacacaggaccagcccatggcaaacctatgtaccccatcttcaactgcaaacagttgcagtagctctgccagcaacaccccgggagctccagaaactcacccatccagtagtcccactcctacttccagtaacacacaagaggaggcacagccatccagtgtgtctgatttaagtcctatgtcaatgccttttgcatctaactcagaacctgctccattgactttgacatcacccagaatggttgctgctgataatcaggacaccagtaatttacctcagttagctgtaccagcacctcgagtttctcatcgaatgcagcccagaggttctttttactccatggtaccaaatgcaactattcaccaggatccccagtctatttttgttacgaatccagttactttaacaccacctcaaggcccaccagctgcagtgcagctttcttcagctgtgaacattatgaatggttctcagatgcacataaacccagcaaataagtctttgccacctacatttggcccagccacacttttcaatcacttcagcagtctttttgatagtagtcaggtgccagctaaccagggctggggagatggtccactgtcctcacgagttgctacagatgcctctttcactgttcagtcagcgttcctgggtaactcagtgcttggacacttggaaaacatgcaccctgataactcaaaggcacctggcttcagaccaccttcccagcgagtttctactagtccagttgggttaccatccattgacccatcaggcagctccccatcttcctcttctgctcctctggcaagtttttccggcataccaggaacaagggttttcctgcaagggccagctcctgttgggactcctagtttcaacagacaacatttttctccccatccttggacaagcgcctcaaactcatgtgactctcctattccatctgtttcttcgggatcatcttcacctctttcagccacttctgccccaccaacgttgggccaaccaaaaggagtcagtgccagtcaagatcgaaagatacctcccccaattggaacagagagactggcccgaattcggcaaggagggtctgttgcacaagccccggcggggaccagttttgtcgctcccgttggacacagtggaatctggtcatttggtgtcaatgctgtgtcagaaggcttatcaggttggtcgcaatctgtgatggggaaccatccaatgcatcaacaattatcagacccaagcacattctcccaacatcagccaatggagagagatgattctggaatggtagccccctctaacatttttcatcagcctatggcaagtggttttgtggatttttctaaaggtctgccaatttccatgtatggaggcaccataataccctctcatcctcagcttgctgatgttccaggaggccctctgtttaatggacttcacaatccagatcctgcttggaaccctatgataaaagttatccaaaattcaactgaatgcactgatgcccagcaggtaaaatgggcttaatgctcttttgttttttagatttgtcacatcattctttttgttttgtgagaagtataagtactgaatatcaaaagtcataattgaccatttcgatctggattgctttttcaatatcaagatgatgctactgaacactttatttaatatatgtgtattcttcctaggcagaaacagtgaattgccattgcatttatatattcattttgtaactgtctaaagattcctaattagaaattccaatttttcctcccccttttcagatttggcctggcacgtgggcacctcatattggaaacatgcatctcaaatatgtcaactaagttagaaggtctttactctttagccttgtttaagaaacctatgaccttggaagaaccatggggatttttttttaatgtgcctaagaaattttctctgaggctttagcaatggaaatttgattgcccattgtataagaacaaattgatttcctatccacctgattatgttctctggttagtttagccattttgaacttaagatcatatgaccttagtgcttttggctaaacatacagaatactacttgtatgcagaagagaattagttgattacatgtttcaaccttttagggtgataaatacatgtataattgtttacatacttaaaaggaaaaagttgagtaaatttcttgtcatatagtggctctacgtaatgtagcctgtattaatgtgaaatatttaccagaatattcaataaaaagatgaacagtctttagaagtggggtgtgatcctttcagtggtcatgcaggtaccactcaatccacattatattgaaccagatggttaatactatatttgtaacaggcttctcacatttaacacttgagtcccttcttagactgccttaaaaaagcacttttaagactatttacctatttattctgtgttaaacattccttgttcccttgttgtcttccataatcctttaacatatgagaaagtttcaagctctggcaatgtgtcttatctgactttagctagcagataggccactgataggttttttctctatggatcatgagaatgtcaataagaacaattggatttaaatcagatgacactaaacaaatgtagggacacccaaattatcaacttcaggttccttctgtgcttcctgaccttttttatctgaaagatttgtctggttatagatattttaagctttatatgagttgggacataaggaggtgactcctgtcattctgttgtattattgaatcagctgagtaatatttataaatatgtgagtaattccaggcttagttccatggccctaagcatggagagtcaatatgtttaacaagctaaacagaggaaccctggaatgggctgctttggccaaaccataggctatgccgagaatcagcatagagaaggaaaagttatcccactgaaaagtatagtcatcaacttatttgtgttttaatatagctgaatttttcctggtcagtataggcaatacagaaaagaaaacaagaaaatgtttggagctgatggagaagccaaaactcatatnaaggcaaagaaggatgcacagagaaagagtagtaactagggacagaactatattagcagcacctttctacncttatgccaacaggaattcttaattttctctgcccaggtcctaaagccaggaccacatcagacacaccatgtttgttctgtgtcagatatacctgcttctttaatcttctatatcatcttacatatgagaaagcttccttaattaagcttatgtcttatgttttgttttgaatggattttgaaagtgttgtttattgaagctactactttgtagtgattgataaccacatcaagtatcattaaggggccccttgacctttgtgggggcagttgggtggggcacaaaagactccttggatcacctgtgtatcttgctgtttccacttaccattaacagcaacaagaaaaatcacctaaaattggtgaaatgaatgaaactactcttgatgaaatatatactagtgagaaataatattaaataaattattcagtgggacaaaaaggtgagttttattctatcttaactgtctacaatacatttgaattgtctggaggagccttaagtccatattctgcaccttgaggacaaccaaatgagaaattttatttcaggtcagtaagtagaatttatgaagagaaaggagataattatgaggaatccctaggaaaattgggaggaaaacaacagttgtatagttgggagtagttctttaggatacgctcctcccttccttcttaccagcacttccttcctttctttctgactatttggatcccagtagcctgctcccaacctcatttcacctgctaaatctcttcttcctctgcctgcctcttcctggcactactttactgctattttaccaacctgaacatttggataaaacctagctcaggtaagaacttaattactttcaaaatatacaagggatatgggaggagacagcatggatacagtggagcagtagtcagtagtcagagcctaaattctattttcatttctgccgcttgaagctttatggccttaggcaaatcatctcacctttctgggtttcacttttctcatctgaaattgaactcaagagtcttctagttctaacacaggatttcttcttgtgaatgagaatataagatatggaaatatttgaagccattagattgtttacagtgctgagatttgagagcccctagcattggttctgataaggaatcgaaataaatcctgccattattatgggggccagtattgagattttagtggaggcagaagaagaccttgcacatctttagtgagccttcaagttgtgaagaaacatcctgctaaggtatagatcaaacccagtgaaatgaaactataggaatgaaactacatcatcaaggtttctggacccacttatttcaacttgtgttcaatgtaataaaattccgctaccaataaaattattaatgttttaagaccctttaaacctattgtggctacagtgtgctgacttgcccttttataggccagtctgcttccttcagtccctgctctcaaaggggaaatcccatcacctcagctaaccagaccgaagaagagaattggacggccgatggtggcctctcctaaccagaggcaccaggatcatctacgaccgaaagttcctgctggagtgcaagaactcacccattgcccggacacccccctgctgcctccctcagattcccggggtcacaactcctccaacagcccctctctccaagctggaggagctgaaggagcaggagacagaggaagagatacccgatgacgcacaatttgaaatggacatctaatccagtgcagatgacctggcatgtggagttacagagggatccctcatgccactgctgccaccacctcttcctggggcatccaaaggccagctggcctcatctaatctggaagggagtgacttgttagttccaggcctcctttagttctgaggcagctagaccagggataggagtgggcaacttgccaagcccttaactctacttcctcttcagtctgtggtactcctcctaaccctaaaccctctatgctcaggggctggaactggggaatggagtaagtcaccttctgactgcttagtaaacattcaaagaaaaaa

SEQ ID NO: 375982 - DNA, 7562 bp, Homo sapiens
  misc_feature (5419)..(5419): n is a, c, g, or t
  misc_feature (5490)..(5490): n is a, c, g, or t
ctgctttaacaatagcagcatctcttgaggaaggcacagggggagcattaacatctgctcctttatcaagaagaactcttccaacctctgcataccctccagagatactgctttaacaatagcagcagacaaaggtcactacaaattttgtgaactcctgattcataggggagcccacattgatgttcgtaacaaaaagggaaatacgccactttggctggcatccaatggaggtcattttgatgttgtgcagttgctagtgcaagcaggtgctgatgtggatgcagcagataaccggaaaatcacacctcttatgtcagcatttcgcaagggtcatgtaaaagttgttcaatatttggtaaaggaagtaaatcagttcccttctgatatagaatgcatgagatacatagcaacaattacagataaggaactgttgaaaaaatgtcatcaatgtgtcgaaaccattgtgaaggctaaagaccagcaagctgcagaagcaaataagaatgcgagtattcttttaaaggaacttgatctggaaaagtcaagagaagagagcagaaagcaggctcttgctgctaaaagagaaaaaagaaaagaaaagagaaaaaagaaaaaagaggaacagaaaaggaaacaggaagaagatgaagaaaacaaacctaaggagaattcggaactaccagaggatgaagatgaagaggagaatgatgaagatgtggagcaagaagttcccatagaacctcctagtgcaaccaccaccactacgattggaatctctgcaacatctgcaacattcacaaatgtgtttgggaaaaaaagggccaatgtggtgacaactcccagcaccaatcggaaaaataagaagaacaaaacaaaagaaacccctcctacagcacatttaattttaccagaacaacatatgtctttagcccaacaaaaggcagataaaaataaaataaatggagaacctagaggtggtggtgcaggtgggaatagtgattcagataacttggacagcacagactgcaacagtgagagtagcagtggtggtaaaagccaagagttaaattttgtgatggatgtgaattcctctaaatacccctcactgctccttcattcccaagaagaaaagacaagtactgctacttccaaaactcagacacgacttgaaggtgaagtgactcctaattccttgtcaaccagctacaagacagtgtcattgccattaagctctccaaacataaagctgaatctcactagccctaaaaggggtcagaaaagagaagaagggtggaaagaagttgtacgaaggtcaaagaaattgtctgttccagcctcagtggtgtcgaggataatgggaagaggaggatgcaacatcactgcaatacaggatgttactggtgcccatattgatgtggataaacaaaaagataagaatggcgagagaatgatcacaataaggggtggcacagaatcaacaagatatgcagttcaactaatcaatgcactcattcaagatcctgctaaggaactggaagacttgattcctaaaaatcatatcagaacacctgccagcaccaaatcaattcatgctaacttctcatctggagtaggtaccacagcagcttccagtaaaaatgcatttcctttgggtgctccaactcttgtaacttcacaggcaacaacgttatctacgttccagcccgctaataaacttaataagaatgttccaacaaatgtacgttcttctttcccagtttctctacccttagcttatcctcaccctcattttgccctgctggctgctcaaactatgcaacagattcggcatcctcgcttacccatggcccagtttggaggaaccttctcaccttctcctaacacatggggaccattcccagtgagacctgtgaatcctggcaacacaaatagctctccaaagcataataacacaagccgtctacctaaccagaacgggactgttttaccctcagagtctgctggactagctactgccagttgtcctatcactgtctcttctgtagttgctgccagtcagcaactgtgtgtcactaatacccggactccttcatcagtcagaaagcagttgtttgcctgtgtgcctaagacaagtcctccagcaacagtgatttcttctgtgacaagcacttgtagttccctgccttctgtctcctctgcacctatcactagcgggcaagctcccaccacatttctacctgcaagtacttctcaagcacagctttcttcacaaaagatggagtctttctctgctgtgccacccaccaaagagaaagtgtccacacaggaccagcccatggcaaacctatgtaccccatcttcaactgcaaacagttgcagtagctctgccagcaacaccccgggagctccagaaactcacccatccagtagtcccactcctacttccagtaacacacaagaggaggcacagccatccagtgtgtctgatttaagtcctatgtcaatgccttttgcatctaactcagaacctgctccattgactttgacatcacccagaatggttgctgctgataatcaggacaccagtaatttacctcagttagctgtaccagcacctcgagtttctcatcgaatgcagcccagaggttctttttactccatggtaccaaatgcaactattcaccaggatccccagtctatttttgttacgaatccagttactttaacaccacctcaaggcccaccagctgcagtgcagctttcttcagctgtgaacattatgaatggttctcagatgcacataaacccagcaaataagtctttgccacctacatttggcccagccacacttttcaatcacttcagcagtctttttgatagtagtcaggtgccagctaaccagggctggggagatggtccactgtcctcacgagttgctacagatgcctctttcactgttcagtcagcgttcctgggtaactcagtgcttggacacttggaaaacatgcaccctgataactcaaaggcacctggcttcagaccaccttcccagcgagtttctactagtccagttgggttaccatccattgacccatcaggcagctccccatcttcctcttctgctcctctggcaagtttttccggcataccaggaacaagggttttcctgcaagggccagctcctgttgggactcctagtttcaacagacaacatttttctccccatccttggacaagcgcctcaaactcatgtgactctcctattccatctgtttcttcgggatcatcttcacctctttcagccacttctgccccaccaacgttgggccaaccaaaaggagtcagtgccagtcaagatcgaaagatacctcccccaattggaacagagagactggcccgaattcggcaaggagggtctgttgcacaagccccggcggggaccagttttgtcgctcccgttggacacagtggaatctggtcatttggtgtcaatgctgtgtcagaaggcttatcaggttggtcgcaatctgtgatggggaaccatccaatgcatcaacaattatcagacccaagcacattctcccaacatcagccaatggagagagatgattctggaatggtagccccctctaacatttttcatcagcctatggcaagtggttttgtggatttttctaaaggtctgccaatttccatgtatggaggcaccataataccctctcatcctcagcttgctgatgttccaggaggccctctgtttaatggacttcacaatccagatcctgcttggaaccctatgataaaagttatccaaaattcaactgaatgcactgatgcccagcaggtaaaatgggcttaatgctcttttgttttttagatttgtcacatcattctttttgttttgtgagaagtataagtactgaatatcaaaagtcataattgaccatttcgatctggattgctttttcaatatcaagatgatgctactgaacactttatttaatatatgtgtattcttcctaggcagaaacagtgaattgccattgcatttatatattcattttgtaactgtctaaagattcctaattagaaattccaatttttcctcccccttttcagatttggcctggcacgtgggcacctcatattggaaacatgcatctcaaatatgtcaactaagttagaaggtctttactctttagccttgtttaagaaacctatgaccttggaagaaccatggggatttttttttaatgtgcctaagaaattttctctgaggctttagcaatggaaatttgattgcccattgtataagaacaaattgatttcctatccacctgattatgttctctggttagtttagccattttgaacttaagatcatatgaccttagtgcttttggctaaacatacagaatactacttgtatgcagaagagaattagttgattacatgtttcaaccttttagggtgataaatacatgtataattgtttacatacttaaaaggaaaaagttgagtaaatttcttgtcatatagtggctctacgtaatgtagcctgtattaatgtgaaatatttaccagaatattcaataaaaagatgaacagtctttagaagtggggtgtgatcctttcagtggtcatgcaggtaccactcaatccacattatattgaaccagatggttaatactatatttgtaacaggcttctcacatttaacacttgagtcccttcttagactgccttaaaaaagcacttttaagactatttacctatttattctgtgttaaacattccttgttcccttgttgtcttccataatcctttaacatatgagaaagtttcaagctctggcaatgtgtcttatctgactttagctagcagataggccactgataggttttttctctatggatcatgagaatgtcaataagaacaattggatttaaatcagatgacactaaacaaatgtagggacacccaaattatcaacttcaggttccttctgtgcttcctgaccttttttatctgaaagatttgtctggttatagatattttaagctttatatgagttgggacataaggaggtgactcctgtcattctgttgtattattgaatcagctgagtaatatttataaatatgtgagtaattccaggcttagttccatggccctaagcatggagagtcaatatgtttaacaagctaaacagaggaaccctggaatgggctgctttggccaaaccataggctatgccgagaatcagcatagagaaggaaaagttatcccactgaaaagtatagtcatcaacttatttgtgttttaatatagctgaatttttcctggtcagtataggcaatacagaaaagaaaacaagaaaatgtttggagctgatggagaagccaaaactcatatnaaggcaaagaaggatgcacagagaaagagtagtaactagggacagaactatattagcagcacctttctacncttatgccaacaggaattcttaattttctctgcccaggtcctaaagccaggaccacatcagacacaccatgtttgttctgtgtcagatatacctgcttctttaatcttctatatcatcttacatatgagaaagcttccttaattaagcttatgtcttatgttttgttttgaatggattttgaaagtgttgtttattgaagctactactttgtagtgattgataaccacatcaagtatcattaaggggccccttgacctttgtgggggcagttgggtggggcacaaaagactccttggatcacctgtgtatcttgctgtttccacttaccattaacagcaacaagaaaaatcacctaaaattggtgaaatgaatgaaactactcttgatgaaatatatactagtgagaaataatattaaataaattattcagtgggacaaaaaggtgagttttattctatcttaactgtctacaatacatttgaattgtctggaggagccttaagtccatattctgcaccttgaggacaaccaaatgagaaattttatttcaggtcagtaagtagaatttatgaagagaaaggagataattatgaggaatccctaggaaaattgggaggaaaacaacagttgtatagttgggagtagttctttaggatacgctcctcccttccttcttaccagcacttccttcctttctttctgactatttggatcccagtagcctgctcccaacctcatttcacctgctaaatctcttcttcctctgcctgcctcttcctggcactactttactgctattttaccaacctgaacatttggataaaacctagctcaggtaagaacttaattactttcaaaatatacaagggatatgggaggagacagcatggatacagtggagcagtagtcagtagtcagagcctaaattctattttcatttctgccgcttgaagctttatggccttaggcaaatcatctcacctttctgggtttcacttttctcatctgaaattgaactcaagagtcttctagttctaacacaggatttcttcttgtgaatgagaatataagatatggaaatatttgaagccattagattgtttacagtgctgagatttgagagcccctagcattggttctgataaggaatcgaaataaatcctgccattattatgggggccagtattgagattttagtggaggcagaagaagaccttgcacatctttagtgagccttcaagttgtgaagaaacatcctgctaaggtatagatcaaacccagtgaaatgaaactataggaatgaaactacatcatcaaggtttctggacccacttatttcaacttgtgttcaatgtaataaaattccgctaccaataaaattattaatgttttaagaccctttaaacctattgtggctacagtgtgctgacttgcccttttataggccagtctgcttccttcagtccctgctctcaaaggggaaatcccatcacctcagctaaccagaccgaagaagagaattggacggccgatggtggcctctcctaaccagaggcaccaggatcatctacgaccgaaagttcctgctggagtgcaagaactcacccattgcccggacacccccctgctgcctccctcagattcccggggtcacaactcctccaacagcccctctctccaagctggaggagctgaaggagcaggagacagaggaagagatacccgatgacgcacaatttgaaatggacatctaatccagtgcagatgacctggcatgtggagttacagagggatccctcatgccactgctgccaccacctcttcctggggcatccaaaggccagctggcctcatctaatctggaagggagtgacttgttagttccaggcctcctttagttctgaggcagctagaccagggataggagtgggcaacttgccaagcccttaactctacttcctcttcagtctgtggtactcctcctaaccctaaaccctctatgctcaggggctggaactggggaatggagtaagtcaccttctgactgcttagtaaacattcaaagaaaaaa

SEQ ID NO: 375983 - DNA, 5766 bp, Homo sapiens
ttaaggcaggggctgatatagaacttggctgctccacacctctgatggaggcatctcaggagggacacctggaattggttaaatatttgctggcttctggcgctaatgtgcatgctacaacagcaacaggagacacagccttaacctatgcttgtgaaaatggacatacggatgttgcagatgttttacttcaagcaggggctgatttagaacatgaatctgaaggtggaagaacacctttgatgaaagctgcaagagctggtcatttgtgcactgtgcagtttcttattagcaaaggtgccaatgttaacagggctacagccaataatgatcatacagtagtgtcgctggcatgtgcaggaggccacctggcagttgttgagcttctcttggctcatggggctgaccctactcatcgactcaaggatggttcaacaatgctcattgaagctgcaaagggtggccatactaatgtagtttcttatctgttggattatccaaataatgttctgtcagttcccaccacagatgtgtctcagctccctccaccttctcaagatcagtctcaggtgccacgtgtgccaacgcatacacttgccatggttgtacctccccaggaacctgacagaacttcacaggagaactctcctgcccttttaggagtgcaaaaaggtacatccaagcagaagtccagttccctccaggtagcagatcaggacctactgccatcttttcacccataccagcctttggagtgcatagtagaggagactgaaggcaagctgaatgaactgggacaaagaattagtgctattgaaaaagcacagcttaagtcactggagttaattcaaggtgaacctctgaacaaagataagatagaagaacttaaaaagaacagagaagagcaagtccagaagaagaagaaaatattgaaagaactgcagaaagtggaaaggcagttgcagatgaaaacacagcagcaatttaccaaagaatacttggaaaccaaaggtcagaaagacacagtgtctctacaccaacagtgctctcatagaggagtcttcccagaaggggaaggagatggtagtctcccagaggatcacttttcagagttacctcaggttgacacaatcttatttaaagataatgatgttgatgatgagcaacagtctccaccatcggcagaacagattgattttgtcccagtccagcctttatcatctccacagtgtaacttttccagtgacttaggttctaatgggacaaattctcttgaacttcagaaagtatcaggtaatcagcagattgtaggacagcctcagattgctattactggacatgatcaggggctgttagttcaagaaccagatggactaatggttgcaactccagctcagacgcttaccgacactcttgatgacctgatagcagctgtgagtaccagagtgcccactggttccaacagttcttctcagaccacagagtgtcttacacctgaatcctgttcgcagactacaagcaatgtggcttcccaatcgatgcctcctgtgtatccttcagttgacattgatgcacatactgagagcaatcatgacacagcattaacactagcttgtgcaggtggtcatgaagaacttgtatctgtgctcattgcacgggatgccaaaattgaacacagagacaaaaaaggtttcacaccactaatcctggcagcaacagcagggcatgttggagttgttgaaatccttttggataaaggtggagatatagaagcacagtctgaacgaactaaggatactccgctttcattggcatgttctggtggacgtcaggaggtggtagacttgctgctggctcgaggtgcaaataaagaacataggaacgtatctgattatacaccactgagtctagctgcgtctggaggatatgttaatatcattaagattctgcttaatgctggggcagaaattaattcaaggactgggagtaaactaggtatttctcccctgatgttggctgcaatgaatggacatgttcctgcagtaaaattgctgctcgatatgggttcagacattaatgcccaaatagagaccaatcggaacacggctctcaccctggcctgtttccagggccgagcagaagtagtgagtttgcttctggaccgaaaagccaatgttgaacatagggcaaagacgggtcttacccccttgatggaagcagcttctggagggtatgcagaggttggaagagttcttcttgataaaggagcagatgttaatgctccccctgtgccttcctcaagagatactgctttaacaatagcagcagacaaaggtcactacaaattttgtgaactcctgattcataggggagcccacattgatgttcgtaacaaaaagggaaatacgccactttggctggcatccaatggaggtcattttgatgttgtgcagttgctagtgcaagcaggtgctgatgtggatgcagcagataaccggaaaatcacacctcttatgtcagcatttcgcaagggtcatgtaaaagttgttcaatatttggtaaaggaagtaaatcagttcccttctgatatagaatgcatgagatacatagcaacaattacagataaggaactgttgaaaaaatgtcatcaatgtgtcgaaaccattgtgaaggctaaagaccagcaagctgcagaagcaaataagaatgcgagtattcttttaaaggaacttgatctggaaaagtcaagagaagagagcagaaagcaggctcttgctgctaaaagagaaaaaagaaaagaaaagagaaaaaagaaaaaagaggaacagaaaaggaaacaggaagaagatgaagaaaacaaacctaaggagaattcggaactaccagaggatgaagatgaagaggagaatgatgaagatgtggagcaagaagttcccatagaacctcctagtgcaaccaccaccactacgattggaatctctgcaacatctgcaacattcacaaatgtgtttgggaaaaaaagggccaatgtggtgacaactcccagcaccaatcggaaaaataagaagaacaaaacaaaagaaacccctcctacagcacatttaattttaccagaacaacatatgtctttagcccaacaaaaggcagataaaaataaaataaatggagaacctagaggtggtggtgcaggtgggaatagtgattcagataacttggacagcacagactgcaacagtgagagtagcagtggtggtaaaagccaagagttaaattttgtgatggatgtgaattcctctaaatacccctcactgctccttcattcccaagaagaaaagacaagtactgctacttccaaaactcagacacgacttgaaggtgaagtgactcctaattccttgtcaaccagctacaagacagtgtcattgccattaagctctccaaacataaagctgaatctcactagccctaaaaggggtcagaaaagagaagaagggtggaaagaagttgtacgaaggtcaaagaaattgtctgttccagcctcagtggtgtcgaggataatgggaagaggaggatgcaacatcactgcaatacaggatgttactggtgcccatattgatgtggataaacaaaaagataagaatggcgagagaatgatcacaataaggggtggcacagaatcaacaagatatgcagttcaactaatcaatgcactcattcaagatcctgctaaggaactggaagacttgattcctaaaaatcatatcagaacacctgccagcaccaaatcaattcatgctaacttctcatctggagtaggtaccacagcagcttccagtaaaaatgcatttcctttgggtgctccaactcttgtaacttcacaggcaacaacgttatctacgttccagcccgctaataaacttaataagaatgttccaacaaatgtacgttcttctttcccagtttctctacccttagcttatcctcaccctcattttgccctgctggctgctcaaactatgcaacagattcggcatcctcgcttacccatggcccagtttggaggaaccttctcaccttctcctaacacatggggaccattcccagtgagacctgtgaatcctggcaacacaaatagctctccaaagcataataacacaagccgtctacctaaccagaacgggactgttttaccctcagagtctgctggactagctactgccagttgtcctatcactgtctcttctgtagttgctgccagtcagcaactgtgtgtcactaatacccggactccttcatcagtcagaaagcagttgtttgcctgtgtgcctaagacaagtcctccagcaacagtgatttcttctgtgacaagcacttgtagttccctgccttctgtctcctctgcacctatcactagcgggcaagctcccaccacatttctacctgcaagtacttctcaagcacagctttcttcacaaaagatggagtctttctctgctgtgccacccaccaaagagaaagtgtccacacaggaccagcccatggcaaacctatgtaccccatcttcaactgcaaacagttgcagtagctctgccagcaacaccccgggagctccagaaactcacccatccagtagtcccactcctacttccagtaacacacaagaggaggcacagccatccagtgtgtctgatttaagtcctatgtcaatgccttttgcatctaactcagaacctgctccattgactttgacatcacccagaatggttgctgctgataatcaggacaccagtaatttacctcagttagctgtaccagcacctcgagtttctcatcgaatgcagcccagaggttctttttactccatggtaccaaatgcaactattcaccaggatccccagtctatttttgttacgaatccagttactttaacaccacctcaaggcccaccagctgcagtgcagctttcttcagctgtgaacattatgaatggttctcagatgcacataaacccagcaaataagtctttgccacctacatttggcccagccacacttttcaatcacttcagcagtctttttgatagtagtcaggtgccagctaaccagggctggggagatggtccactgtcctcacgagttgctacagatgcctctttcactgttcagtcagcgttcctgggtaactcagtgcttggacacttgggagtttctactagtccagttgggttaccatccattgacccatcaggcagctccccatcttcctcttctgctcctctggcaagtttttccggcataccaggaacaagggttttcctgcaagggccagctcctgttgggactcctagtttcaacagacaacatttttctccccatccttggacaagcgcctcaaactcatgtaggaatcctggaggaactcttcccaaagagttttgaataagttattaaatcatttatttcagttacaacaccatgttgtaactttagtaaactaagtggtatacagatgcccaaggtttgttctgtggtcatgtgaaaaaattgtcagtcatttttagcatagaaaacttgagaattattctttcaagccaaaaatgttttacagtagaacttggatcaagaaaagaggtactaggctgggtgcagtggctgacacctgtaatcccagcactttgggaggcctaggcaagaggatcgcttgagcccagcagttggagaccagcctgggcaacagcaagaccctgtctctattaaaaaaaaaaaa

SEQ ID NO: 375984 - DNA, 7433 bp, Homo sapiens
  misc_feature (5290)..(5290): n is a, c, g, or t
  misc_feature (5361)..(5361): n is a, c, g, or t
tttgtgggcacaaaaggaatccctcatctggtgactcatgatgcccgcaccacccgctaccccgatcccctcatcaaggtgaatgataccattcagattgatttagagactggcaagattactgatttcatcaagttcgacactggtaacctgtgtatggtgactggaggtgagatcacctcttatgtcagcatttcgcaagggtcatgtaaaagttgttcaatatttggtaaaggaagtaaatcagttcccttctgatatagaatgcatgagatacatagcaacaattacagataaggaactgttgaaaaaatgtcatcaatgtgtcgaaaccattgtgaaggctaaagaccagcaagctgcagaagcaaataagaatgcgagtattcttttaaaggaacttgatctggaaaagtcaagagaagagagcagaaagcaggctcttgctgctaaaagagaaaaaagaaaagaaaagagaaaaaagaaaaaagaggaacagaaaaggaaacaggaagaagatgaagaaaacaaacctaaggagaattcggaactaccagaggatgaagatgaagaggagaatgatgaagatgtggagcaagaagttcccatagaacctcctagtgcaaccaccaccactacgattggaatctctgcaacatctgcaacattcacaaatgtgtttgggaaaaaaagggccaatgtggtgacaactcccagcaccaatcggaaaaataagaagaacaaaacaaaagaaacccctcctacagcacatttaattttaccagaacaacatatgtctttagcccaacaaaaggcagataaaaataaaataaatggagaacctagaggtggtggtgcaggtgggaatagtgattcagataacttggacagcacagactgcaacagtgagagtagcagtggtggtaaaagccaagagttaaattttgtgatggatgtgaattcctctaaatacccctcactgctccttcattcccaagaagaaaagacaagtactgctacttccaaaactcagacacgacttgaaggtgaagtgactcctaattccttgtcaaccagctacaagacagtgtcattgccattaagctctccaaacataaagctgaatctcactagccctaaaaggggtcagaaaagagaagaagggtggaaagaagttgtacgaaggtcaaagaaattgtctgttccagcctcagtggtgtcgaggataatgggaagaggaggatgcaacatcactgcaatacaggatgttactggtgcccatattgatgtggataaacaaaaagataagaatggcgagagaatgatcacaataaggggtggcacagaatcaacaagatatgcagttcaactaatcaatgcactcattcaagatcctgctaaggaactggaagacttgattcctaaaaatcatatcagaacacctgccagcaccaaatcaattcatgctaacttctcatctggagtaggtaccacagcagcttccagtaaaaatgcatttcctttgggtgctccaactcttgtaacttcacaggcaacaacgttatctacgttccagcccgctaataaacttaataagaatgttccaacaaatgtacgttcttctttcccagtttctctacccttagcttatcctcaccctcattttgccctgctggctgctcaaactatgcaacagattcggcatcctcgcttacccatggcccagtttggaggaaccttctcaccttctcctaacacatggggaccattcccagtgagacctgtgaatcctggcaacacaaatagctctccaaagcataataacacaagccgtctacctaaccagaacgggactgttttaccctcagagtctgctggactagctactgccagttgtcctatcactgtctcttctgtagttgctgccagtcagcaactgtgtgtcactaatacccggactccttcatcagtcagaaagcagttgtttgcctgtgtgcctaagacaagtcctccagcaacagtgatttcttctgtgacaagcacttgtagttccctgccttctgtctcctctgcacctatcactagcgggcaagctcccaccacatttctacctgcaagtacttctcaagcacagctttcttcacaaaagatggagtctttctctgctgtgccacccaccaaagagaaagtgtccacacaggaccagcccatggcaaacctatgtaccccatcttcaactgcaaacagttgcagtagctctgccagcaacaccccgggagctccagaaactcacccatccagtagtcccactcctacttccagtaacacacaagaggaggcacagccatccagtgtgtctgatttaagtcctatgtcaatgccttttgcatctaactcagaacctgctccattgactttgacatcacccagaatggttgctgctgataatcaggacaccagtaatttacctcagttagctgtaccagcacctcgagtttctcatcgaatgcagcccagaggttctttttactccatggtaccaaatgcaactattcaccaggatccccagtctatttttgttacgaatccagttactttaacaccacctcaaggcccaccagctgcagtgcagctttcttcagctgtgaacattatgaatggttctcagatgcacataaacccagcaaataagtctttgccacctacatttggcccagccacacttttcaatcacttcagcagtctttttgatagtagtcaggtgccagctaaccagggctggggagatggtccactgtcctcacgagttgctacagatgcctctttcactgttcagtcagcgttcctgggtaactcagtgcttggacacttggaaaacatgcaccctgataactcaaaggcacctggcttcagaccaccttcccagcgagtttctactagtccagttgggttaccatccattgacccatcaggcagctccccatcttcctcttctgctcctctggcaagtttttccggcataccaggaacaagggttttcctgcaagggccagctcctgttgggactcctagtttcaacagacaacatttttctccccatccttggacaagcgcctcaaactcatgtgactctcctattccatctgtttcttcgggatcatcttcacctctttcagccacttctgccccaccaacgttgggccaaccaaaaggagtcagtgccagtcaagatcgaaagatacctcccccaattggaacagagagactggcccgaattcggcaaggagggtctgttgcacaagccccggcggggaccagttttgtcgctcccgttggacacagtggaatctggtcatttggtgtcaatgctgtgtcagaaggcttatcaggttggtcgcaatctgtgatggggaaccatccaatgcatcaacaattatcagacccaagcacattctcccaacatcagccaatggagagagatgattctggaatggtagccccctctaacatttttcatcagcctatggcaagtggttttgtggatttttctaaaggtctgccaatttccatgtatggaggcaccataataccctctcatcctcagcttgctgatgttccaggaggccctctgtttaatggacttcacaatccagatcctgcttggaaccctatgataaaagttatccaaaattcaactgaatgcactgatgcccagcaggtaaaatgggcttaatgctcttttgttttttagatttgtcacatcattctttttgttttgtgagaagtataagtactgaatatcaaaagtcataattgaccatttcgatctggattgctttttcaatatcaagatgatgctactgaacactttatttaatatatgtgtattcttcctaggcagaaacagtgaattgccattgcatttatatattcattttgtaactgtctaaagattcctaattagaaattccaatttttcctcccccttttcagatttggcctggcacgtgggcacctcatattggaaacatgcatctcaaatatgtcaactaagttagaaggtctttactctttagccttgtttaagaaacctatgaccttggaagaaccatggggatttttttttaatgtgcctaagaaattttctctgaggctttagcaatggaaatttgattgcccattgtataagaacaaattgatttcctatccacctgattatgttctctggttagtttagccattttgaacttaagatcatatgaccttagtgcttttggctaaacatacagaatactacttgtatgcagaagagaattagttgattacatgtttcaaccttttagggtgataaatacatgtataattgtttacatacttaaaaggaaaaagttgagtaaatttcttgtcatatagtggctctacgtaatgtagcctgtattaatgtgaaatatttaccagaatattcaataaaaagatgaacagtctttagaagtggggtgtgatcctttcagtggtcatgcaggtaccactcaatccacattatattgaaccagatggttaatactatatttgtaacaggcttctcacatttaacacttgagtcccttcttagactgccttaaaaaagcacttttaagactatttacctatttattctgtgttaaacattccttgttcccttgttgtcttccataatcctttaacatatgagaaagtttcaagctctggcaatgtgtcttatctgactttagctagcagataggccactgataggttttttctctatggatcatgagaatgtcaataagaacaattggatttaaatcagatgacactaaacaaatgtagggacacccaaattatcaacttcaggttccttctgtgcttcctgaccttttttatctgaaagatttgtctggttatagatattttaagctttatatgagttgggacataaggaggtgactcctgtcattctgttgtattattgaatcagctgagtaatatttataaatatgtgagtaattccaggcttagttccatggccctaagcatggagagtcaatatgtttaacaagctaaacagaggaaccctggaatgggctgctttggccaaaccataggctatgccgagaatcagcatagagaaggaaaagttatcccactgaaaagtatagtcatcaacttatttgtgttttaatatagctgaatttttcctggtcagtataggcaatacagaaaagaaaacaagaaaatgtttggagctgatggagaagccaaaactcatatnaaggcaaagaaggatgcacagagaaagagtagtaactagggacagaactatattagcagcacctttctacncttatgccaacaggaattcttaattttctctgcccaggtcctaaagccaggaccacatcagacacaccatgtttgttctgtgtcagatatacctgcttctttaatcttctatatcatcttacatatgagaaagcttccttaattaagcttatgtcttatgttttgttttgaatggattttgaaagtgttgtttattgaagctactactttgtagtgattgataaccacatcaagtatcattaaggggccccttgacctttgtgggggcagttgggtggggcacaaaagactccttggatcacctgtgtatcttgctgtttccacttaccattaacagcaacaagaaaaatcacctaaaattggtgaaatgaatgaaactactcttgatgaaatatatactagtgagaaataatattaaataaattattcagtgggacaaaaaggtgagttttattctatcttaactgtctacaatacatttgaattgtctggaggagccttaagtccatattctgcaccttgaggacaaccaaatgagaaattttatttcaggtcagtaagtagaatttatgaagagaaaggagataattatgaggaatccctaggaaaattgggaggaaaacaacagttgtatagttgggagtagttctttaggatacgctcctcccttccttcttaccagcacttccttcctttctttctgactatttggatcccagtagcctgctcccaacctcatttcacctgctaaatctcttcttcctctgcctgcctcttcctggcactactttactgctattttaccaacctgaacatttggataaaacctagctcaggtaagaacttaattactttcaaaatatacaagggatatgggaggagacagcatggatacagtggagcagtagtcagtagtcagagcctaaattctattttcatttctgccgcttgaagctttatggccttaggcaaatcatctcacctttctgggtttcacttttctcatctgaaattgaactcaagagtcttctagttctaacacaggatttcttcttgtgaatgagaatataagatatggaaatatttgaagccattagattgtttacagtgctgagatttgagagcccctagcattggttctgataaggaatcgaaataaatcctgccattattatgggggccagtattgagattttagtggaggcagaagaagaccttgcacatctttagtgagccttcaagttgtgaagaaacatcctgctaaggtatagatcaaacccagtgaaatgaaactataggaatgaaactacatcatcaaggtttctggacccacttatttcaacttgtgttcaatgtaataaaattccgctaccaataaaattattaatgttttaagaccctttaaacctattgtggctacagtgtgctgacttgcccttttataggccagtctgcttccttcagtccctgctctcaaaggggaaatcccatcacctcagctaaccagaccgaagaagagaattggacggccgatggtggcctctcctaaccagaggcaccaggatcatctacgaccgaaagttcctgctggagtgcaagaactcacccattgcccggacacccccctgctgcctccctcagattcccggggtcacaactcctccaacagcccctctctccaagctggaggagctgaaggagcaggagacagaggaagagatacccgatgacgcacaatttgaaatggacatctaatccagtgcagatgacctggcatgtggagttacagagggatccctcatgccactgctgccaccacctcttcctggggcatccaaaggccagctggcctcatctaatctggaagggagtgacttgttagttccaggcctcctttagttctgaggcagctagaccagggataggagtgggcaacttgccaagcccttaactctacttcctcttcagtctgtggtactcctcctaaccctaaaccctctatgctcaggggctggaactggggaatggagtaagtcaccttctgactgcttagtaaacattcaaagaaaaaa

SEQ ID NO: 375985 - DNA, 7381 bp, Homo sapiens
  misc_feature (5238)..(5238): n is a, c, g, or t
  misc_feature (5309)..(5309): n is a, c, g, or t
ggctgtgttgatctagaggatcccgggaaactctgagtggcatccaatggaggtcattttgatgttgtgcagttgctagtgcaagcaggtgctgatgtggatgcagcagataaccggaaaatcacacctcttatgtcagcatttcgcaagggtcatgtaaaagttgttcaatatttggtaaaggaagtaaatcagttcccttctgatatagaatgcatgagatacatagcaacaattacagataaggaactgttgaaaaaatgtcatcaatgtgtcgaaaccattgtgaaggctaaagaccagcaagctgcagaagcaaataagaatgcgagtattcttttaaaggaacttgatctggaaaagtcaagagaagagagcagaaagcaggctcttgctgctaaaagagaaaaaagaaaagaaaagagaaaaaagaaaaaagaggaacagaaaaggaaacaggaagaagatgaagaaaacaaacctaaggagaattcggaactaccagaggatgaagatgaagaggagaatgatgaagatgtggagcaagaagttcccatagaacctcctagtgcaaccaccaccactacgattggaatctctgcaacatctgcaacattcacaaatgtgtttgggaaaaaaagggccaatgtggtgacaactcccagcaccaatcggaaaaataagaagaacaaaacaaaagaaacccctcctacagcacatttaattttaccagaacaacatatgtctttagcccaacaaaaggcagataaaaataaaataaatggagaacctagaggtggtggtgcaggtgggaatagtgattcagataacttggacagcacagactgcaacagtgagagtagcagtggtggtaaaagccaagagttaaattttgtgatggatgtgaattcctctaaatacccctcactgctccttcattcccaagaagaaaagacaagtactgctacttccaaaactcagacacgacttgaaggtgaagtgactcctaattccttgtcaaccagctacaagacagtgtcattgccattaagctctccaaacataaagctgaatctcactagccctaaaaggggtcagaaaagagaagaagggtggaaagaagttgtacgaaggtcaaagaaattgtctgttccagcctcagtggtgtcgaggataatgggaagaggaggatgcaacatcactgcaatacaggatgttactggtgcccatattgatgtggataaacaaaaagataagaatggcgagagaatgatcacaataaggggtggcacagaatcaacaagatatgcagttcaactaatcaatgcactcattcaagatcctgctaaggaactggaagacttgattcctaaaaatcatatcagaacacctgccagcaccaaatcaattcatgctaacttctcatctggagtaggtaccacagcagcttccagtaaaaatgcatttcctttgggtgctccaactcttgtaacttcacaggcaacaacgttatctacgttccagcccgctaataaacttaataagaatgttccaacaaatgtacgttcttctttcccagtttctctacccttagcttatcctcaccctcattttgccctgctggctgctcaaactatgcaacagattcggcatcctcgcttacccatggcccagtttggaggaaccttctcaccttctcctaacacatggggaccattcccagtgagacctgtgaatcctggcaacacaaatagctctccaaagcataataacacaagccgtctacctaaccagaacgggactgttttaccctcagagtctgctggactagctactgccagttgtcctatcactgtctcttctgtagttgctgccagtcagcaactgtgtgtcactaatacccggactccttcatcagtcagaaagcagttgtttgcctgtgtgcctaagacaagtcctccagcaacagtgatttcttctgtgacaagcacttgtagttccctgccttctgtctcctctgcacctatcactagcgggcaagctcccaccacatttctacctgcaagtacttctcaagcacagctttcttcacaaaagatggagtctttctctgctgtgccacccaccaaagagaaagtgtccacacaggaccagcccatggcaaacctatgtaccccatcttcaactgcaaacagttgcagtagctctgccagcaacaccccgggagctccagaaactcacccatccagtagtcccactcctacttccagtaacacacaagaggaggcacagccatccagtgtgtctgatttaagtcctatgtcaatgccttttgcatctaactcagaacctgctccattgactttgacatcacccagaatggttgctgctgataatcaggacaccagtaatttacctcagttagctgtaccagcacctcgagtttctcatcgaatgcagcccagaggttctttttactccatggtaccaaatgcaactattcaccaggatccccagtctatttttgttacgaatccagttactttaacaccacctcaaggcccaccagctgcagtgcagctttcttcagctgtgaacattatgaatggttctcagatgcacataaacccagcaaataagtctttgccacctacatttggcccagccacacttttcaatcacttcagcagtctttttgatagtagtcaggtgccagctaaccagggctggggagatggtccactgtcctcacgagttgctacagatgcctctttcactgttcagtcagcgttcctgggtaactcagtgcttggacacttggaaaacatgcaccctgataactcaaaggcacctggcttcagaccaccttcccagcgagtttctactagtccagttgggttaccatccattgacccatcaggcagctccccatcttcctcttctgctcctctggcaagtttttccggcataccaggaacaagggttttcctgcaagggccagctcctgttgggactcctagtttcaacagacaacatttttctccccatccttggacaagcgcctcaaactcatgtgactctcctattccatctgtttcttcgggatcatcttcacctctttcagccacttctgccccaccaacgttgggccaaccaaaaggagtcagtgccagtcaagatcgaaagatacctcccccaattggaacagagagactggcccgaattcggcaaggagggtctgttgcacaagccccggcggggaccagttttgtcgctcccgttggacacagtggaatctggtcatttggtgtcaatgctgtgtcagaaggcttatcaggttggtcgcaatctgtgatggggaaccatccaatgcatcaacaattatcagacccaagcacattctcccaacatcagccaatggagagagatgattctggaatggtagccccctctaacatttttcatcagcctatggcaagtggttttgtggatttttctaaaggtctgccaatttccatgtatggaggcaccataataccctctcatcctcagcttgctgatgttccaggaggccctctgtttaatggacttcacaatccagatcctgcttggaaccctatgataaaagttatccaaaattcaactgaatgcactgatgcccagcaggtaaaatgggcttaatgctcttttgttttttagatttgtcacatcattctttttgttttgtgagaagtataagtactgaatatcaaaagtcataattgaccatttcgatctggattgctttttcaatatcaagatgatgctactgaacactttatttaatatatgtgtattcttcctaggcagaaacagtgaattgccattgcatttatatattcattttgtaactgtctaaagattcctaattagaaattccaatttttcctcccccttttcagatttggcctggcacgtgggcacctcatattggaaacatgcatctcaaatatgtcaactaagttagaaggtctttactctttagccttgtttaagaaacctatgaccttggaagaaccatggggatttttttttaatgtgcctaagaaattttctctgaggctttagcaatggaaatttgattgcccattgtataagaacaaattgatttcctatccacctgattatgttctctggttagtttagccattttgaacttaagatcatatgaccttagtgcttttggctaaacatacagaatactacttgtatgcagaagagaattagttgattacatgtttcaaccttttagggtgataaatacatgtataattgtttacatacttaaaaggaaaaagttgagtaaatttcttgtcatatagtggctctacgtaatgtagcctgtattaatgtgaaatatttaccagaatattcaataaaaagatgaacagtctttagaagtggggtgtgatcctttcagtggtcatgcaggtaccactcaatccacattatattgaaccagatggttaatactatatttgtaacaggcttctcacatttaacacttgagtcccttcttagactgccttaaaaaagcacttttaagactatttacctatttattctgtgttaaacattccttgttcccttgttgtcttccataatcctttaacatatgagaaagtttcaagctctggcaatgtgtcttatctgactttagctagcagataggccactgataggttttttctctatggatcatgagaatgtcaataagaacaattggatttaaatcagatgacactaaacaaatgtagggacacccaaattatcaacttcaggttccttctgtgcttcctgaccttttttatctgaaagatttgtctggttatagatattttaagctttatatgagttgggacataaggaggtgactcctgtcattctgttgtattattgaatcagctgagtaatatttataaatatgtgagtaattccaggcttagttccatggccctaagcatggagagtcaatatgtttaacaagctaaacagaggaaccctggaatgggctgctttggccaaaccataggctatgccgagaatcagcatagagaaggaaaagttatcccactgaaaagtatagtcatcaacttatttgtgttttaatatagctgaatttttcctggtcagtataggcaatacagaaaagaaaacaagaaaatgtttggagctgatggagaagccaaaactcatatnaaggcaaagaaggatgcacagagaaagagtagtaactagggacagaactatattagcagcacctttctacncttatgccaacaggaattcttaattttctctgcccaggtcctaaagccaggaccacatcagacacaccatgtttgttctgtgtcagatatacctgcttctttaatcttctatatcatcttacatatgagaaagcttccttaattaagcttatgtcttatgttttgttttgaatggattttgaaagtgttgtttattgaagctactactttgtagtgattgataaccacatcaagtatcattaaggggccccttgacctttgtgggggcagttgggtggggcacaaaagactccttggatcacctgtgtatcttgctgtttccacttaccattaacagcaacaagaaaaatcacctaaaattggtgaaatgaatgaaactactcttgatgaaatatatactagtgagaaataatattaaataaattattcagtgggacaaaaaggtgagttttattctatcttaactgtctacaatacatttgaattgtctggaggagccttaagtccatattctgcaccttgaggacaaccaaatgagaaattttatttcaggtcagtaagtagaatttatgaagagaaaggagataattatgaggaatccctaggaaaattgggaggaaaacaacagttgtatagttgggagtagttctttaggatacgctcctcccttccttcttaccagcacttccttcctttctttctgactatttggatcccagtagcctgctcccaacctcatttcacctgctaaatctcttcttcctctgcctgcctcttcctggcactactttactgctattttaccaacctgaacatttggataaaacctagctcaggtaagaacttaattactttcaaaatatacaagggatatgggaggagacagcatggatacagtggagcagtagtcagtagtcagagcctaaattctattttcatttctgccgcttgaagctttatggccttaggcaaatcatctcacctttctgggtttcacttttctcatctgaaattgaactcaagagtcttctagttctaacacaggatttcttcttgtgaatgagaatataagatatggaaatatttgaagccattagattgtttacagtgctgagatttgagagcccctagcattggttctgataaggaatcgaaataaatcctgccattattatgggggccagtattgagattttagtggaggcagaagaagaccttgcacatctttagtgagccttcaagttgtgaagaaacatcctgctaaggtatagatcaaacccagtgaaatgaaactataggaatgaaactacatcatcaaggtttctggacccacttatttcaacttgtgttcaatgtaataaaattccgctaccaataaaattattaatgttttaagaccctttaaacctattgtggctacagtgtgctgacttgcccttttataggccagtctgcttccttcagtccctgctctcaaaggggaaatcccatcacctcagctaaccagaccgaagaagagaattggacggccgatggtggcctctcctaaccagaggcaccaggatcatctacgaccgaaagttcctgctggagtgcaagaactcacccattgcccggacacccccctgctgcctccctcagattcccggggtcacaactcctccaacagcccctctctccaagctggaggagctgaaggagcaggagacagaggaagagatacccgatgacgcacaatttgaaatggacatctaatccagtgcagatgacctggcatgtggagttacagagggatccctcatgccactgctgccaccacctcttcctggggcatccaaaggccagctggcctcatctaatctggaagggagtgacttgttagttccaggcctcctttagttctgaggcagctagaccagggataggagtgggcaacttgccaagcccttaactctacttcctcttcagtctgtggtactcctcctaaccctaaaccctctatgctcaggggctggaactggggaatggagtaagtcaccttctgactgcttagtaaacattcaaagaaaaaa

SEQ ID NO: 375986 - DNA, 4888 bp, Homo sapiens
ttaaggcaggggctgatatagaacttggctgctccacacctctgatggaggcatctcaggagggacacctggaattggttaaatatttgctggcttctggcgctaatgtgcatgctacaacagcaacaggagacacagccttaacctatgcttgtgaaaatggacatacggatgttgcagatgttttacttcaagcaggggctgatttagaacatgaatctgaaggtggaagaacacctttgatgaaagctgcaagagctggtcatttgtgcactgtgcagtttcttattagcaaaggtgccaatgttaacagggctacagccaataatgatcatacagtagtgtcgctggcatgtgcaggaggccacctggcagttgttgagcttctcttggctcatggggctgaccctactcatcgactcaaggatggttcaacaatgctcattgaagctgcaaagggtggccatactaatgtagtttcttatctgttggattatccaaataatgttctgtcagttcccaccacagatgtgtctcagctccctccaccttctcaagatcagtctcaggtgccacgtgtgccaacgcatacacttgccatggttgtacctccccaggaacctgacagaacttcacaggagaactctcctgcccttttaggagtgcaaaaaggtacatccaagcagaagtccagttccctccaggtagcagatcaggacctactgccatcttttcacccataccagcctttggagtgcatagtagaggagactgaaggcaagctgaatgaactgggacaaagaattagtgctattgaaaaagcacagcttaagtcactggagttaattcaaggtgaacctctgaacaaagataagatagaagaacttaaaaagaacagagaagagcaagtccagaagaagaagaaaatattgaaagaactgcagaaagtggaaaggcagttgcagatgaaaacacagcagcaatttaccaaagaatacttggaaaccaaaggtcagaaagacacagtgtctctacaccaacagtgctctcatagaggagtcttcccagaaggggaaggagatggtagtctcccagaggatcacttttcagagttacctcaggttgacacaatcttatttaaagataatgatgttgatgatgagcaacagtctccaccatcggcagaacagattgattttgtcccagtccagcctttatcatctccacagtgtaacttttccagtgacttaggttctaatgggacaaattctcttgaacttcagaaagtatcaggtaatcagcagattgtaggacagcctcagattgctattactggacatgatcaggggctgttagttcaagaaccagatggactaatggttgcaactccagctcagacgcttaccgacactcttgatgacctgatagcagctgtgagtaccagagtgcccactggttccaacagttcttctcagaccacagagtgtcttacacctgaatcctgttcgcagactacaagcaatgtggcttcccaatcgatgcctcctgtgtatccttcagttgacattgatgcacatactgagagcaatcatgacacagcattaacactagcttgtgcaggtggtcatgaagaacttgtatctgtgctcattgcacgggatgccaaaattgaacacagagacaaaaaaggtttcacaccactaatcctggcagcaacagcagggcatgttggagttgttgaaatccttttggataaaggtggagatatagaagcacagtctgaacgaactaaggatactccgctttcattggcatgttctggtggacgtcaggaggtggtagacttgctgctggctcgaggtgcaaataaagaacataggaacgtatctgattatacaccactgagtctagctgcgtctggaggatatgttaatatcattaagattctgcttaatgctggggcagaaattaattcaaggactgggagtaaactaggtatttctcccctgatgttggctgcaatgaatggacatgttcctgcagtaaaattgctgctcgatatgggttcagacattaatgcccaaatagagaccaatcggaacacggctctcaccctggcctgtttccagggccgagcagaagtagtgagtttgcttctggaccgaaaagccaatgttgaacatagggcaaagacgggtcttacccccttgatggaagcagcttctggagggtatgcagaggttggaagagttcttcttgataaaggagcagatgttaatgctccccctgtgccttcctcaagagatactgctttaacaatagcagcagacaaaggtcactacaaattttgtgaactcctgattcataggggagcccacattgatgttcgtaacaaaaagggaaatacgccactttggctggcatccaatggaggtcattttgatgttgtgcagttgctagtgcaagcaggtgctgatgtggatgcagcagataaccggaaaatcacacctcttatgtcagcatttcgcaagggtcatgtaaaagttgttcaatatttggtaaaggaagtaaatcagttcccttctgatatagaatgcatgagatacatagcaacaattacagataaggaactgttgaaaaaatgtcatcaatgtgtcgaaaccattgtgaaggctaaagaccagcaagctgcagaagcaaataagaatgcgagtattcttttaaaggaacttgatctggaaaagtcaagagaagagagcagaaagcaggctcttgctgctaaaagagaaaaaagaaaagaaaagagaaaaaagaaaaaagaggaacagaaaaggaaacaggaagaagatgaagaaaacaaacctaaggagaattcggaactaccagaggatgaagatgaagaggagaatgatgaagatgtggagcaagaagttcccatagaacctcctagtgcaaccaccaccactacgattggaatctctgcaacatctgcaacattcacaaatgtgtttgggaaaaaaagggccaatgtggtgacaactcccagcaccaatcggaaaaataagaagaacaaaacaaaagaaacccctcctacagcacatttaattttaccagaacaacatatgtctttagcccaacaaaaggcagataaaaataaaataaatggagaacctagaggtggtggtgcaggtgggaatagtgattcagataacttggacagcacagactgcaacagtgagagtagcagtggtggtaaaagccaagagttaaattttgtgatggatgtgaattcctctaaatacccctcactgctccttcattcccaagaagaaaagacaagtactgctacttccaaaactcagacacgacttgaaggtgaagtgactcctaattccttgtcaaccagctacaagacagtgtcattgccattaagctctccaaacataaagctgaatctcactagccctaaaaggggtcagaaaagagaagaagggtggaaagaagttgtacgaaggtcaaagaaattgtctgttccagcctcagtggtgtcgaggataatgggaagaggaggatgcaacatcactgcaatacaggatgttactggtgcccatattgatgtggataaacaaaaagataagaatggcgagagaatgatcacaataaggggtggcacagaatcaacaagatatgcagttcaactaatcaatgcactcattcaagatcctgctaaggaactggaagacttgattcctaaaaatcatatcagaacacctgccagcaccaaatcaattcatgctaacttctcatctggagtaggtaccacagcagcttccagtaaaaatgcatttcctttgggtgctccaactcttgtaacttcacaggcaacaacgttatctacgttccagcccgctaataaacttaataagaatgttccaacaaatgtacgttcttctttcccagtttctctacccttagcttatcctcaccctcattttgccctgctggctgctcaaactatgcaacagattcggcatcctcgcttacccatggcccagtttggaggaaccttctcaccttctcctaacacatggggaccattcccagtgagacctgtgaatcctggcaacacaaatagctctccaaagcataataacacaagccgtctacctaaccagaacgggactgttttaccctcagagtctgctggactagctactgccagttgtcctatcactgtctcttctgtagttgctgccagtcagcaactgtgtgtcactaatacccggactccttcatcagtcagaaagcagttgtttgcctgtgtgcctaagacaagtcctccagcaacagtgatttcttctgtgacaagcacttgtagttccctgccttctgtctcctctgcacctatcactagcgggcaagctcccaccacatttctacctgcaagtacttctcaagcacagctttcttcacaaaagatggagtctttctctgctgtgccacccaccaaagagaaagtgtccacacaggaccagcccatggcaaacctatgtaccccatcttcaactgcaaacagttgcagtagctctgccagcaacaccccgggagctccagaaactcacccatccagtagtcccactcctacttccagtaacacacaagaggaggcacagccatccagtgtgtctgatttaagtcctatgtcaatgcctgcgacactttatcgtgctgacgtgaatgctcaatcgagcaggttatgcggtaagtgcaaaaggcatgacataagacctaaatcagacacactggatggctgtgcgtcctttgtgtgttactggaagtaggagtgggactactggatgggtgagttttgagctcccgggggtgctgc

SEQ ID NO: 375987 - DNA, 6836 bp, Homo sapiens
  misc_feature (4693)..(4693): n is a, c, g, or t
  misc_feature (4764)..(4764): n is a, c, g, or t
gtcttcccccatctccataaattattctacctagctgctcagacaaaaattctgggccacatctgatttctttctttttctcaccacccctcatatcaaaactactagcagattccatcttctctacctccacaatatatactgaaattgtctatgtttccagctactgatagcctagactaagctagcctagactagaataaattataataactcttctaactggtctccatgcctccagttttgacctgttggctgctcaaactatgcaactgattcagataacttggacagcacagactgcaacagtgagagtagcagtggtggtaaaagccaagagttaaattttgtgatggatgtgaattcctctaaatacccctcactgctccttcattcccaagaagaaaagacaagtactgctacttccaaaactcagacacgacttgaaggtgaagtgactcctaattccttgtcaaccagctacaagacagtgtcattgccattaagctctccaaacataaagctgaatctcactagccctaaaaggggtcagaaaagagaagaagggtggaaagaagttgtacgaaggtcaaagaaattgtctgttccagcctcagtggtgtcgaggataatgggaagaggaggatgcaacatcactgcaatacaggatgttactggtgcccatattgatgtggataaacaaaaagataagaatggcgagagaatgatcacaataaggggtggcacagaatcaacaagatatgcagttcaactaatcaatgcactcattcaagatcctgctaaggaactggaagacttgattcctaaaaatcatatcagaacacctgccagcaccaaatcaattcatgctaacttctcatctggagtaggtaccacagcagcttccagtaaaaatgcatttcctttgggtgctccaactcttgtaacttcacaggcaacaacgttatctacgttccagcccgctaataaacttaataagaatgttccaacaaatgtacgttcttctttcccagtttctctacccttagcttatcctcaccctcattttgccctgctggctgctcaaactatgcaacagattcggcatcctcgcttacccatggcccagtttggaggaaccttctcaccttctcctaacacatggggaccattcccagtgagacctgtgaatcctggcaacacaaatagctctccaaagcataataacacaagccgtctacctaaccagaacgggactgttttaccctcagagtctgctggactagctactgccagttgtcctatcactgtctcttctgtagttgctgccagtcagcaactgtgtgtcactaatacccggactccttcatcagtcagaaagcagttgtttgcctgtgtgcctaagacaagtcctccagcaacagtgatttcttctgtgacaagcacttgtagttccctgccttctgtctcctctgcacctatcactagcgggcaagctcccaccacatttctacctgcaagtacttctcaagcacagctttcttcacaaaagatggagtctttctctgctgtgccacccaccaaagagaaagtgtccacacaggaccagcccatggcaaacctatgtaccccatcttcaactgcaaacagttgcagtagctctgccagcaacaccccgggagctccagaaactcacccatccagtagtcccactcctacttccagtaacacacaagaggaggcacagccatccagtgtgtctgatttaagtcctatgtcaatgccttttgcatctaactcagaacctgctccattgactttgacatcacccagaatggttgctgctgataatcaggacaccagtaatttacctcagttagctgtaccagcacctcgagtttctcatcgaatgcagcccagaggttctttttactccatggtaccaaatgcaactattcaccaggatccccagtctatttttgttacgaatccagttactttaacaccacctcaaggcccaccagctgcagtgcagctttcttcagctgtgaacattatgaatggttctcagatgcacataaacccagcaaataagtctttgccacctacatttggcccagccacacttttcaatcacttcagcagtctttttgatagtagtcaggtgccagctaaccagggctggggagatggtccactgtcctcacgagttgctacagatgcctctttcactgttcagtcagcgttcctgggtaactcagtgcttggacacttggaaaacatgcaccctgataactcaaaggcacctggcttcagaccaccttcccagcgagtttctactagtccagttgggttaccatccattgacccatcaggcagctccccatcttcctcttctgctcctctggcaagtttttccggcataccaggaacaagggttttcctgcaagggccagctcctgttgggactcctagtttcaacagacaacatttttctccccatccttggacaagcgcctcaaactcatgtgactctcctattccatctgtttcttcgggatcatcttcacctctttcagccacttctgccccaccaacgttgggccaaccaaaaggagtcagtgccagtcaagatcgaaagatacctcccccaattggaacagagagactggcccgaattcggcaaggagggtctgttgcacaagccccggcggggaccagttttgtcgctcccgttggacacagtggaatctggtcatttggtgtcaatgctgtgtcagaaggcttatcaggttggtcgcaatctgtgatggggaaccatccaatgcatcaacaattatcagacccaagcacattctcccaacatcagccaatggagagagatgattctggaatggtagccccctctaacatttttcatcagcctatggcaagtggttttgtggatttttctaaaggtctgccaatttccatgtatggaggcaccataataccctctcatcctcagcttgctgatgttccaggaggccctctgtttaatggacttcacaatccagatcctgcttggaaccctatgataaaagttatccaaaattcaactgaatgcactgatgcccagcaggtaaaatgggcttaatgctcttttgttttttagatttgtcacatcattctttttgttttgtgagaagtataagtactgaatatcaaaagtcataattgaccatttcgatctggattgctttttcaatatcaagatgatgctactgaacactttatttaatatatgtgtattcttcctaggcagaaacagtgaattgccattgcatttatatattcattttgtaactgtctaaagattcctaattagaaattccaatttttcctcccccttttcagatttggcctggcacgtgggcacctcatattggaaacatgcatctcaaatatgtcaactaagttagaaggtctttactctttagccttgtttaagaaacctatgaccttggaagaaccatggggatttttttttaatgtgcctaagaaattttctctgaggctttagcaatggaaatttgattgcccattgtataagaacaaattgatttcctatccacctgattatgttctctggttagtttagccattttgaacttaagatcatatgaccttagtgcttttggctaaacatacagaatactacttgtatgcagaagagaattagttgattacatgtttcaaccttttagggtgataaatacatgtataattgtttacatacttaaaaggaaaaagttgagtaaatttcttgtcatatagtggctctacgtaatgtagcctgtattaatgtgaaatatttaccagaatattcaataaaaagatgaacagtctttagaagtggggtgtgatcctttcagtggtcatgcaggtaccactcaatccacattatattgaaccagatggttaatactatatttgtaacaggcttctcacatttaacacttgagtcccttcttagactgccttaaaaaagcacttttaagactatttacctatttattctgtgttaaacattccttgttcccttgttgtcttccataatcctttaacatatgagaaagtttcaagctctggcaatgtgtcttatctgactttagctagcagataggccactgataggttttttctctatggatcatgagaatgtcaataagaacaattggatttaaatcagatgacactaaacaaatgtagggacacccaaattatcaacttcaggttccttctgtgcttcctgaccttttttatctgaaagatttgtctggttatagatattttaagctttatatgagttgggacataaggaggtgactcctgtcattctgttgtattattgaatcagctgagtaatatttataaatatgtgagtaattccaggcttagttccatggccctaagcatggagagtcaatatgtttaacaagctaaacagaggaaccctggaatgggctgctttggccaaaccataggctatgccgagaatcagcatagagaaggaaaagttatcccactgaaaagtatagtcatcaacttatttgtgttttaatatagctgaatttttcctggtcagtataggcaatacagaaaagaaaacaagaaaatgtttggagctgatggagaagccaaaactcatatnaaggcaaagaaggatgcacagagaaagagtagtaactagggacagaactatattagcagcacctttctacncttatgccaacaggaattcttaattttctctgcccaggtcctaaagccaggaccacatcagacacaccatgtttgttctgtgtcagatatacctgcttctttaatcttctatatcatcttacatatgagaaagcttccttaattaagcttatgtcttatgttttgttttgaatggattttgaaagtgttgtttattgaagctactactttgtagtgattgataaccacatcaagtatcattaaggggccccttgacctttgtgggggcagttgggtggggcacaaaagactccttggatcacctgtgtatcttgctgtttccacttaccattaacagcaacaagaaaaatcacctaaaattggtgaaatgaatgaaactactcttgatgaaatatatactagtgagaaataatattaaataaattattcagtgggacaaaaaggtgagttttattctatcttaactgtctacaatacatttgaattgtctggaggagccttaagtccatattctgcaccttgaggacaaccaaatgagaaattttatttcaggtcagtaagtagaatttatgaagagaaaggagataattatgaggaatccctaggaaaattgggaggaaaacaacagttgtatagttgggagtagttctttaggatacgctcctcccttccttcttaccagcacttccttcctttctttctgactatttggatcccagtagcctgctcccaacctcatttcacctgctaaatctcttcttcctctgcctgcctcttcctggcactactttactgctattttaccaacctgaacatttggataaaacctagctcaggtaagaacttaattactttcaaaatatacaagggatatgggaggagacagcatggatacagtggagcagtagtcagtagtcagagcctaaattctattttcatttctgccgcttgaagctttatggccttaggcaaatcatctcacctttctgggtttcacttttctcatctgaaattgaactcaagagtcttctagttctaacacaggatttcttcttgtgaatgagaatataagatatggaaatatttgaagccattagattgtttacagtgctgagatttgagagcccctagcattggttctgataaggaatcgaaataaatcctgccattattatgggggccagtattgagattttagtggaggcagaagaagaccttgcacatctttagtgagccttcaagttgtgaagaaacatcctgctaaggtatagatcaaacccagtgaaatgaaactataggaatgaaactacatcatcaaggtttctggacccacttatttcaacttgtgttcaatgtaataaaattccgctaccaataaaattattaatgttttaagaccctttaaacctattgtggctacagtgtgctgacttgcccttttataggccagtctgcttccttcagtccctgctctcaaaggggaaatcccatcacctcagctaaccagaccgaagaagagaattggacggccgatggtggcctctcctaaccagaggcaccaggatcatctacgaccgaaagttcctgctggagtgcaagaactcacccattgcccggacacccccctgctgcctccctcagattcccggggtcacaactcctccaacagcccctctctccaagctggaggagctgaaggagcaggagacagaggaagagatacccgatgacgcacaatttgaaatggacatctaatccagtgcagatgacctggcatgtggagttacagagggatccctcatgccactgctgccaccacctcttcctggggcatccaaaggccagctggcctcatctaatctggaagggagtgacttgttagttccaggcctcctttagttctgaggcagctagaccagggataggagtgggcaacttgccaagcccttaactctacttcctcttcagtctgtggtactcctcctaaccctaaaccctctatgctcaggggctggaactggggaatggagtaagtcaccttctgactgcttagtaaacattcaaagaaaaaa

SEQ ID NO: 375988 - DNA, 6596 bp, Homo sapiens
  misc_feature (13)..(13): n is a, c, g, or t
  misc_feature (16)..(16): n is a, c, g, or t
  misc_feature (22)..(22): n is a, c, g, or t
  misc_feature (24)..(24): n is a, c, g, or t
  misc_feature (31)..(31): n is a, c, g, or t
  misc_feature (4453)..(4453): n is a, c, g, or t
  misc_feature (4524)..(4524): n is a, c, g, or t
ggaactacttctnttncttctncngcttctnctgttgcagtgtgcttccgcggaagcacactgcaacagtgagagtagcagtggtggtaaaagccaagagttaaattttgtgatggatgtgaattcctctaaatacccctcactgctccttcattcccaagaagaaaagacaagtactgctacttccaaaactcagacacgacttgaaggtgaagtgactcctaattccttgtcaaccagctacaagacagtgtcattgccattaagctctccaaacataaagctgaatctcactagccctaaaaggggtcagaaaagagaagaagggtggaaagaagttgtacgaaggtcaaagaaattgtctgttccagcctcagtggtgtcgaggataatgggaagaggaggatgcaacatcactgcaatacaggatgttactggtgcccatattgatgtggataaacaaaaagataagaatggcgagagaatgatcacaataaggggtggcacagaatcaacaagatatgcagttcaactaatcaatgcactcattcaagatcctgctaaggaactggaagacttgattcctaaaaatcatatcagaacacctgccagcaccaaatcaattcatgctaacttctcatctggagtaggtaccacagcagcttccagtaaaaatgcatttcctttgggtgctccaactcttgtaacttcacaggcaacaacgttatctacgttccagcccgctaataaacttaataagaatgttccaacaaatgtacgttcttctttcccagtttctctacccttagcttatcctcaccctcattttgccctgctggctgctcaaactatgcaacagattcggcatcctcgcttacccatggcccagtttggaggaaccttctcaccttctcctaacacatggggaccattcccagtgagacctgtgaatcctggcaacacaaatagctctccaaagcataataacacaagccgtctacctaaccagaacgggactgttttaccctcagagtctgctggactagctactgccagttgtcctatcactgtctcttctgtagttgctgccagtcagcaactgtgtgtcactaatacccggactccttcatcagtcagaaagcagttgtttgcctgtgtgcctaagacaagtcctccagcaacagtgatttcttctgtgacaagcacttgtagttccctgccttctgtctcctctgcacctatcactagcgggcaagctcccaccacatttctacctgcaagtacttctcaagcacagctttcttcacaaaagatggagtctttctctgctgtgccacccaccaaagagaaagtgtccacacaggaccagcccatggcaaacctatgtaccccatcttcaactgcaaacagttgcagtagctctgccagcaacaccccgggagctccagaaactcacccatccagtagtcccactcctacttccagtaacacacaagaggaggcacagccatccagtgtgtctgatttaagtcctatgtcaatgccttttgcatctaactcagaacctgctccattgactttgacatcacccagaatggttgctgctgataatcaggacaccagtaatttacctcagttagctgtaccagcacctcgagtttctcatcgaatgcagcccagaggttctttttactccatggtaccaaatgcaactattcaccaggatccccagtctatttttgttacgaatccagttactttaacaccacctcaaggcccaccagctgcagtgcagctttcttcagctgtgaacattatgaatggttctcagatgcacataaacccagcaaataagtctttgccacctacatttggcccagccacacttttcaatcacttcagcagtctttttgatagtagtcaggtgccagctaaccagggctggggagatggtccactgtcctcacgagttgctacagatgcctctttcactgttcagtcagcgttcctgggtaactcagtgcttggacacttggaaaacatgcaccctgataactcaaaggcacctggcttcagaccaccttcccagcgagtttctactagtccagttgggttaccatccattgacccatcaggcagctccccatcttcctcttctgctcctctggcaagtttttccggcataccaggaacaagggttttcctgcaagggccagctcctgttgggactcctagtttcaacagacaacatttttctccccatccttggacaagcgcctcaaactcatgtgactctcctattccatctgtttcttcgggatcatcttcacctctttcagccacttctgccccaccaacgttgggccaaccaaaaggagtcagtgccagtcaagatcgaaagatacctcccccaattggaacagagagactggcccgaattcggcaaggagggtctgttgcacaagccccggcggggaccagttttgtcgctcccgttggacacagtggaatctggtcatttggtgtcaatgctgtgtcagaaggcttatcaggttggtcgcaatctgtgatggggaaccatccaatgcatcaacaattatcagacccaagcacattctcccaacatcagccaatggagagagatgattctggaatggtagccccctctaacatttttcatcagcctatggcaagtggttttgtggatttttctaaaggtctgccaatttccatgtatggaggcaccataataccctctcatcctcagcttgctgatgttccaggaggccctctgtttaatggacttcacaatccagatcctgcttggaaccctatgataaaagttatccaaaattcaactgaatgcactgatgcccagcaggtaaaatgggcttaatgctcttttgttttttagatttgtcacatcattctttttgttttgtgagaagtataagtactgaatatcaaaagtcataattgaccatttcgatctggattgctttttcaatatcaagatgatgctactgaacactttatttaatatatgtgtattcttcctaggcagaaacagtgaattgccattgcatttatatattcattttgtaactgtctaaagattcctaattagaaattccaatttttcctcccccttttcagatttggcctggcacgtgggcacctcatattggaaacatgcatctcaaatatgtcaactaagttagaaggtctttactctttagccttgtttaagaaacctatgaccttggaagaaccatggggatttttttttaatgtgcctaagaaattttctctgaggctttagcaatggaaatttgattgcccattgtataagaacaaattgatttcctatccacctgattatgttctctggttagtttagccattttgaacttaagatcatatgaccttagtgcttttggctaaacatacagaatactacttgtatgcagaagagaattagttgattacatgtttcaaccttttagggtgataaatacatgtataattgtttacatacttaaaaggaaaaagttgagtaaatttcttgtcatatagtggctctacgtaatgtagcctgtattaatgtgaaatatttaccagaatattcaataaaaagatgaacagtctttagaagtggggtgtgatcctttcagtggtcatgcaggtaccactcaatccacattatattgaaccagatggttaatactatatttgtaacaggcttctcacatttaacacttgagtcccttcttagactgccttaaaaaagcacttttaagactatttacctatttattctgtgttaaacattccttgttcccttgttgtcttccataatcctttaacatatgagaaagtttcaagctctggcaatgtgtcttatctgactttagctagcagataggccactgataggttttttctctatggatcatgagaatgtcaataagaacaattggatttaaatcagatgacactaaacaaatgtagggacacccaaattatcaacttcaggttccttctgtgcttcctgaccttttttatctgaaagatttgtctggttatagatattttaagctttatatgagttgggacataaggaggtgactcctgtcattctgttgtattattgaatcagctgagtaatatttataaatatgtgagtaattccaggcttagttccatggccctaagcatggagagtcaatatgtttaacaagctaaacagaggaaccctggaatgggctgctttggccaaaccataggctatgccgagaatcagcatagagaaggaaaagttatcccactgaaaagtatagtcatcaacttatttgtgttttaatatagctgaatttttcctggtcagtataggcaatacagaaaagaaaacaagaaaatgtttggagctgatggagaagccaaaactcatatnaaggcaaagaaggatgcacagagaaagagtagtaactagggacagaactatattagcagcacctttctacncttatgccaacaggaattcttaattttctctgcccaggtcctaaagccaggaccacatcagacacaccatgtttgttctgtgtcagatatacctgcttctttaatcttctatatcatcttacatatgagaaagcttccttaattaagcttatgtcttatgttttgttttgaatggattttgaaagtgttgtttattgaagctactactttgtagtgattgataaccacatcaagtatcattaaggggccccttgacctttgtgggggcagttgggtggggcacaaaagactccttggatcacctgtgtatcttgctgtttccacttaccattaacagcaacaagaaaaatcacctaaaattggtgaaatgaatgaaactactcttgatgaaatatatactagtgagaaataatattaaataaattattcagtgggacaaaaaggtgagttttattctatcttaactgtctacaatacatttgaattgtctggaggagccttaagtccatattctgcaccttgaggacaaccaaatgagaaattttatttcaggtcagtaagtagaatttatgaagagaaaggagataattatgaggaatccctaggaaaattgggaggaaaacaacagttgtatagttgggagtagttctttaggatacgctcctcccttccttcttaccagcacttccttcctttctttctgactatttggatcccagtagcctgctcccaacctcatttcacctgctaaatctcttcttcctctgcctgcctcttcctggcactactttactgctattttaccaacctgaacatttggataaaacctagctcaggtaagaacttaattactttcaaaatatacaagggatatgggaggagacagcatggatacagtggagcagtagtcagtagtcagagcctaaattctattttcatttctgccgcttgaagctttatggccttaggcaaatcatctcacctttctgggtttcacttttctcatctgaaattgaactcaagagtcttctagttctaacacaggatttcttcttgtgaatgagaatataagatatggaaatatttgaagccattagattgtttacagtgctgagatttgagagcccctagcattggttctgataaggaatcgaaataaatcctgccattattatgggggccagtattgagattttagtggaggcagaagaagaccttgcacatctttagtgagccttcaagttgtgaagaaacatcctgctaaggtatagatcaaacccagtgaaatgaaactataggaatgaaactacatcatcaaggtttctggacccacttatttcaacttgtgttcaatgtaataaaattccgctaccaataaaattattaatgttttaagaccctttaaacctattgtggctacagtgtgctgacttgcccttttataggccagtctgcttccttcagtccctgctctcaaaggggaaatcccatcacctcagctaaccagaccgaagaagagaattggacggccgatggtggcctctcctaaccagaggcaccaggatcatctacgaccgaaagttcctgctggagtgcaagaactcacccattgcccggacacccccctgctgcctccctcagattcccggggtcacaactcctccaacagcccctctctccaagctggaggagctgaaggagcaggagacagaggaagagatacccgatgacgcacaatttgaaatggacatctaatccagtgcagatgacctggcatgtggagttacagagggatccctcatgccactgctgccaccacctcttcctggggcatccaaaggccagctggcctcatctaatctggaagggagtgacttgttagttccaggcctcctttagttctgaggcagctagaccagggataggagtgggcaacttgccaagcccttaactctacttcctcttcagtctgtggtactcctcctaaccctaaaccctctatgctcaggggctggaactggggaatggagtaagtcaccttctgactgcttagtaaacattcaaagaaaaaa

SEQ ID NO: 375989 - DNA, 6590 bp, Homo sapiens
  misc_feature (4447)..(4447): n is a, c, g, or t
  misc_feature (4518)..(4518): n is a, c, g, or t
agagcactggcccgagagctgagagcctgttgcagtgtgcttcccggaagcacactgcaacagtgagagtagcagtggtggtaaaagccaagagttaaattttgtgatggatgtgaattcctctaaatacccctcactgctccttcattcccaagaagaaaagacaagtactgctacttccaaaactcagacacgacttgaaggtgaagtgactcctaattccttgtcaaccagctacaagacagtgtcattgccattaagctctccaaacataaagctgaatctcactagccctaaaaggggtcagaaaagagaagaagggtggaaagaagttgtacgaaggtcaaagaaattgtctgttccagcctcagtggtgtcgaggataatgggaagaggaggatgcaacatcactgcaatacaggatgttactggtgcccatattgatgtggataaacaaaaagataagaatggcgagagaatgatcacaataaggggtggcacagaatcaacaagatatgcagttcaactaatcaatgcactcattcaagatcctgctaaggaactggaagacttgattcctaaaaatcatatcagaacacctgccagcaccaaatcaattcatgctaacttctcatctggagtaggtaccacagcagcttccagtaaaaatgcatttcctttgggtgctccaactcttgtaacttcacaggcaacaacgttatctacgttccagcccgctaataaacttaataagaatgttccaacaaatgtacgttcttctttcccagtttctctacccttagcttatcctcaccctcattttgccctgctggctgctcaaactatgcaacagattcggcatcctcgcttacccatggcccagtttggaggaaccttctcaccttctcctaacacatggggaccattcccagtgagacctgtgaatcctggcaacacaaatagctctccaaagcataataacacaagccgtctacctaaccagaacgggactgttttaccctcagagtctgctggactagctactgccagttgtcctatcactgtctcttctgtagttgctgccagtcagcaactgtgtgtcactaatacccggactccttcatcagtcagaaagcagttgtttgcctgtgtgcctaagacaagtcctccagcaacagtgatttcttctgtgacaagcacttgtagttccctgccttctgtctcctctgcacctatcactagcgggcaagctcccaccacatttctacctgcaagtacttctcaagcacagctttcttcacaaaagatggagtctttctctgctgtgccacccaccaaagagaaagtgtccacacaggaccagcccatggcaaacctatgtaccccatcttcaactgcaaacagttgcagtagctctgccagcaacaccccgggagctccagaaactcacccatccagtagtcccactcctacttccagtaacacacaagaggaggcacagccatccagtgtgtctgatttaagtcctatgtcaatgccttttgcatctaactcagaacctgctccattgactttgacatcacccagaatggttgctgctgataatcaggacaccagtaatttacctcagttagctgtaccagcacctcgagtttctcatcgaatgcagcccagaggttctttttactccatggtaccaaatgcaactattcaccaggatccccagtctatttttgttacgaatccagttactttaacaccacctcaaggcccaccagctgcagtgcagctttcttcagctgtgaacattatgaatggttctcagatgcacataaacccagcaaataagtctttgccacctacatttggcccagccacacttttcaatcacttcagcagtctttttgatagtagtcaggtgccagctaaccagggctggggagatggtccactgtcctcacgagttgctacagatgcctctttcactgttcagtcagcgttcctgggtaactcagtgcttggacacttggaaaacatgcaccctgataactcaaaggcacctggcttcagaccaccttcccagcgagtttctactagtccagttgggttaccatccattgacccatcaggcagctccccatcttcctcttctgctcctctggcaagtttttccggcataccaggaacaagggttttcctgcaagggccagctcctgttgggactcctagtttcaacagacaacatttttctccccatccttggacaagcgcctcaaactcatgtgactctcctattccatctgtttcttcgggatcatcttcacctctttcagccacttctgccccaccaacgttgggccaaccaaaaggagtcagtgccagtcaagatcgaaagatacctcccccaattggaacagagagactggcccgaattcggcaaggagggtctgttgcacaagccccggcggggaccagttttgtcgctcccgttggacacagtggaatctggtcatttggtgtcaatgctgtgtcagaaggcttatcaggttggtcgcaatctgtgatggggaaccatccaatgcatcaacaattatcagacccaagcacattctcccaacatcagccaatggagagagatgattctggaatggtagccccctctaacatttttcatcagcctatggcaagtggttttgtggatttttctaaaggtctgccaatttccatgtatggaggcaccataataccctctcatcctcagcttgctgatgttccaggaggccctctgtttaatggacttcacaatccagatcctgcttggaaccctatgataaaagttatccaaaattcaactgaatgcactgatgcccagcaggtaaaatgggcttaatgctcttttgttttttagatttgtcacatcattctttttgttttgtgagaagtataagtactgaatatcaaaagtcataattgaccatttcgatctggattgctttttcaatatcaagatgatgctactgaacactttatttaatatatgtgtattcttcctaggcagaaacagtgaattgccattgcatttatatattcattttgtaactgtctaaagattcctaattagaaattccaatttttcctcccccttttcagatttggcctggcacgtgggcacctcatattggaaacatgcatctcaaatatgtcaactaagttagaaggtctttactctttagccttgtttaagaaacctatgaccttggaagaaccatggggatttttttttaatgtgcctaagaaattttctctgaggctttagcaatggaaatttgattgcccattgtataagaacaaattgatttcctatccacctgattatgttctctggttagtttagccattttgaacttaagatcatatgaccttagtgcttttggctaaacatacagaatactacttgtatgcagaagagaattagttgattacatgtttcaaccttttagggtgataaatacatgtataattgtttacatacttaaaaggaaaaagttgagtaaatttcttgtcatatagtggctctacgtaatgtagcctgtattaatgtgaaatatttaccagaatattcaataaaaagatgaacagtctttagaagtggggtgtgatcctttcagtggtcatgcaggtaccactcaatccacattatattgaaccagatggttaatactatatttgtaacaggcttctcacatttaacacttgagtcccttcttagactgccttaaaaaagcacttttaagactatttacctatttattctgtgttaaacattccttgttcccttgttgtcttccataatcctttaacatatgagaaagtttcaagctctggcaatgtgtcttatctgactttagctagcagataggccactgataggttttttctctatggatcatgagaatgtcaataagaacaattggatttaaatcagatgacactaaacaaatgtagggacacccaaattatcaacttcaggttccttctgtgcttcctgaccttttttatctgaaagatttgtctggttatagatattttaagctttatatgagttgggacataaggaggtgactcctgtcattctgttgtattattgaatcagctgagtaatatttataaatatgtgagtaattccaggcttagttccatggccctaagcatggagagtcaatatgtttaacaagctaaacagaggaaccctggaatgggctgctttggccaaaccataggctatgccgagaatcagcatagagaaggaaaagttatcccactgaaaagtatagtcatcaacttatttgtgttttaatatagctgaatttttcctggtcagtataggcaatacagaaaagaaaacaagaaaatgtttggagctgatggagaagccaaaactcatatnaaggcaaagaaggatgcacagagaaagagtagtaactagggacagaactatattagcagcacctttctacncttatgccaacaggaattcttaattttctctgcccaggtcctaaagccaggaccacatcagacacaccatgtttgttctgtgtcagatatacctgcttctttaatcttctatatcatcttacatatgagaaagcttccttaattaagcttatgtcttatgttttgttttgaatggattttgaaagtgttgtttattgaagctactactttgtagtgattgataaccacatcaagtatcattaaggggccccttgacctttgtgggggcagttgggtggggcacaaaagactccttggatcacctgtgtatcttgctgtttccacttaccattaacagcaacaagaaaaatcacctaaaattggtgaaatgaatgaaactactcttgatgaaatatatactagtgagaaataatattaaataaattattcagtgggacaaaaaggtgagttttattctatcttaactgtctacaatacatttgaattgtctggaggagccttaagtccatattctgcaccttgaggacaaccaaatgagaaattttatttcaggtcagtaagtagaatttatgaagagaaaggagataattatgaggaatccctaggaaaattgggaggaaaacaacagttgtatagttgggagtagttctttaggatacgctcctcccttccttcttaccagcacttccttcctttctttctgactatttggatcccagtagcctgctcccaacctcatttcacctgctaaatctcttcttcctctgcctgcctcttcctggcactactttactgctattttaccaacctgaacatttggataaaacctagctcaggtaagaacttaattactttcaaaatatacaagggatatgggaggagacagcatggatacagtggagcagtagtcagtagtcagagcctaaattctattttcatttctgccgcttgaagctttatggccttaggcaaatcatctcacctttctgggtttcacttttctcatctgaaattgaactcaagagtcttctagttctaacacaggatttcttcttgtgaatgagaatataagatatggaaatatttgaagccattagattgtttacagtgctgagatttgagagcccctagcattggttctgataaggaatcgaaataaatcctgccattattatgggggccagtattgagattttagtggaggcagaagaagaccttgcacatctttagtgagccttcaagttgtgaagaaacatcctgctaaggtatagatcaaacccagtgaaatgaaactataggaatgaaactacatcatcaaggtttctggacccacttatttcaacttgtgttcaatgtaataaaattccgctaccaataaaattattaatgttttaagaccctttaaacctattgtggctacagtgtgctgacttgcccttttataggccagtctgcttccttcagtccctgctctcaaaggggaaatcccatcacctcagctaaccagaccgaagaagagaattggacggccgatggtggcctctcctaaccagaggcaccaggatcatctacgaccgaaagttcctgctggagtgcaagaactcacccattgcccggacacccccctgctgcctccctcagattcccggggtcacaactcctccaacagcccctctctccaagctggaggagctgaaggagcaggagacagaggaagagatacccgatgacgcacaatttgaaatggacatctaatccagtgcagatgacctggcatgtggagttacagagggatccctcatgccactgctgccaccacctcttcctggggcatccaaaggccagctggcctcatctaatctggaagggagtgacttgttagttccaggcctcctttagttctgaggcagctagaccagggataggagtgggcaacttgccaagcccttaactctacttcctcttcagtctgtggtactcctcctaaccctaaaccctctatgctcaggggctggaactggggaatggagtaagtcaccttctgactgcttagtaaacattcaaagaaaaaa

SEQ ID NO: 375990 - DNA, 4154 bp, Homo sapiens
ttaaggcaggggctgatatagaacttggctgctccacacctctgatggaggcatctcaggagggacacctggaattggttaaatatttgctggcttctggcgctaatgtgcatgctacaacagcaacaggagacacagccttaacctatgcttgtgaaaatggacatacggatgttgcagatgttttacttcaagcaggggctgatttagaacatgaatctgaaggtggaagaacacctttgatgaaagctgcaagagctggtcatttgtgcactgtgcagtttcttattagcaaaggtgccaatgttaacagggctacagccaataatgatcatacagtagtgtcgctggcatgtgcaggaggccacctggcagttgttgagcttctcttggctcatggggctgaccctactcatcgactcaaggatggttcaacaatgctcattgaagctgcaaagggtggccatactaatgtagtttcttatctgttggattatccaaataatgttctgtcagttcccaccacagatgtgtctcagctccctccaccttctcaagatcagtctcaggtgccacgtgtgccaacgcatacacttgccatggttgtacctccccaggaacctgacagaacttcacaggagaactctcctgcccttttaggagtgcaaaaaggtacatccaagcagaagtccagttccctccaggtagcagatcaggacctactgccatcttttcacccataccagcctttggagtgcatagtagaggagactgaaggcaagctgaatgaactgggacaaagaattagtgctattgaaaaagcacagcttaagtcactggagttaattcaaggtgaacctctgaacaaagataagatagaagaacttaaaaagaacagagaagagcaagtccagaagaagaagaaaatattgaaagaactgcagaaagtggaaaggcagttgcagatgaaaacacagcagcaatttaccaaagaatacttggaaaccaaaggtcagaaagacacagtgtctctacaccaacagtgctctcatagaggagtcttcccagaaggggaaggagatggtagtctcccagaggatcacttttcagagttacctcaggttgacacaatcttatttaaagataatgatgttgatgatgagcaacagtctccaccatcggcagaacagattgattttgtcccagtccagcctttatcatctccacagtgtaacttttccagtgacttaggttctaatgggacaaattctcttgaacttcagaaagtatcaggtaatcagcagattgtaggacagcctcagattgctattactggacatgatcaggggctgttagttcaagaaccagatggactaatggttgcaactccagctcagacgcttaccgacactcttgatgacctgatagcagctgtgagtaccagagtgcccactggttccaacagttcttctcagaccacagagtgtcttacacctgaatcctgttcgcagactacaagcaatgtggcttcccaatcgatgcctcctgtgtatccttcagttgacattgatgcacatactgagagcaatcatgacacagcattaacactagcttgtgcaggtggtcatgaagaacttgtatctgtgctcattgcacgggatgccaaaattgaacacagagacaaaaaaggtttcacaccactaatcctggcagcaacagcagggcatgttggagttgttgaaatccttttggataaaggtggagatatagaagcacagtctgaacgaactaaggatactccgctttcattggcatgttctggtggacgtcaggaggtggtagacttgctgctggctcgaggtgcaaataaagaacataggaacgtatctgattatacaccactgagtctagctgcgtctggaggatatgttaatatcattaagattctgcttaatgctggggcagaaattaattcaaggactgggagtaaactaggtatttctcccctgatgttggctgcaatgaatggacatgttcctgcagtaaaattgctgctcgatatgggttcagacattaatgcccaaatagagaccaatcggaacacggctctcaccctggcctgtttccagggccgagcagaagtagtgagtttgcttctggaccgaaaagccaatgttgaacatagggcaaagacgggtcttacccccttgatggaagcagcttctggagggtatgcagaggttggaagagttcttcttgataaaggagcagatgttaatgctccccctgtgccttcctcaagagatactgctttaacaatagcagcagacaaaggtcactacaaattttgtgaactcctgattcataggggagcccacattgatgttcgtaacaaaaagggaaatacgccactttggctggcatccaatggaggtcattttgatgttgtgcagttgctagtgcaagcaggtgctgatgtggatgcagcagataaccggaaaatcacacctcttatgtcagcatttcgcaagggtcatgtaaaagttgttcaatatttggtaaaggaagtaaatcagttcccttctgatatagaatgcatgagatacatagcaacaattacagataaggaactgttgaaaaaatgtcatcaatgtgtcgaaaccattgtgaaggctaaagaccagcaagctgcagaagcaaataagaatgcgagtattcttttaaaggaacttgatctggaaaagtcaagagaagagagcagaaagcaggctcttgctgctaaaagagaaaaaagaaaagaaaagagaaaaaagaaaaaagaggaacagaaaaggaaacaggaagaagatgaagaaaacaaacctaaggagaattcggaactaccagaggatgaagatgaagaggagaatgatgaagatgtggagcaagaagttcccatagaacctcctagtgcaaccaccaccactacgattggaatctctgcaacatctgcaacattcacaaatgtgtttgggaaaaaaagggccaatgtggtgacaactcccagcaccaatcggaaaaataagaagaacaaaacaaaagaaacccctcctacagcacatttaattttaccagaacaacatatgtctttagcccaacaaaaggcagataaaaataaaataaatggagaacctagaggtggtggtgcaggtgggaatagtgattcagataacttggacagcacagactgcaacagtgagagtagcagtggtggtaaaagccaagagttaaattttgtgatggatgtgaattcctctaaatacccctcactgctccttcattcccaagaagaaaagacaagtactgctacttccaaaactcagacacgacttgaaggtgaagtgactcctaattccttgtcaaccagctacaagacagtgtcattgccattaagctctccaaacataaagctgaatctcactagccctaaaaggggtcagaaaagagaagaagggtggaaagaagttgtacgaaggtcaaagaaattgtctgttccagcctcagtggtgtcgaggataatgggaagaggaggatgcaacatcactgcaatacaggatgttactggtgcccatattgatgtggataaacaaaaagataagaatggcgagagaatgatcacaataaggggtggcacagaatcaacaagatatgcagttcaactaatcaatgcactcattcaagatcctgctaaggaactggaagacttgattcctaaaaatcatatcagaacacctgccagcaccaaatcaattcatgctaacttctcatctggagtaggtaccacagcagcttccagtaaaaatgcatttcctttgggtgctccaactcttgtaacttcacaggcaacaacgttatctacgacaccactgagactggaacagacaatttctttgaccttcgtacaacttctttccacccttcttctcttgtctgaccccttttagggctagtgagattcagctttatgtttggagagcttaatggctatgacactgtcttgtagctggttgacaaggaacttaggagtcacttcacctgcaagtcgtgtctgagttttggatagtagcagtacttgtcttttcttcttgggaatgaaggtgcatgaggtatttaaa

SEQ ID NO: 375991 - DNA, 3662 bp, Homo sapiens
ttaaggcaggggctgatatagaacttggctgctccacacctctgatggaggcatctcaggagggacacctggaattggttaaatatttgctggcttctggcgctaatgtgcatgctacaacagcaacaggagacacagccttaacctatgcttgtgaaaatggacatacggatgttgcagatgttttacttcaagcaggggctgatttagaacatgaatctgaaggtggaagaacacctttgatgaaagctgcaagagctggtcatttgtgcactgtgcagtttcttattagcaaaggtgccaatgttaacagggctacagccaataatgatcatacagtagtgtcgctggcatgtgcaggaggccacctggcagttgttgagcttctcttggctcatggggctgaccctactcatcgactcaaggatggttcaacaatgctcattgaagctgcaaagggtggccatactaatgtagtttcttatctgttggattatccaaataatgttctgtcagttcccaccacagatgtgtctcagctccctccaccttctcaagatcagtctcaggtgccacgtgtgccaacgcatacacttgccatggttgtacctccccaggaacctgacagaacttcacaggagaactctcctgcccttttaggagtgcaaaaaggtacatccaagcagaagtccagttccctccaggtagcagatcaggacctactgccatcttttcacccataccagcctttggagtgcatagtagaggagactgaaggcaagctgaatgaactgggacaaagaattagtgctattgaaaaagcacagcttaagtcactggagttaattcaaggtgaacctctgaacaaagataagatagaagaacttaaaaagaacagagaagagcaagtccagaagaagaagaaaatattgaaagaactgcagaaagtggaaaggcagttgcagatgaaaacacagcagcaatttaccaaagaatacttggaaaccaaaggtcagaaagacacagtgtctctacaccaacagtgctctcatagaggagtcttcccagaaggggaaggagatggtagtctcccagaggatcacttttcagagttacctcaggttgacacaatcttatttaaagataatgatgttgatgatgagcaacagtctccaccatcggcagaacagattgattttgtcccagtccagcctttatcatctccacagtgtaacttttccagtgacttaggttctaatgggacaaattctcttgaacttcagaaagtatcaggtaatcagcagattgtaggacagcctcagattgctattactggacatgatcaggggctgttagttcaagaaccagatggactaatggttgcaactccagctcagacgcttaccgacactcttgatgacctgatagcagctgtgagtaccagagtgcccactggttccaacagttcttctcagaccacagagtgtcttacacctgaatcctgttcgcagactacaagcaatgtggcttcccaatcgatgcctcctgtgtatccttcagttgacattgatgcacatactgagagcaatcatgacacagcattaacactagcttgtgcaggtggtcatgaagaacttgtatctgtgctcattgcacgggatgccaaaattgaacacagagacaaaaaaggtttcacaccactaatcctggcagcaacagcagggcatgttggagttgttgaaatccttttggataaaggtggagatatagaagcacagtctgaacgaactaaggatactccgctttcattggcatgttctggtggacgtcaggaggtggtagacttgctgctggctcgaggtgcaaataaagaacataggaacgtatctgattatacaccactgagtctagctgcgtctggaggatatgttaatatcattaagattctgcttaatgctggggcagaaattaattcaaggactgggagtaaactaggtatttctcccctgatgttggctgcaatgaatggacatgttcctgcagtaaaattgctgctcgatatgggttcagacattaatgcccaaatagagaccaatcggaacacggctctcaccctggcctgtttccagggccgagcagaagtagtgagtttgcttctggaccgaaaagccaatgttgaacatagggcaaagacgggtcttacccccttgatggaagcagcttctggagggtatgcagaggttggaagagttcttcttgataaaggagcagatgttaatgctccccctgtgccttcctcaagagatactgctttaacaatagcagcagacaaaggtcactacaaattttgtgaactcctgattcataggggagcccacattgatgttcgtaacaaaaagggaaatacgccactttggctggcatccaatggaggtcattttgatgttgtgcagttgctagtgcaagcaggtgctgatgtggatgcagcagataaccggaaaatcacacctcttatgtcagcatttcgcaagggtcatgtaaaagttgttcaatatttggtaaaggaagtaaatcagttcccttctgatatagaatgcatgagatacatagcaacaattacagataaggaactgttgaaaaaatgtcatcaatgtgtcgaaaccattgtgaaggctaaagaccagcaagctgcagaagcaaataagaatgcgagtattcttttaaaggaacttgatctggaaaagtcaagagaagagagcagaaagcaggctcttgctgctaaaagagaaaaaagaaaagaaaagagaaaaaagaaaaaagaggaacagaaaaggaaacaggaagaagatgaagaaaacaaacctaaggagaattcggaactaccagaggatgaagatgaagaggagaatgatgaagatgtggagcaagaagttcccatagaacctcctagtgcaaccaccaccactacgattggaatctctgcaacatctgcaacattcacaaatgtgtttgggaaaaaaagggccaatgtggtgacaactcccagcaccaatcggaaaaataagaagaacaaaacaaaagaaacccctcctacagcacatttaattttaccagaacaacatatgtctttagcccaacaaaaggcagataaaaataaaataaatggagaacctagaggtggtggtgcaggtgggaatagtgattcagataacttggacagcacagactgcaacagtgagagtagcagtggtggtaaaagccaagagttaaattttgtgatggatgtgaattcctctaaatacccctcactgctccttcattcccaagaagaaaagacaagtactgctacttccaaaactcagacacgacttgaaggtgaagtgactcctaattccttgtcaaccagctacaagacagtgtcattgccattaagctctccaaacataaagctgaatctcactagccctaaaaggggtcagaaaagagaagaagggtggaaagaagttgtacgaaggtcaaagaaattgtctgttccagcctcagtggtgtcgaggataatgggaagaggaggatgcaacatcactgcaatacaggatgttaaaataaagggccaggcgcggtggctcacgcctataatcccagcactttgggaggccgaggtg

SEQ ID NO: 375992 - DNA, 3054 bp, Homo sapiens
ttaaggcaggggctgatatagaacttggctgctccacacctctgatggaggcatctcaggagggacacctggaattggttaaatatttgctggcttctggcgctaatgtgcatgctacaacagcaacaggagacacagccttaacctatgcttgtgaaaatggacatacggatgttgcagatgttttacttcaagcaggggctgatttagaacatgaatctgaaggtggaagaacacctttgatgaaagctgcaagagctggtcatttgtgcactgtgcagtttcttattagcaaaggtgccaatgttaacagggctacagccaataatgatcatacagtagtgtcgctggcatgtgcaggaggccacctggcagttgttgagcttctcttggctcatggggctgaccctactcatcgactcaaggatggttcaacaatgctcattgaagctgcaaagggtggccatactaatgtagtttcttatctgttggattatccaaataatgttctgtcagttcccaccacagatgtgtctcagctccctccaccttctcaagatcagtctcaggtgccacgtgtgccaacgcatacacttgccatggttgtacctccccaggaacctgacagaacttcacaggagaactctcctgcccttttaggagtgcaaaaaggtacatccaagcagaagtccagttccctccaggtagcagatcaggacctactgccatcttttcacccataccagcctttggagtgcatagtagaggagactgaaggcaagctgaatgaactgggacaaagaattagtgctattgaaaaagcacagcttaagtcactggagttaattcaaggtgaacctctgaacaaagataagatagaagaacttaaaaagaacagagaagagcaagtccagaagaagaagaaaatattgaaagaactgcagaaagtggaaaggcagttgcagatgaaaacacagcagcaatttaccaaagaatacttggaaaccaaaggtcagaaagacacagtgtctctacaccaacagtgctctcatagaggagtcttcccagaaggggaaggagatggtagtctcccagaggatcacttttcagagttacctcaggttgacacaatcttatttaaagataatgatgttgatgatgagcaacagtctccaccatcggcagaacagattgattttgtcccagtccagcctttatcatctccacagtgtaacttttccagtgacttaggttctaatgggacaaattctcttgaacttcagaaagtatcaggtaatcagcagattgtaggacagcctcagattgctattactggacatgatcaggggctgttagttcaagaaccagatggactaatggttgcaactccagctcagacgcttaccgacactcttgatgacctgatagcagctgtgagtaccagagtgcccactggttccaacagttcttctcagaccacagagtgtcttacacctgaatcctgttcgcagactacaagcaatgtggcttcccaatcgatgcctcctgtgtatccttcagttgacattgatgcacatactgagagcaatcatgacacagcattaacactagcttgtgcaggtggtcatgaagaacttgtatctgtgctcattgcacgggatgccaaaattgaacacagagacaaaaaaggtttcacaccactaatcctggcagcaacagcagggcatgttggagttgttgaaatccttttggataaaggtggagatatagaagcacagtctgaacgaactaaggatactccgctttcattggcatgttctggtggacgtcaggaggtggtagacttgctgctggctcgaggtgcaaataaagaacataggaacgtatctgattatacaccactgagtctagctgcgtctggaggatatgttaatatcattaagattctgcttaatgctggggcagaaattaattcaaggactgggagtaaactaggtatttctcccctgatgttggctgcaatgaatggacatgttcctgcagtaaaattgctgctcgatatgggttcagacattaatgcccaaatagagaccaatcggaacacggctctcaccctggcctgtttccagggccgagcagaagtagtgagtttgcttctggaccgaaaagccaatgttgaacatagggcaaagacgggtcttacccccttgatggaagcagcttctggagggtatgcagaggttggaagagttcttcttgataaaggagcagatgttaatgctccccctgtgccttcctcaagagatactgctttaacaatagcagcagacaaaggtcactacaaattttgtgaactcctgattcataggggagcccacattgatgttcgtaacaaaaagggaaatacgccactttggctggcatccaatggaggtcattttgatgttgtgcagttgctagtgcaagcaggtgctgatgtggatgcagcagataaccggaaaatcacacctcttatgtcagcatttcgcaagggtcatgtaaaagttgttcaatatttggtaaaggaagtaaatcagttcccttctgatatagaatgcatgagatacatagcaacaattacagataaggaactgttgaaaaaatgtcatcaatgtgtcgaaaccattgtgaaggctaaagaccagcaagctgcagaagcaaataagaatgcgagtattcttttaaaggaacttgatctggaaaagtcaagagaagagagcagaaagcaggctcttgctgctaaaagagaaaaaagaaaagaaaagagaaaaaagaaaaaagaggaacagaaaaggaaacaggaagaagatgaagagaagcgacactccaagaccaagagaagtttaggactttctgccgtgccagtgggagaggtcacagtgacatctgggcctcctcccagcataccatacgctggagcagcagcacctcccctgccacttcctgggccccacacagatgggcatagtgaaaaaaaaaagaaaacagaagagaaggacaaagagagagagagag

SEQ ID NO: 375993 - DNA, 332 bp, Homo sapiens
aatgttatttccatttagcttaaaatcattgactatttgtagattccccgactgtctaatcattagtctcaaaaattattgcttggtgaaagctttttttaaaaaaagcttcaggaaacaaaagtgcatttggtggtatatgaagataacctaaaacaggatatctgtttcatttatgggcctttgtcttattctttggtctgagatgatttttttctgagttgactttttaggtgccacgtgtgccaacgcatacacttgccatggttgtacctccccaggaacctgacagaacttcacaggagaactctcctgcccttttaggagtgcaa

SEQ ID NO: 375994 - DNA, 660 bp, Homo sapiens
ggctgtgttgatctagaggatcccgggaaactctgagtggcatccaatggaggtcattttgatgttgtgcagttgctagtgcaagcaggtgctgatgtggatgcagcagataaccggaaaatcacacctcttatgtcagcatttcgcaagggtcatgtaaaagttgttcaatatttggtaaaggaagtaaatcagttcccttctgatatagaatgcatgagatacatagcaacaattacagataagaacggtggaaaaaatgtcatcaatgtgtcgaaaccatggtcacagcccaaaaactccttaagctgataagcaagttcagcaaagtctgaggatacaaaatcaatgtgcaaaaatcacaagcattcttatacaccagcaatagacaatattcttcaattcctatacaccaataatagacaagagagccaaatcatgaatggactcccattcacaatggttacaaagagaataaaatacctaggaatacagctaatgatgggtgtgaagaacctcttcaaggagaactacaagccactgctcaaagaaataagagaggacacaacaaatggaaagtattccagctcatggtgggaagatcagtctcatgaaaatggcatactgccaagtaatatagattccgggtatccatcaata

SEQ ID NO: 375995 - DNA, 9248 bp, Homo sapiens
  misc_feature (7105)..(7105): n is a, c, g, or t
  misc_feature (7176)..(7176): n is a, c, g, or t
atcattttcttcagtctcggtgtgtatttgtaaccattaaccaacctctcttcattccctgcccttcctggcctctggtaaccactagtctactctccatcttcatgagatccacttttttagcatggcactctttcaaacatttttcatgtgcttaggtacatccaagcagaagtccagttccctccaggtagcagatcaggacctactgccatcttttcacccataccagcctttggagtgcatagtagaggagactgaaggcaagctgaatgaactgggacaaagaattagtgctattgaaaaagcacagcttaagtcactggagttaattcaaggtgaacctctgaacaaagataagatagaagaacttaaaaagaacagagaagagcaagtccagaagaagaagaaaatattgaaagaactgcagaaagtggaaaggcagttgcagatgaaaacacagcagcaatttaccaaagaatacttggaaaccaaaggtcagaaagacacagtgtctctacaccaacagtgctctcatagaggagtcttcccagaaggggaaggagatggtagtctcccagaggatcacttttcagagttacctcaggttgacacaatcttatttaaagataatgatgttgatgatgagcaacagtctccaccatcggcagaacagattgattttgtcccagtccagcctttatcatctccacagtgtaacttttccagtgacttaggttctaatgggacaaattctcttgaacttcagaaagtatcaggtaatcagcagattgtaggacagcctcagattgctattactggacatgatcaggggctgttagttcaagaaccagatggactaatggttgcaactccagctcagacgcttaccgacactcttgatgacctgatagcagctgtgagtaccagagtgcccactggttccaacagttcttctcagaccacagagtgtcttacacctgaatcctgttcgcagactacaagcaatgtggcttcccaatcgatgcctcctgtgtatccttcagttgacattgatgcacatactgagagcaatcatgacacagcattaacactagcttgtgcaggtggtcatgaagaacttgtatctgtgctcattgcacgggatgccaaaattgaacacagagacaaaaaaggtttcacaccactaatcctggcagcaacagcagggcatgttggagttgttgaaatccttttggataaaggtggagatatagaagcacagtctgaacgaactaaggatactccgctttcattggcatgttctggtggacgtcaggaggtggtagacttgctgctggctcgaggtgcaaataaagaacataggaacgtatctgattatacaccactgagtctagctgcgtctggaggatatgttaatatcattaagattctgcttaatgctggggcagaaattaattcaaggactgggagtaaactaggtatttctcccctgatgttggctgcaatgaatggacatgttcctgcagtaaaattgctgctcgatatgggttcagacattaatgcccaaatagagaccaatcggaacacggctctcaccctggcctgtttccagggccgagcagaagtagtgagtttgcttctggaccgaaaagccaatgttgaacatagggcaaagacgggtcttacccccttgatggaagcagcttctggagggtatgcagaggttggaagagttcttcttgataaaggagcagatgttaatgctccccctgtgccttcctcaagagatactgctttaacaatagcagcagacaaaggtcactacaaattttgtgaactcctgattcataggggagcccacattgatgttcgtaacaaaaagggaaatacgccactttggctggcatccaatggaggtcattttgatgttgtgcagttgctagtgcaagcaggtgctgatgtggatgcagcagataaccggaaaatcacacctcttatgtcagcatttcgcaagggtcatgtaaaagttgttcaatatttggtaaaggaagtaaatcagttcccttctgatatagaatgcatgagatacatagcaacaattacagataaggaactgttgaaaaaatgtcatcaatgtgtcgaaaccattgtgaaggctaaagaccagcaagctgcagaagcaaataagaatgcgagtattcttttaaaggaacttgatctggaaaagtcaagagaagagagcagaaagcaggctcttgctgctaaaagagaaaaaagaaaagaaaagagaaaaaagaaaaaagaggaacagaaaaggaaacaggaagaagatgaagaaaacaaacctaaggagaattcggaactaccagaggatgaagatgaagaggagaatgatgaagatgtggagcaagaagttcccatagaacctcctagtgcaaccaccaccactacgattggaatctctgcaacatctgcaacattcacaaatgtgtttgggaaaaaaagggccaatgtggtgacaactcccagcaccaatcggaaaaataagaagaacaaaacaaaagaaacccctcctacagcacatttaattttaccagaacaacatatgtctttagcccaacaaaaggcagataaaaataaaataaatggagaacctagaggtggtggtgcaggtgggaatagtgattcagataacttggacagcacagactgcaacagtgagagtagcagtggtggtaaaagccaagagttaaattttgtgatggatgtgaattcctctaaatacccctcactgctccttcattcccaagaagaaaagacaagtactgctacttccaaaactcagacacgacttgaaggtgaagtgactcctaattccttgtcaaccagctacaagacagtgtcattgccattaagctctccaaacataaagctgaatctcactagccctaaaaggggtcagaaaagagaagaagggtggaaagaagttgtacgaaggtcaaagaaattgtctgttccagcctcagtggtgtcgaggataatgggaagaggaggatgcaacatcactgcaatacaggatgttactggtgcccatattgatgtggataaacaaaaagataagaatggcgagagaatgatcacaataaggggtggcacagaatcaacaagatatgcagttcaactaatcaatgcactcattcaagatcctgctaaggaactggaagacttgattcctaaaaatcatatcagaacacctgccagcaccaaatcaattcatgctaacttctcatctggagtaggtaccacagcagcttccagtaaaaatgcatttcctttgggtgctccaactcttgtaacttcacaggcaacaacgttatctacgttccagcccgctaataaacttaataagaatgttccaacaaatgtacgttcttctttcccagtttctctacccttagcttatcctcaccctcattttgccctgctggctgctcaaactatgcaacagattcggcatcctcgcttacccatggcccagtttggaggaaccttctcaccttctcctaacacatggggaccattcccagtgagacctgtgaatcctggcaacacaaatagctctccaaagcataataacacaagccgtctacctaaccagaacgggactgttttaccctcagagtctgctggactagctactgccagttgtcctatcactgtctcttctgtagttgctgccagtcagcaactgtgtgtcactaatacccggactccttcatcagtcagaaagcagttgtttgcctgtgtgcctaagacaagtcctccagcaacagtgatttcttctgtgacaagcacttgtagttccctgccttctgtctcctctgcacctatcactagcgggcaagctcccaccacatttctacctgcaagtacttctcaagcacagctttcttcacaaaagatggagtctttctctgctgtgccacccaccaaagagaaagtgtccacacaggaccagcccatggcaaacctatgtaccccatcttcaactgcaaacagttgcagtagctctgccagcaacaccccgggagctccagaaactcacccatccagtagtcccactcctacttccagtaacacacaagaggaggcacagccatccagtgtgtctgatttaagtcctatgtcaatgccttttgcatctaactcagaacctgctccattgactttgacatcacccagaatggttgctgctgataatcaggacaccagtaatttacctcagttagctgtaccagcacctcgagtttctcatcgaatgcagcccagaggttctttttactccatggtaccaaatgcaactattcaccaggatccccagtctatttttgttacgaatccagttactttaacaccacctcaaggcccaccagctgcagtgcagctttcttcagctgtgaacattatgaatggttctcagatgcacataaacccagcaaataagtctttgccacctacatttggcccagccacacttttcaatcacttcagcagtctttttgatagtagtcaggtgccagctaaccagggctggggagatggtccactgtcctcacgagttgctacagatgcctctttcactgttcagtcagcgttcctgggtaactcagtgcttggacacttggaaaacatgcaccctgataactcaaaggcacctggcttcagaccaccttcccagcgagtttctactagtccagttgggttaccatccattgacccatcaggcagctccccatcttcctcttctgctcctctggcaagtttttccggcataccaggaacaagggttttcctgcaagggccagctcctgttgggactcctagtttcaacagacaacatttttctccccatccttggacaagcgcctcaaactcatgtgactctcctattccatctgtttcttcgggatcatcttcacctctttcagccacttctgccccaccaacgttgggccaaccaaaaggagtcagtgccagtcaagatcgaaagatacctcccccaattggaacagagagactggcccgaattcggcaaggagggtctgttgcacaagccccggcggggaccagttttgtcgctcccgttggacacagtggaatctggtcatttggtgtcaatgctgtgtcagaaggcttatcaggttggtcgcaatctgtgatggggaaccatccaatgcatcaacaattatcagacccaagcacattctcccaacatcagccaatggagagagatgattctggaatggtagccccctctaacatttttcatcagcctatggcaagtggttttgtggatttttctaaaggtctgccaatttccatgtatggaggcaccataataccctctcatcctcagcttgctgatgttccaggaggccctctgtttaatggacttcacaatccagatcctgcttggaaccctatgataaaagttatccaaaattcaactgaatgcactgatgcccagcaggtaaaatgggcttaatgctcttttgttttttagatttgtcacatcattctttttgttttgtgagaagtataagtactgaatatcaaaagtcataattgaccatttcgatctggattgctttttcaatatcaagatgatgctactgaacactttatttaatatatgtgtattcttcctaggcagaaacagtgaattgccattgcatttatatattcattttgtaactgtctaaagattcctaattagaaattccaatttttcctcccccttttcagatttggcctggcacgtgggcacctcatattggaaacatgcatctcaaatatgtcaactaagttagaaggtctttactctttagccttgtttaagaaacctatgaccttggaagaaccatggggatttttttttaatgtgcctaagaaattttctctgaggctttagcaatggaaatttgattgcccattgtataagaacaaattgatttcctatccacctgattatgttctctggttagtttagccattttgaacttaagatcatatgaccttagtgcttttggctaaacatacagaatactacttgtatgcagaagagaattagttgattacatgtttcaaccttttagggtgataaatacatgtataattgtttacatacttaaaaggaaaaagttgagtaaatttcttgtcatatagtggctctacgtaatgtagcctgtattaatgtgaaatatttaccagaatattcaataaaaagatgaacagtctttagaagtggggtgtgatcctttcagtggtcatgcaggtaccactcaatccacattatattgaaccagatggttaatactatatttgtaacaggcttctcacatttaacacttgagtcccttcttagactgccttaaaaaagcacttttaagactatttacctatttattctgtgttaaacattccttgttcccttgttgtcttccataatcctttaacatatgagaaagtttcaagctctggcaatgtgtcttatctgactttagctagcagataggccactgataggttttttctctatggatcatgagaatgtcaataagaacaattggatttaaatcagatgacactaaacaaatgtagggacacccaaattatcaacttcaggttccttctgtgcttcctgaccttttttatctgaaagatttgtctggttatagatattttaagctttatatgagttgggacataaggaggtgactcctgtcattctgttgtattattgaatcagctgagtaatatttataaatatgtgagtaattccaggcttagttccatggccctaagcatggagagtcaatatgtttaacaagctaaacagaggaaccctggaatgggctgctttggccaaaccataggctatgccgagaatcagcatagagaaggaaaagttatcccactgaaaagtatagtcatcaacttatttgtgttttaatatagctgaatttttcctggtcagtataggcaatacagaaaagaaaacaagaaaatgtttggagctgatggagaagccaaaactcatatnaaggcaaagaaggatgcacagagaaagagtagtaactagggacagaactatattagcagcacctttctacncttatgccaacaggaattcttaattttctctgcccaggtcctaaagccaggaccacatcagacacaccatgtttgttctgtgtcagatatacctgcttctttaatcttctatatcatcttacatatgagaaagcttccttaattaagcttatgtcttatgttttgttttgaatggattttgaaagtgttgtttattgaagctactactttgtagtgattgataaccacatcaagtatcattaaggggccccttgacctttgtgggggcagttgggtggggcacaaaagactccttggatcacctgtgtatcttgctgtttccacttaccattaacagcaacaagaaaaatcacctaaaattggtgaaatgaatgaaactactcttgatgaaatatatactagtgagaaataatattaaataaattattcagtgggacaaaaaggtgagttttattctatcttaactgtctacaatacatttgaattgtctggaggagccttaagtccatattctgcaccttgaggacaaccaaatgagaaattttatttcaggtcagtaagtagaatttatgaagagaaaggagataattatgaggaatccctaggaaaattgggaggaaaacaacagttgtatagttgggagtagttctttaggatacgctcctcccttccttcttaccagcacttccttcctttctttctgactatttggatcccagtagcctgctcccaacctcatttcacctgctaaatctcttcttcctctgcctgcctcttcctggcactactttactgctattttaccaacctgaacatttggataaaacctagctcaggtaagaacttaattactttcaaaatatacaagggatatgggaggagacagcatggatacagtggagcagtagtcagtagtcagagcctaaattctattttcatttctgccgcttgaagctttatggccttaggcaaatcatctcacctttctgggtttcacttttctcatctgaaattgaactcaagagtcttctagttctaacacaggatttcttcttgtgaatgagaatataagatatggaaatatttgaagccattagattgtttacagtgctgagatttgagagcccctagcattggttctgataaggaatcgaaataaatcctgccattattatgggggccagtattgagattttagtggaggcagaagaagaccttgcacatctttagtgagccttcaagttgtgaagaaacatcctgctaaggtatagatcaaacccagtgaaatgaaactataggaatgaaactacatcatcaaggtttctggacccacttatttcaacttgtgttcaatgtaataaaattccgctaccaataaaattattaatgttttaagaccctttaaacctattgtggctacagtgtgctgacttgcccttttataggccagtctgcttccttcagtccctgctctcaaaggggaaatcccatcacctcagctaaccagaccgaagaagagaattggacggccgatggtggcctctcctaaccagaggcaccaggatcatctacgaccgaaagttcctgctggagtgcaagaactcacccattgcccggacacccccctgctgcctccctcagattcccggggtcacaactcctccaacagcccctctctccaagctggaggagctgaaggagcaggagacagaggaagagatacccgatgacgcacaatttgaaatggacatctaatccagtgcagatgacctggcatgtggagttacagagggatccctcatgccactgctgccaccacctcttcctggggcatccaaaggccagctggcctcatctaatctggaagggagtgacttgttagttccaggcctcctttagttctgaggcagctagaccagggataggagtgggcaacttgccaagcccttaactctacttcctcttcagtctgtggtactcctcctaaccctaaaccctctatgctcaggggctggaactggggaatggagtaagtcaccttctgactgcttagtaaacattcaaagaaaaaa

SEQ ID NO: 375996 - DNA, 9003 bp, Homo sapiens
  misc_feature (6860)..(6860): n is a, c, g, or t
  misc_feature (6931)..(6931): n is a, c, g, or t
ttaaggcaggggctgatatagaacttggctgctccacacctctgatggaggcatctcaggagggacacctggaattggttaaatatttgctggcttctggcgctaatgtgcatgctacaacagcaacaggagacacagccttaacctatgcttgtgaaaatggacatacggatgttgcagatgttttacttcaagcaggggctgatttagaacatgaatctgaaggtggaagaacacctttgatgaaagctgcaagagctggtcatttgtgcactgtgcagtttcttattagcaaaggtgccaatgttaacagggctacagccaataatgatcatacagtagtgtcgctggcatgtgcaggaggccacctggcagttgttgagcttctcttggctcatggggctgaccctactcatcgactcaaggatggttcaacaatgctcattgaagctgcaaagggtggccatactaatgtagtttcttatctgttggattatccaaataatgttctgtcagttcccaccacagatgtgtctcagctccctccaccttctcaagatcagtctcaggtgccacgtgtgccaacgcatacacttgccatggttgtacctccccaggaacctgacagaacttcacaggagaactctcctgcccttttaggagtgcaaaaagctgtgagtaccagagtgcccactggttccaacagttcttctcagaccacagagtgtcttacacctgaatcctgttcgcagactacaagcaatgtggcttcccaatcgatgcctcctgtgtatccttcagttgacattgatgcacatactgagagcaatcatgacacagcattaacactagcttgtgcaggtggtcatgaagaacttgtatctgtgctcattgcacgggatgccaaaattgaacacagagacaaaaaaggtttcacaccactaatcctggcagcaacagcagggcatgttggagttgttgaaatccttttggataaaggtggagatatagaagcacagtctgaacgaactaaggatactccgctttcattggcatgttctggtggacgtcaggaggtggtagacttgctgctggctcgaggtgcaaataaagaacataggaacgtatctgattatacaccactgagtctagctgcgtctggaggatatgttaatatcattaagattctgcttaatgctggggcagaaattaattcaaggactgggagtaaactaggtatttctcccctgatgttggctgcaatgaatggacatgttcctgcagtaaaattgctgctcgatatgggttcagacattaatgcccaaatagagaccaatcggaacacggctctcaccctggcctgtttccagggccgagcagaagtagtgagtttgcttctggaccgaaaagccaatgttgaacatagggcaaagacgggtcttacccccttgatggaagcagcttctggagggtatgcagaggttggaagagttcttcttgataaaggagcagatgttaatgctccccctgtgccttcctcaagagatactgctttaacaatagcagcagacaaaggtcactacaaattttgtgaactcctgattcataggggagcccacattgatgttcgtaacaaaaagggaaatacgccactttggctggcatccaatggaggtcattttgatgttgtgcagttgctagtgcaagcaggtgctgatgtggatgcagcagataaccggaaaatcacacctcttatgtcagcatttcgcaagggtcatgtaaaagttgttcaatatttggtaaaggaagtaaatcagttcccttctgatatagaatgcatgagatacatagcaacaattacagataaggaactgttgaaaaaatgtcatcaatgtgtcgaaaccattgtgaaggctaaagaccagcaagctgcagaagcaaataagaatgcgagtattcttttaaaggaacttgatctggaaaagtcaagagaagagagcagaaagcaggctcttgctgctaaaagagaaaaaagaaaagaaaagagaaaaaagaaaaaagaggaacagaaaaggaaacaggaagaagatgaagaaaacaaacctaaggagaattcggaactaccagaggatgaagatgaagaggagaatgatgaagatgtggagcaagaagttcccatagaacctcctagtgcaaccaccaccactacgattggaatctctgcaacatctgcaacattcacaaatgtgtttgggaaaaaaagggccaatgtggtgacaactcccagcaccaatcggaaaaataagaagaacaaaacaaaagaaacccctcctacagcacatttaattttaccagaacaacatatgtctttagcccaacaaaaggcagataaaaataaaataaatggagaacctagaggtggtggtgcaggtgggaatagtgattcagataacttggacagcacagactgcaacagtgagagtagcagtggtggtaaaagccaagagttaaattttgtgatggatgtgaattcctctaaatacccctcactgctccttcattcccaagaagaaaagacaagtactgctacttccaaaactcagacacgacttgaaggtgaagtgactcctaattccttgtcaaccagctacaagacagtgtcattgccattaagctctccaaacataaagctgaatctcactagccctaaaaggggtcagaaaagagaagaagggtggaaagaagttgtacgaaggtcaaagaaattgtctgttccagcctcagtggtgtcgaggataatgggaagaggaggatgcaacatcactgcaatacaggatgttactggtgcccatattgatgtggataaacaaaaagataagaatggcgagagaatgatcacaataaggggtggcacagaatcaacaagatatgcagttcaactaatcaatgcactcattcaagatcctgctaaggaactggaagacttgattcctaaaaatcatatcagaacacctgccagcaccaaatcaattcatgctaacttctcatctggagtaggtaccacagcagcttccagtaaaaatgcatttcctttgggtgctccaactcttgtaacttcacaggcaacaacgttatctacgttccagcccgctaataaacttaataagaatgttccaacaaatgtacgttcttctttcccagtttctctacccttagcttatcctcaccctcattttgccctgctggctgctcaaactatgcaacagattcggcatcctcgcttacccatggcccagtttggaggaaccttctcaccttctcctaacacatggggaccattcccagtgagacctgtgaatcctggcaacacaaatagctctccaaagcataataacacaagccgtctacctaaccagaacgggactgttttaccctcagagtctgctggactagctactgccagttgtcctatcactgtctcttctgtagttgctgccagtcagcaactgtgtgtcactaatacccggactccttcatcagtcagaaagcagttgtttgcctgtgtgcctaagacaagtcctccagcaacagtgatttcttctgtgacaagcacttgtagttccctgccttctgtctcctctgcacctatcactagcgggcaagctcccaccacatttctacctgcaagtacttctcaagcacagctttcttcacaaaagatggagtctttctctgctgtgccacccaccaaagagaaagtgtccacacaggaccagcccatggcaaacctatgtaccccatcttcaactgcaaacagttgcagtagctctgccagcaacaccccgggagctccagaaactcacccatccagtagtcccactcctacttccagtaacacacaagaggaggcacagccatccagtgtgtctgatttaagtcctatgtcaatgccttttgcatctaactcagaacctgctccattgactttgacatcacccagaatggttgctgctgataatcaggacaccagtaatttacctcagttagctgtaccagcacctcgagtttctcatcgaatgcagcccagaggttctttttactccatggtaccaaatgcaactattcaccaggatccccagtctatttttgttacgaatccagttactttaacaccacctcaaggcccaccagctgcagtgcagctttcttcagctgtgaacattatgaatggttctcagatgcacataaacccagcaaataagtctttgccacctacatttggcccagccacacttttcaatcacttcagcagtctttttgatagtagtcaggtgccagctaaccagggctggggagatggtccactgtcctcacgagttgctacagatgcctctttcactgttcagtcagcgttcctgggtaactcagtgcttggacacttggaaaacatgcaccctgataactcaaaggcacctggcttcagaccaccttcccagcgagtttctactagtccagttgggttaccatccattgacccatcaggcagctccccatcttcctcttctgctcctctggcaagtttttccggcataccaggaacaagggttttcctgcaagggccagctcctgttgggactcctagtttcaacagacaacatttttctccccatccttggacaagcgcctcaaactcatgtgactctcctattccatctgtttcttcgggatcatcttcacctctttcagccacttctgccccaccaacgttgggccaaccaaaaggagtcagtgccagtcaagatcgaaagatacctcccccaattggaacagagagactggcccgaattcggcaaggagggtctgttgcacaagccccggcggggaccagttttgtcgctcccgttggacacagtggaatctggtcatttggtgtcaatgctgtgtcagaaggcttatcaggttggtcgcaatctgtgatggggaaccatccaatgcatcaacaattatcagacccaagcacattctcccaacatcagccaatggagagagatgattctggaatggtagccccctctaacatttttcatcagcctatggcaagtggttttgtggatttttctaaaggtctgccaatttccatgtatggaggcaccataataccctctcatcctcagcttgctgatgttccaggaggccctctgtttaatggacttcacaatccagatcctgcttggaaccctatgataaaagttatccaaaattcaactgaatgcactgatgcccagcaggtaaaatgggcttaatgctcttttgttttttagatttgtcacatcattctttttgttttgtgagaagtataagtactgaatatcaaaagtcataattgaccatttcgatctggattgctttttcaatatcaagatgatgctactgaacactttatttaatatatgtgtattcttcctaggcagaaacagtgaattgccattgcatttatatattcattttgtaactgtctaaagattcctaattagaaattccaatttttcctcccccttttcagatttggcctggcacgtgggcacctcatattggaaacatgcatctcaaatatgtcaactaagttagaaggtctttactctttagccttgtttaagaaacctatgaccttggaagaaccatggggatttttttttaatgtgcctaagaaattttctctgaggctttagcaatggaaatttgattgcccattgtataagaacaaattgatttcctatccacctgattatgttctctggttagtttagccattttgaacttaagatcatatgaccttagtgcttttggctaaacatacagaatactacttgtatgcagaagagaattagttgattacatgtttcaaccttttagggtgataaatacatgtataattgtttacatacttaaaaggaaaaagttgagtaaatttcttgtcatatagtggctctacgtaatgtagcctgtattaatgtgaaatatttaccagaatattcaataaaaagatgaacagtctttagaagtggggtgtgatcctttcagtggtcatgcaggtaccactcaatccacattatattgaaccagatggttaatactatatttgtaacaggcttctcacatttaacacttgagtcccttcttagactgccttaaaaaagcacttttaagactatttacctatttattctgtgttaaacattccttgttcccttgttgtcttccataatcctttaacatatgagaaagtttcaagctctggcaatgtgtcttatctgactttagctagcagataggccactgataggttttttctctatggatcatgagaatgtcaataagaacaattggatttaaatcagatgacactaaacaaatgtagggacacccaaattatcaacttcaggttccttctgtgcttcctgaccttttttatctgaaagatttgtctggttatagatattttaagctttatatgagttgggacataaggaggtgactcctgtcattctgttgtattattgaatcagctgagtaatatttataaatatgtgagtaattccaggcttagttccatggccctaagcatggagagtcaatatgtttaacaagctaaacagaggaaccctggaatgggctgctttggccaaaccataggctatgccgagaatcagcatagagaaggaaaagttatcccactgaaaagtatagtcatcaacttatttgtgttttaatatagctgaatttttcctggtcagtataggcaatacagaaaagaaaacaagaaaatgtttggagctgatggagaagccaaaactcatatnaaggcaaagaaggatgcacagagaaagagtagtaactagggacagaactatattagcagcacctttctacncttatgccaacaggaattcttaattttctctgcccaggtcctaaagccaggaccacatcagacacaccatgtttgttctgtgtcagatatacctgcttctttaatcttctatatcatcttacatatgagaaagcttccttaattaagcttatgtcttatgttttgttttgaatggattttgaaagtgttgtttattgaagctactactttgtagtgattgataaccacatcaagtatcattaaggggccccttgacctttgtgggggcagttgggtggggcacaaaagactccttggatcacctgtgtatcttgctgtttccacttaccattaacagcaacaagaaaaatcacctaaaattggtgaaatgaatgaaactactcttgatgaaatatatactagtgagaaataatattaaataaattattcagtgggacaaaaaggtgagttttattctatcttaactgtctacaatacatttgaattgtctggaggagccttaagtccatattctgcaccttgaggacaaccaaatgagaaattttatttcaggtcagtaagtagaatttatgaagagaaaggagataattatgaggaatccctaggaaaattgggaggaaaacaacagttgtatagttgggagtagttctttaggatacgctcctcccttccttcttaccagcacttccttcctttctttctgactatttggatcccagtagcctgctcccaacctcatttcacctgctaaatctcttcttcctctgcctgcctcttcctggcactactttactgctattttaccaacctgaacatttggataaaacctagctcaggtaagaacttaattactttcaaaatatacaagggatatgggaggagacagcatggatacagtggagcagtagtcagtagtcagagcctaaattctattttcatttctgccgcttgaagctttatggccttaggcaaatcatctcacctttctgggtttcacttttctcatctgaaattgaactcaagagtcttctagttctaacacaggatttcttcttgtgaatgagaatataagatatggaaatatttgaagccattagattgtttacagtgctgagatttgagagcccctagcattggttctgataaggaatcgaaataaatcctgccattattatgggggccagtattgagattttagtggaggcagaagaagaccttgcacatctttagtgagccttcaagttgtgaagaaacatcctgctaaggtatagatcaaacccagtgaaatgaaactataggaatgaaactacatcatcaaggtttctggacccacttatttcaacttgtgttcaatgtaataaaattccgctaccaataaaattattaatgttttaagaccctttaaacctattgtggctacagtgtgctgacttgcccttttataggccagtctgcttccttcagtccctgctctcaaaggggaaatcccatcacctcagctaaccagaccgaagaagagaattggacggccgatggtggcctctcctaaccagaggcaccaggatcatctacgaccgaaagttcctgctggagtgcaagaactcacccattgcccggacacccccctgctgcctccctcagattcccggggtcacaactcctccaacagcccctctctccaagctggaggagctgaaggagcaggagacagaggaagagatacccgatgacgcacaatttgaaatggacatctaatccagtgcagatgacctggcatgtggagttacagagggatccctcatgccactgctgccaccacctcttcctggggcatccaaaggccagctggcctcatctaatctggaagggagtgacttgttagttccaggcctcctttagttctgaggcagctagaccagggataggagtgggcaacttgccaagcccttaactctacttcctcttcagtctgtggtactcctcctaaccctaaaccctctatgctcaggggctggaactggggaatggagtaagtcaccttctgactgcttagtaaacattcaaagaaaaaa

SEQ ID NO: 375997 - DNA, 6534 bp, Homo sapiens
ttaaggcaggggctgatatagaacttggctgctccacacctctgatggaggcatctcaggagggacacctggaattggttaaatatttgctggcttctggcgctaatgtgcatgctacaacagcaacaggagacacagccttaacctatgcttgtgaaaatggacatacggatgttgcagatgttttacttcaagcaggggctgatttagaacatgaatctgaaggtggaagaacacctttgatgaaagctgcaagagctggtcatttgtgcactgtgcagtttcttattagcaaaggtgccaatgttaacagggctacagccaataatgatcatacagtagtgtcgctggcatgtgcaggaggccacctggcagttgttgagcttctcttggctcatggggctgaccctactcatcgactcaaggatggttcaacaatgctcattgaagctgcaaagggtggccatactaatgtagtttcttatctgttggattatccaaataatgttctgtcagttcccaccacagatgtgtctcagctccctccaccttctcaagatcagtctcaggtgccacgtgtgccaacgcatacacttgccatggttgtacctccccaggaacctgacagaacttcacaggagaactctcctgcccttttaggagtgcaaaaaggtacatccaagcagaagtccagttccctccaggtagcagatcaggacctactgccatcttttcacccataccagcctttggagtgcatagtagaggagactgaaggcaagctgaatgaactgggacaaagaattagtgctattgaaaaagcacagcttaagtcactggagttaattcaaggtgaacctctgaacaaagataagatagaagaacttaaaaagaacagagaagagcaagtccagaagaagaagaaaatattgaaagaactgcagaaagtggaaaggcagttgcagatgaaaacacagcagcaatttaccaaagaatacttggaaaccaaaggtcagaaagacacagtgtctctacaccaacagtgctctcatagaggagtcttcccagaaggggaaggagatggtagtctcccagaggatcacttttcagagttacctcaggttgacacaatcttatttaaagataatgatgttgatgatgagcaacagtctccaccatcggcagaacagattgattttgtcccagtccagcctttatcatctccacagtgtaacttttccagtgacttaggttctaatgggacaaattctcttgaacttcagaaagtatcaggtaatcagcagattgtaggacagcctcagattgctattactggacatgatcaggggctgttagttcaagaaccagatggactaatggttgcaactccagctcagacgcttaccgacactcttgatgacctgatagcagctgtgagtaccagagtgcccactggttccaacagttcttctcagaccacagagtgtcttacacctgaatcctgttcgcagactacaagcaatgtggcttcccaatcgatgcctcctgtgtatccttcagttgacattgatgcacatactgagagcaatcatgacacagcattaacactagcttgtgcaggtggtcatgaagaacttgtatctgtgctcattgcacgggatgccaaaattgaacacagagacaaaaaaggtttcacaccactaatcctggcagcaacagcagggcatgttggagttgttgaaatccttttggataaaggtggagatatagaagcacagtctgaacgaactaaggatactccgctttcattggcatgttctggtggacgtcaggaggtggtagacttgctgctggctcgaggtgcaaataaagaacataggaacgtatctgattatacaccactgagtctagctgcgtctggaggatatgttaatatcattaagattctgcttaatgctggggcagaaattaattcaaggactgggagtaaactaggtatttctcccctgatgttggctgcaatgaatggacatgttcctgcagtaaaattgctgctcgatatgggttcagacattaatgcccaaatagagaccaatcggaacacggctctcaccctggcctgtttccagggccgagcagaagtagtgagtttgcttctggaccgaaaagccaatgttgaacatagggcaaagacgggtcttacccccttgatggaagcagcttctggagggtatgcagaggttggaagagttcttcttgataaaggagcagatgttaatgctccccctgtgccttcctcaagagatactgctttaacaatagcagcagacaaaggtcactacaaattttgtgaactcctgattcataggggagcccacattgatgttcgtaacaaaaagggaaatacgccactttggctggcatccaatggaggtcattttgatgttgtgcagttgctagtgcaagcaggtgctgatgtggatgcagcagataaccggaaaatcacacctcttatgtcagcatttcgcaagggtcatgtaaaagttgttcaatatttggtaaaggaagtaaatcagttcccttctgatatagaatgcatgagatacatagcaacaattacagataaggaactgttgaaaaaatgtcatcaatgtgtcgaaaccattgtgaaggctaaagaccagcaagctgcagaagcaaataagaatgcgagtattcttttaaaggaacttgatctggaaaagtcaagagaagagagcagaaagcaggctcttgctgctaaaagagaaaaaagaaaagaaaagagaaaaaagaaaaaagaggaacagaaaaggaaacaggaagaagatgaagaaaacaaacctaaggagaattcggaactaccagaggatgaagatgaagaggagaatgatgaagatgtggagcaagaagttcccatagaacctcctagtgcaaccaccaccactacgattggaatctctgcaacatctgcaacattcacaaatgtgtttgggaaaaaaagggccaatgtggtgacaactcccagcaccaatcggaaaaataagaagaacaaaacaaaagaaacccctcctacagcacatttaattttaccagaacaacatatgtctttagcccaacaaaaggcagataaaaataaaataaatggagaacctagaggtggtggtgcaggtgggaatagtgattcagataacttggacagcacagactgcaacagtgagagtagcagtggtggtaaaagccaagagttaaattttgtgatggatgtgaattcctctaaatacccctcactgctccttcattcccaagaagaaaagacaagtactgctacttccaaaactcagacacgacttgaaggtgaagtgactcctaattccttgtcaaccagctacaagacagtgtcattgccattaagctctccaaacataaagctgaatctcactagccctaaaaggggtcagaaaagagaagaagggtggaaagaagttgtacgaaggtcaaagaaattgtctgttccagcctcagtggtgtcgaggataatgggaagaggaggatgcaacatcactgcaatacaggatgttactggtgcccatattgatgtggataaacaaaaagataagaatggcgagagaatgatcacaataaggggtggcacagaatcaacaagatatgcagttcaactaatcaatgcactcattcaagatcctgctaaggaactggaagacttgattcctaaaaatcatatcagaacacctgccagcaccaaatcaattcatgctaacttctcatctggagtaggtaccacagcagcttccagtaaaaatgcatttcctttgggtgctccaactcttgtaacttcacaggcaacaacgttatctacgttccagcccgctaataaacttaataagaatgttccaacaaatgtacgttcttctttcccagtttctctacccttagcttatcctcaccctcattttgccctgctggctgctcaaactatgcaacagattcggcatcctcgcttacccatggcccagtttggaggaaccttctcaccttctcctaacacatggggaccattcccagtgagacctgtgaatcctggcaacacaaatagctctccaaagcataataacacaagccgtctacctaaccagaacgggactgttttaccctcagagtctgctggactagctactgccagttgtcctatcactgtctcttctgtagttgctgccagtcagcaactgtgtgtcactaatacccggactccttcatcagtcagaaagcagttgtttgcctgtgtgcctaagacaagtcctccagcaacagtgatttcttctgtgacaagcacttgtagttccctgccttctgtctcctctgcacctatcactagcgggcaagctcccaccacatttctacctgcaagtacttctcaagcacagctttcttcacaaaagatggagtctttctctgctgtgccacccaccaaagagaaagtgtccacacaggaccagcccatggcaaacctatgtaccccatcttcaactgcaaacagttgcagtagctctgccagcaacaccccgggagctccagaaactcacccatccagtagtcccactcctacttccagtaacacacaagaggaggcacagccatccagtgtgtctgatttaagtcctatgtcaatgccttttgcatctaactcagaacctgctccattgactttgacatcacccagaatggttgctgctgataatcaggacaccagtaatttacctcagttagctgtaccagcacctcgagtttctcatcgaatgcagcccagaggttctttttactccatggtaccaaatgcaactattcaccaggatccccagtctatttttgttacgaatccagttactttaacaccacctcaaggcccaccagctgcagtgcagctttcttcagctgtgaacattatgaatggttctcagatgcacataaacccagcaaataagtctttgccacctacatttggcccagccacacttttcaatcacttcagcagtctttttgatagtagtcaggtgccagctaaccagggctggggagatggtccactgtcctcacgagttgctacagatgcctctttcactgttcagtcagcgttcctgggtaactcagtgcttggacacttggaaaacatgcaccctgataactcaaaggcacctggcttcagaccaccttcccagcgagtttctactagtccagttgggttaccatccattgacccatcaggcagctccccatcttcctcttctgctcctctggcaagtttttccggcataccaggaacaagggttttcctgcaagggccagctcctgttgggactcctagtttcaacagacaacatttttctccccatccttggacaagcgcctcaaactcatgtgactctcctattccatctgtttcttcgggatcatcttcacctctttcagccacttctgccccaccaacgttgggccaaccaaaaggagtcagtgccagtcaagatcgaaagatacctcccccaattggaacagagagactggcccgaattcggcaaggagggtctgttgcacaagccccggcggggaccagttttgtcgctcccgttggacacagtggaatctggtcatttggtgtcaatgctgtgtcagaaggcttatcaggttggtcgcaatctgtgatggggaaccatccaatgcatcaacaattatcagacccaagcacattctcccaacatcagccaatggagagagatgattctggaatggtagccccctctaacatttttcatcagcctatggcaagtggttttgtggatttttctaaaggtctgccaatttccatgtatggaggcaccataataccctctcatcctcagcttgctgatgttccaggaggccctctgtttaatggacttcacaatccagatcctgcttggaaccctatgataaaagttatccaaaattcaactgaatgcactgatgcccagcagatttggcctggcacgtgggcacctcatattggaaacatgcatctcaaatatgtcaactaagttagaaggtctttactctttagccttgtttaagaaacctatgaccttggaagaaccatggggatttttttttaatgtgcctaagaaattttctctgaggctttagcaatggaaatttgattgcccattgtataagaacaaattgatttcctatccacctgattatgttctctggttagtttagccattttgaacttaagatcatatgaccttagtgcttttggctaaacatacagaatactacttgtatgcagaagagaattagttgattacatgtttcaaccttttagggtgataaatacatgtataattgtttacatacttaaaaggaaaaagttgagtaaatttcttgtcatatagtggctctacgtaatgtagcctgtattaatgtgaaatatttaccagaatattcaataaaaagatgaac

SEQ ID NO: 375998 - DNA, 9012 bp, Homo sapiens
  misc_feature (6869)..(6869): n is a, c, g, or t
  misc_feature (6940)..(6940): n is a, c, g, or t
ttaaggcaggggctgatatagaacttggctgctccacacctctgatggaggcatctcaggagggacacctggaattggttaaatatttgctggcttctggcgctaatgtgcatgctacaacagcaacaggagacacagccttaacctatgcttgtgaaaatggacatacggatgttgcagatgttttacttcaagcaggggctgatttagacaagcaggaggacatgaagactattttggagggcatagatccggccaagcatcaggaacatgaatctgaaggtggaagaacacctttgatgaaagctgcaagagctggtcatttgtgcactgtgcagtttcttattagcaaaggtgccaatgttaacagggctacagccaataatgatcatacagtagtgtcgctggcatgtgcaggaggccacctggcagttgttgagcttctcttggctcatggggctgaccctactcatcgactcaaggatggttcaacaatgctcattgaagctgcaaagggtggccatactaatgtagtttcttatctgttggattatccaaataatgttctgtcagttcccaccacagatgtgtctcagctccctccaccttctcaagatcagtctcaggaacctgacagaacttcacaggagaactctcctgcccttttaggagtgcaaaaagctgtgagtaccagagtgcccactggttccaacagttcttctcagaccacagagtgtcttacacctgaatcctgttcgcagactacaagcaatgtggcttcccaatcgatgcctcctgtgtatccttcagttgacattgatgcacatactgagagcaatcatgacacagcattaacactagcttgtgcaggtggtcatgaagaacttgtatctgtgctcattgcacgggatgccaaaattgaacacagagacaaaaaaggtttcacaccactaatcctggcagcaacagcagggcatgttggagttgttgaaatccttttggataaaggtggagatatagaagcacagtctgaacgaactaaggatactccgctttcattggcatgttctggtggacgtcaggaggtggtagacttgctgctggctcgaggtgcaaataaagaacataggaacgtatctgattatacaccactgagtctagctgcgtctggaggatatgttaatatcattaagattctgcttaatgctggggcagaaattaattcaaggactgggagtaaactaggtatttctcccctgatgttggctgcaatgaatggacatgttcctgcagtaaaattgctgctcgatatgggttcagacattaatgcccaaatagagaccaatcggaacacggctctcaccctggcctgtttccagggccgagcagaagtagtgagtttgcttctggaccgaaaagccaatgttgaacatagggcaaagacgggtcttacccccttgatggaagcagcttctggagggtatgcagaggttggaagagttcttcttgataaaggagcagatgttaatgctccccctgtgccttcctcaagagatactgctttaacaatagcagcagacaaaggtcactacaaattttgtgaactcctgattcataggggagcccacattgatgttcgtaacaaaaagggaaatacgccactttggctggcatccaatggaggtcattttgatgttgtgcagttgctagtgcaagcaggtgctgatgtggatgcagcagataaccggaaaatcacacctcttatgtcagcatttcgcaagggtcatgtaaaagttgttcaatatttggtaaaggaagtaaatcagttcccttctgatatagaatgcatgagatacatagcaacaattacagataaggaactgttgaaaaaatgtcatcaatgtgtcgaaaccattgtgaaggctaaagaccagcaagctgcagaagcaaataagaatgcgagtattcttttaaaggaacttgatctggaaaagtcaagagaagagagcagaaagcaggctcttgctgctaaaagagaaaaaagaaaagaaaagagaaaaaagaaaaaagaggaacagaaaaggaaacaggaagaagatgaagaaaacaaacctaaggagaattcggaactaccagaggatgaagatgaagaggagaatgatgaagatgtggagcaagaagttcccatagaacctcctagtgcaaccaccaccactacgattggaatctctgcaacatctgcaacattcacaaatgtgtttgggaaaaaaagggccaatgtggtgacaactcccagcaccaatcggaaaaataagaagaacaaaacaaaagaaacccctcctacagcacatttaattttaccagaacaacatatgtctttagcccaacaaaaggcagataaaaataaaataaatggagaacctagaggtggtggtgcaggtgggaatagtgattcagataacttggacagcacagactgcaacagtgagagtagcagtggtggtaaaagccaagagttaaattttgtgatggatgtgaattcctctaaatacccctcactgctccttcattcccaagaagaaaagacaagtactgctacttccaaaactcagacacgacttgaaggtgaagtgactcctaattccttgtcaaccagctacaagacagtgtcattgccattaagctctccaaacataaagctgaatctcactagccctaaaaggggtcagaaaagagaagaagggtggaaagaagttgtacgaaggtcaaagaaattgtctgttccagcctcagtggtgtcgaggataatgggaagaggaggatgcaacatcactgcaatacaggatgttactggtgcccatattgatgtggataaacaaaaagataagaatggcgagagaatgatcacaataaggggtggcacagaatcaacaagatatgcagttcaactaatcaatgcactcattcaagatcctgctaaggaactggaagacttgattcctaaaaatcatatcagaacacctgccagcaccaaatcaattcatgctaacttctcatctggagtaggtaccacagcagcttccagtaaaaatgcatttcctttgggtgctccaactcttgtaacttcacaggcaacaacgttatctacgttccagcccgctaataaacttaataagaatgttccaacaaatgtacgttcttctttcccagtttctctacccttagcttatcctcaccctcattttgccctgctggctgctcaaactatgcaacagattcggcatcctcgcttacccatggcccagtttggaggaaccttctcaccttctcctaacacatggggaccattcccagtgagacctgtgaatcctggcaacacaaatagctctccaaagcataataacacaagccgtctacctaaccagaacgggactgttttaccctcagagtctgctggactagctactgccagttgtcctatcactgtctcttctgtagttgctgccagtcagcaactgtgtgtcactaatacccggactccttcatcagtcagaaagcagttgtttgcctgtgtgcctaagacaagtcctccagcaacagtgatttcttctgtgacaagcacttgtagttccctgccttctgtctcctctgcacctatcactagcgggcaagctcccaccacatttctacctgcaagtacttctcaagcacagctttcttcacaaaagatggagtctttctctgctgtgccacccaccaaagagaaagtgtccacacaggaccagcccatggcaaacctatgtaccccatcttcaactgcaaacagttgcagtagctctgccagcaacaccccgggagctccagaaactcacccatccagtagtcccactcctacttccagtaacacacaagaggaggcacagccatccagtgtgtctgatttaagtcctatgtcaatgccttttgcatctaactcagaacctgctccattgactttgacatcacccagaatggttgctgctgataatcaggacaccagtaatttacctcagttagctgtaccagcacctcgagtttctcatcgaatgcagcccagaggttctttttactccatggtaccaaatgcaactattcaccaggatccccagtctatttttgttacgaatccagttactttaacaccacctcaaggcccaccagctgcagtgcagctttcttcagctgtgaacattatgaatggttctcagatgcacataaacccagcaaataagtctttgccacctacatttggcccagccacacttttcaatcacttcagcagtctttttgatagtagtcaggtgccagctaaccagggctggggagatggtccactgtcctcacgagttgctacagatgcctctttcactgttcagtcagcgttcctgggtaactcagtgcttggacacttggaaaacatgcaccctgataactcaaaggcacctggcttcagaccaccttcccagcgagtttctactagtccagttgggttaccatccattgacccatcaggcagctccccatcttcctcttctgctcctctggcaagtttttccggcataccaggaacaagggttttcctgcaagggccagctcctgttgggactcctagtttcaacagacaacatttttctccccatccttggacaagcgcctcaaactcatgtgactctcctattccatctgtttcttcgggatcatcttcacctctttcagccacttctgccccaccaacgttgggccaaccaaaaggagtcagtgccagtcaagatcgaaagatacctcccccaattggaacagagagactggcccgaattcggcaaggagggtctgttgcacaagccccggcggggaccagttttgtcgctcccgttggacacagtggaatctggtcatttggtgtcaatgctgtgtcagaaggcttatcaggttggtcgcaatctgtgatggggaaccatccaatgcatcaacaattatcagacccaagcacattctcccaacatcagccaatggagagagatgattctggaatggtagccccctctaacatttttcatcagcctatggcaagtggttttgtggatttttctaaaggtctgccaatttccatgtatggaggcaccataataccctctcatcctcagcttgctgatgttccaggaggccctctgtttaatggacttcacaatccagatcctgcttggaaccctatgataaaagttatccaaaattcaactgaatgcactgatgcccagcaggtaaaatgggcttaatgctcttttgttttttagatttgtcacatcattctttttgttttgtgagaagtataagtactgaatatcaaaagtcataattgaccatttcgatctggattgctttttcaatatcaagatgatgctactgaacactttatttaatatatgtgtattcttcctaggcagaaacagtgaattgccattgcatttatatattcattttgtaactgtctaaagattcctaattagaaattccaatttttcctcccccttttcagatttggcctggcacgtgggcacctcatattggaaacatgcatctcaaatatgtcaactaagttagaaggtctttactctttagccttgtttaagaaacctatgaccttggaagaaccatggggatttttttttaatgtgcctaagaaattttctctgaggctttagcaatggaaatttgattgcccattgtataagaacaaattgatttcctatccacctgattatgttctctggttagtttagccattttgaacttaagatcatatgaccttagtgcttttggctaaacatacagaatactacttgtatgcagaagagaattagttgattacatgtttcaaccttttagggtgataaatacatgtataattgtttacatacttaaaaggaaaaagttgagtaaatttcttgtcatatagtggctctacgtaatgtagcctgtattaatgtgaaatatttaccagaatattcaataaaaagatgaacagtctttagaagtggggtgtgatcctttcagtggtcatgcaggtaccactcaatccacattatattgaaccagatggttaatactatatttgtaacaggcttctcacatttaacacttgagtcccttcttagactgccttaaaaaagcacttttaagactatttacctatttattctgtgttaaacattccttgttcccttgttgtcttccataatcctttaacatatgagaaagtttcaagctctggcaatgtgtcttatctgactttagctagcagataggccactgataggttttttctctatggatcatgagaatgtcaataagaacaattggatttaaatcagatgacactaaacaaatgtagggacacccaaattatcaacttcaggttccttctgtgcttcctgaccttttttatctgaaagatttgtctggttatagatattttaagctttatatgagttgggacataaggaggtgactcctgtcattctgttgtattattgaatcagctgagtaatatttataaatatgtgagtaattccaggcttagttccatggccctaagcatggagagtcaatatgtttaacaagctaaacagaggaaccctggaatgggctgctttggccaaaccataggctatgccgagaatcagcatagagaaggaaaagttatcccactgaaaagtatagtcatcaacttatttgtgttttaatatagctgaatttttcctggtcagtataggcaatacagaaaagaaaacaagaaaatgtttggagctgatggagaagccaaaactcatatnaaggcaaagaaggatgcacagagaaagagtagtaactagggacagaactatattagcagcacctttctacncttatgccaacaggaattcttaattttctctgcccaggtcctaaagccaggaccacatcagacacaccatgtttgttctgtgtcagatatacctgcttctttaatcttctatatcatcttacatatgagaaagcttccttaattaagcttatgtcttatgttttgttttgaatggattttgaaagtgttgtttattgaagctactactttgtagtgattgataaccacatcaagtatcattaaggggccccttgacctttgtgggggcagttgggtggggcacaaaagactccttggatcacctgtgtatcttgctgtttccacttaccattaacagcaacaagaaaaatcacctaaaattggtgaaatgaatgaaactactcttgatgaaatatatactagtgagaaataatattaaataaattattcagtgggacaaaaaggtgagttttattctatcttaactgtctacaatacatttgaattgtctggaggagccttaagtccatattctgcaccttgaggacaaccaaatgagaaattttatttcaggtcagtaagtagaatttatgaagagaaaggagataattatgaggaatccctaggaaaattgggaggaaaacaacagttgtatagttgggagtagttctttaggatacgctcctcccttccttcttaccagcacttccttcctttctttctgactatttggatcccagtagcctgctcccaacctcatttcacctgctaaatctcttcttcctctgcctgcctcttcctggcactactttactgctattttaccaacctgaacatttggataaaacctagctcaggtaagaacttaattactttcaaaatatacaagggatatgggaggagacagcatggatacagtggagcagtagtcagtagtcagagcctaaattctattttcatttctgccgcttgaagctttatggccttaggcaaatcatctcacctttctgggtttcacttttctcatctgaaattgaactcaagagtcttctagttctaacacaggatttcttcttgtgaatgagaatataagatatggaaatatttgaagccattagattgtttacagtgctgagatttgagagcccctagcattggttctgataaggaatcgaaataaatcctgccattattatgggggccagtattgagattttagtggaggcagaagaagaccttgcacatctttagtgagccttcaagttgtgaagaaacatcctgctaaggtatagatcaaacccagtgaaatgaaactataggaatgaaactacatcatcaaggtttctggacccacttatttcaacttgtgttcaatgtaataaaattccgctaccaataaaattattaatgttttaagaccctttaaacctattgtggctacagtgtgctgacttgcccttttataggccagtctgcttccttcagtccctgctctcaaaggggaaatcccatcacctcagctaaccagaccgaagaagagaattggacggccgatggtggcctctcctaaccagaggcaccaggatcatctacgaccgaaagttcctgctggagtgcaagaactcacccattgcccggacacccccctgctgcctccctcagattcccggggtcacaactcctccaacagcccctctctccaagctggaggagctgaaggagcaggagacagaggaagagatacccgatgacgcacaatttgaaatggacatctaatccagtgcagatgacctggcatgtggagttacagagggatccctcatgccactgctgccaccacctcttcctggggcatccaaaggccagctggcctcatctaatctggaagggagtgacttgttagttccaggcctcctttagttctgaggcagctagaccagggataggagtgggcaacttgccaagcccttaactctacttcctcttcagtctgtggtactcctcctaaccctaaaccctctatgctcaggggctggaactggggaatggagtaagtcaccttctgactgcttagtaaacattcaaagaaaaaa

SEQ ID NO: 375999 - DNA, 8356 bp, Homo sapiens
  misc_feature (6213)..(6213): n is a, c, g, or t
  misc_feature (6284)..(6284): n is a, c, g, or t
tagcaatatgaatattgtttttcagctgtgagtaccagagtgcccactggttccaacagttcttctcagaccacagagtgtcttacacctgaatcctgttcgcagactacaagcaatgtggcttcccaatcgatgcctcctgtgtatccttcagttgacattgatgcacatactgagagcaatcatgacacagcattaacactagcttgtgcaggtggtcatgaagaacttgtatctgtgctcattgcacgggatgccaaaattgaacacagagacaaaaaaggtttcacaccactaatcctggcagcaacagcagggcatgttggagttgttgaaatccttttggataaaggtggagatatagaagcacagtctgaacgaactaaggatactccgctttcattggcatgttctggtggacgtcaggaggtggtagacttgctgctggctcgaggtgcaaataaagaacataggaacgtatctgattatacaccactgagtctagctgcgtctggaggatatgttaatatcattaagattctgcttaatgctggggcagaaattaattcaaggactgggagtaaactaggtatttctcccctgatgttggctgcaatgaatggacatgttcctgcagtaaaattgctgctcgatatgggttcagacattaatgcccaaatagagaccaatcggaacacggctctcaccctggcctgtttccagggccgagcagaagtagtgagtttgcttctggaccgaaaagccaatgttgaacatagggcaaagacgggtcttacccccttgatggaagcagcttctggagggtatgcagaggttggaagagttcttcttgataaaggagcagatgttaatgctccccctgtgccttcctcaagagatactgctttaacaatagcagcagacaaaggtcactacaaattttgtgaactcctgattcataggggagcccacattgatgttcgtaacaaaaagggaaatacgccactttggctggcatccaatggaggtcattttgatgttgtgcagttgctagtgcaagcaggtgctgatgtggatgcagcagataaccggaaaatcacacctcttatgtcagcatttcgcaagggtcatgtaaaagttgttcaatatttggtaaaggaagtaaatcagttcccttctgatatagaatgcatgagatacatagcaacaattacagataaggaactgttgaaaaaatgtcatcaatgtgtcgaaaccattgtgaaggctaaagaccagcaagctgcagaagcaaataagaatgcgagtattcttttaaaggaacttgatctggaaaagtcaagagaagagagcagaaagcaggctcttgctgctaaaagagaaaaaagaaaagaaaagagaaaaaagaaaaaagaggaacagaaaaggaaacaggaagaagatgaagaaaacaaacctaaggagaattcggaactaccagaggatgaagatgaagaggagaatgatgaagatgtggagcaagaagttcccatagaacctcctagtgcaaccaccaccactacgattggaatctctgcaacatctgcaacattcacaaatgtgtttgggaaaaaaagggccaatgtggtgacaactcccagcaccaatcggaaaaataagaagaacaaaacaaaagaaacccctcctacagcacatttaattttaccagaacaacatatgtctttagcccaacaaaaggcagataaaaataaaataaatggagaacctagaggtggtggtgcaggtgggaatagtgattcagataacttggacagcacagactgcaacagtgagagtagcagtggtggtaaaagccaagagttaaattttgtgatggatgtgaattcctctaaatacccctcactgctccttcattcccaagaagaaaagacaagtactgctacttccaaaactcagacacgacttgaaggtgaagtgactcctaattccttgtcaaccagctacaagacagtgtcattgccattaagctctccaaacataaagctgaatctcactagccctaaaaggggtcagaaaagagaagaagggtggaaagaagttgtacgaaggtcaaagaaattgtctgttccagcctcagtggtgtcgaggataatgggaagaggaggatgcaacatcactgcaatacaggatgttactggtgcccatattgatgtggataaacaaaaagataagaatggcgagagaatgatcacaataaggggtggcacagaatcaacaagatatgcagttcaactaatcaatgcactcattcaagatcctgctaaggaactggaagacttgattcctaaaaatcatatcagaacacctgccagcaccaaatcaattcatgctaacttctcatctggagtaggtaccacagcagcttccagtaaaaatgcatttcctttgggtgctccaactcttgtaacttcacaggcaacaacgttatctacgttccagcccgctaataaacttaataagaatgttccaacaaatgtacgttcttctttcccagtttctctacccttagcttatcctcaccctcattttgccctgctggctgctcaaactatgcaacagattcggcatcctcgcttacccatggcccagtttggaggaaccttctcaccttctcctaacacatggggaccattcccagtgagacctgtgaatcctggcaacacaaatagctctccaaagcataataacacaagccgtctacctaaccagaacgggactgttttaccctcagagtctgctggactagctactgccagttgtcctatcactgtctcttctgtagttgctgccagtcagcaactgtgtgtcactaatacccggactccttcatcagtcagaaagcagttgtttgcctgtgtgcctaagacaagtcctccagcaacagtgatttcttctgtgacaagcacttgtagttccctgccttctgtctcctctgcacctatcactagcgggcaagctcccaccacatttctacctgcaagtacttctcaagcacagctttcttcacaaaagatggagtctttctctgctgtgccacccaccaaagagaaagtgtccacacaggaccagcccatggcaaacctatgtaccccatcttcaactgcaaacagttgcagtagctctgccagcaacaccccgggagctccagaaactcacccatccagtagtcccactcctacttccagtaacacacaagaggaggcacagccatccagtgtgtctgatttaagtcctatgtcaatgccttttgcatctaactcagaacctgctccattgactttgacatcacccagaatggttgctgctgataatcaggacaccagtaatttacctcagttagctgtaccagcacctcgagtttctcatcgaatgcagcccagaggttctttttactccatggtaccaaatgcaactattcaccaggatccccagtctatttttgttacgaatccagttactttaacaccacctcaaggcccaccagctgcagtgcagctttcttcagctgtgaacattatgaatggttctcagatgcacataaacccagcaaataagtctttgccacctacatttggcccagccacacttttcaatcacttcagcagtctttttgatagtagtcaggtgccagctaaccagggctggggagatggtccactgtcctcacgagttgctacagatgcctctttcactgttcagtcagcgttcctgggtaactcagtgcttggacacttggaaaacatgcaccctgataactcaaaggcacctggcttcagaccaccttcccagcgagtttctactagtccagttgggttaccatccattgacccatcaggcagctccccatcttcctcttctgctcctctggcaagtttttccggcataccaggaacaagggttttcctgcaagggccagctcctgttgggactcctagtttcaacagacaacatttttctccccatccttggacaagcgcctcaaactcatgtgactctcctattccatctgtttcttcgggatcatcttcacctctttcagccacttctgccccaccaacgttgggccaaccaaaaggagtcagtgccagtcaagatcgaaagatacctcccccaattggaacagagagactggcccgaattcggcaaggagggtctgttgcacaagccccggcggggaccagttttgtcgctcccgttggacacagtggaatctggtcatttggtgtcaatgctgtgtcagaaggcttatcaggttggtcgcaatctgtgatggggaaccatccaatgcatcaacaattatcagacccaagcacattctcccaacatcagccaatggagagagatgattctggaatggtagccccctctaacatttttcatcagcctatggcaagtggttttgtggatttttctaaaggtctgccaatttccatgtatggaggcaccataataccctctcatcctcagcttgctgatgttccaggaggccctctgtttaatggacttcacaatccagatcctgcttggaaccctatgataaaagttatccaaaattcaactgaatgcactgatgcccagcaggtaaaatgggcttaatgctcttttgttttttagatttgtcacatcattctttttgttttgtgagaagtataagtactgaatatcaaaagtcataattgaccatttcgatctggattgctttttcaatatcaagatgatgctactgaacactttatttaatatatgtgtattcttcctaggcagaaacagtgaattgccattgcatttatatattcattttgtaactgtctaaagattcctaattagaaattccaatttttcctcccccttttcagatttggcctggcacgtgggcacctcatattggaaacatgcatctcaaatatgtcaactaagttagaaggtctttactctttagccttgtttaagaaacctatgaccttggaagaaccatggggatttttttttaatgtgcctaagaaattttctctgaggctttagcaatggaaatttgattgcccattgtataagaacaaattgatttcctatccacctgattatgttctctggttagtttagccattttgaacttaagatcatatgaccttagtgcttttggctaaacatacagaatactacttgtatgcagaagagaattagttgattacatgtttcaaccttttagggtgataaatacatgtataattgtttacatacttaaaaggaaaaagttgagtaaatttcttgtcatatagtggctctacgtaatgtagcctgtattaatgtgaaatatttaccagaatattcaataaaaagatgaacagtctttagaagtggggtgtgatcctttcagtggtcatgcaggtaccactcaatccacattatattgaaccagatggttaatactatatttgtaacaggcttctcacatttaacacttgagtcccttcttagactgccttaaaaaagcacttttaagactatttacctatttattctgtgttaaacattccttgttcccttgttgtcttccataatcctttaacatatgagaaagtttcaagctctggcaatgtgtcttatctgactttagctagcagataggccactgataggttttttctctatggatcatgagaatgtcaataagaacaattggatttaaatcagatgacactaaacaaatgtagggacacccaaattatcaacttcaggttccttctgtgcttcctgaccttttttatctgaaagatttgtctggttatagatattttaagctttatatgagttgggacataaggaggtgactcctgtcattctgttgtattattgaatcagctgagtaatatttataaatatgtgagtaattccaggcttagttccatggccctaagcatggagagtcaatatgtttaacaagctaaacagaggaaccctggaatgggctgctttggccaaaccataggctatgccgagaatcagcatagagaaggaaaagttatcccactgaaaagtatagtcatcaacttatttgtgttttaatatagctgaatttttcctggtcagtataggcaatacagaaaagaaaacaagaaaatgtttggagctgatggagaagccaaaactcatatnaaggcaaagaaggatgcacagagaaagagtagtaactagggacagaactatattagcagcacctttctacncttatgccaacaggaattcttaattttctctgcccaggtcctaaagccaggaccacatcagacacaccatgtttgttctgtgtcagatatacctgcttctttaatcttctatatcatcttacatatgagaaagcttccttaattaagcttatgtcttatgttttgttttgaatggattttgaaagtgttgtttattgaagctactactttgtagtgattgataaccacatcaagtatcattaaggggccccttgacctttgtgggggcagttgggtggggcacaaaagactccttggatcacctgtgtatcttgctgtttccacttaccattaacagcaacaagaaaaatcacctaaaattggtgaaatgaatgaaactactcttgatgaaatatatactagtgagaaataatattaaataaattattcagtgggacaaaaaggtgagttttattctatcttaactgtctacaatacatttgaattgtctggaggagccttaagtccatattctgcaccttgaggacaaccaaatgagaaattttatttcaggtcagtaagtagaatttatgaagagaaaggagataattatgaggaatccctaggaaaattgggaggaaaacaacagttgtatagttgggagtagttctttaggatacgctcctcccttccttcttaccagcacttccttcctttctttctgactatttggatcccagtagcctgctcccaacctcatttcacctgctaaatctcttcttcctctgcctgcctcttcctggcactactttactgctattttaccaacctgaacatttggataaaacctagctcaggtaagaacttaattactttcaaaatatacaagggatatgggaggagacagcatggatacagtggagcagtagtcagtagtcagagcctaaattctattttcatttctgccgcttgaagctttatggccttaggcaaatcatctcacctttctgggtttcacttttctcatctgaaattgaactcaagagtcttctagttctaacacaggatttcttcttgtgaatgagaatataagatatggaaatatttgaagccattagattgtttacagtgctgagatttgagagcccctagcattggttctgataaggaatcgaaataaatcctgccattattatgggggccagtattgagattttagtggaggcagaagaagaccttgcacatctttagtgagccttcaagttgtgaagaaacatcctgctaaggtatagatcaaacccagtgaaatgaaactataggaatgaaactacatcatcaaggtttctggacccacttatttcaacttgtgttcaatgtaataaaattccgctaccaataaaattattaatgttttaagaccctttaaacctattgtggctacagtgtgctgacttgcccttttataggccagtctgcttccttcagtccctgctctcaaaggggaaatcccatcacctcagctaaccagaccgaagaagagaattggacggccgatggtggcctctcctaaccagaggcaccaggatcatctacgaccgaaagttcctgctggagtgcaagaactcacccattgcccggacacccccctgctgcctccctcagattcccggggtcacaactcctccaacagcccctctctccaagctggaggagctgaaggagcaggagacagaggaagagatacccgatgacgcacaatttgaaatggacatctaatccagtgcagatgacctggcatgtggagttacagagggatccctcatgccactgctgccaccacctcttcctggggcatccaaaggccagctggcctcatctaatctggaagggagtgacttgttagttccaggcctcctttagttctgaggcagctagaccagggataggagtgggcaacttgccaagcccttaactctacttcctcttcagtctgtggtactcctcctaaccctaaaccctctatgctcaggggctggaactggggaatggagtaagtcaccttctgactgcttagtaaacattcaaagaaaaaa

SEQ ID NO: 376000 - DNA, 9381 bp, Homo sapiens
  misc_feature (7344)..(7344): n is a, c, g, or t
  misc_feature (7415)..(7415): n is a, c, g, or t
ttaaggcaggggctgatatagaacttggctgctccacacctctgatggaggcatctcaggagggacacctggaattggttaaatatttgctggcttctggcgctaatgtgcatgctacaacagcaacaggagacacagccttaacctatgcttgtgaaaatggacatacggatgttgcagatgttttacttcaagcaggggctgatttagaacatgaatctgaaggtggaagaacacctttgatgaaagctgcaagagctggtcatttgtgcactgtgcagtttcttattagcaaaggtgccaatgttaacagggctacagccaataatgatcatacagtagtgtcgctggcatgtgcaggaggccacctggcagttgttgagcttctcttggctcatggggctgaccctactcatcgactcaaggatggttcaacaatgctcattgaagctgcaaagggtggccatactaatgtagtttcttatctgttggattatccaaataatgttctgtcagttcccaccacagatgtgtctcagctccctccaccttctcaagatcagtctcaggtgccacgtgtgccaacgcatacacttgccatggttgtacctccccaggaacctgacagaacttcacaggagaactctcctgcccttttaggagtgcaaaaaggtacatccaagcagaagtccagttccctccaggtagcagatcaggacctactgccatcttttcacccataccagcctttggagtgcatagtagaggagactgaaggcaagctgaatgaactgggacaaagaattagtgctattgaaaaagcacagcttaagtcactggagttaattcaaggtgaacctctgaacaaagataagatagaagaacttaaaaagaacagagaagagcaagtccagaagaagaagaaaatattgaaagaactgcagaaagtggaaaggcagttgcagatgaaaacacagcagcaatttaccaaagaatacttggaaaccaaaggtcagaaagacacagtgtctctacaccaacagtgctctcatagaggagtcttcccagaaggggaaggagatggtagtctcccagaggatcacttttcagagttacctcaggttgacacaatcttatttaaagataatgatgttgatgatgagcaacagtctccaccatcggcagaacagattgattttgtcccagtccagcctttatcatctccacagtgtaacttttccagtgacttaggttctaatgggacaaattctcttgaacttcagaaagtatcaggtaatcagcagattgtaggacagcctcagattgctattactggacatgatcaggggctgttagttcaagaaccagatggactaatggttgcaactccagctcagacgcttaccgacactcttgatgacctgatagcagctgtgagtaccagagtgcccactggttccaacagttcttctcagaccacagagtgtcttacacctgaatcctgttcgcagactacaagcaatgtggcttcccaatcgatgcctcctgtgtatccttcagttgacattgatgcacatactgagagcaatcatgacacagcattaacactagcttgtgcaggtggtcatgaagaacttgtatctgtgctcattgcacgggatgccaaaattgaacacagagacaaaaaaggtttcacaccactaatcctggcagcaacagcagggcatgttggagttgttgaaatccttttggataaaggtggagatatagaagcacagtctgaacgaactaaggatactccgctttcattggcatgttctggtggacgtcaggaggtggtagacttgctgctggctcgaggtgcaaataaagaacataggaacgtatctgattatacaccactgagtctagctgcgtctggaggatatgttaatatcattaagattctgcttaatgctggggcagaaattaattcaaggactgggagtaaactaggtatttctcccctgatgttggctgcaatgaatggacatgttcctgcagtaaaattgctgctcgatatgggttcagacattaatgcccaaatagagaccaatcggaacacggctctcaccctggcctgtttccagggccgagcagaagtagtgagtttgcttctggaccgaaaagccaatgttgaacatagggcaaagacgggtcttacccccttgatggaagcagcttctggagggtatgcagaggttggaagagttcttcttgataaaggagcagatgttaatgctccccctgtgccttcctcaagagatactgctttaacaatagcagcagacaaaggtcactacaaattttgtgaactcctgattcataggggagcccacattgatgttcgtaacaaaaagggaaatacgccactttggctggcatccaatggaggtcattttgatgttgtgcagttgctagtgcaagcaggtgctgatgtggatgcagcagataaccggaaaatcacacctcttatgtcagcatttcgcaagggtcatgtaaaagttgttcaatatttggtaaaggaagtaaatcagttcccttctgatatagaatgcatgagatacatagcaacaattacagataaggaactgttgaaaaaatgtcatcaatgtgtcgaaaccattgtgaaggctaaagaccagcaagctgcagaagcaaataagaatgcgagtattcttttaaaggaacttgatctggaaaagtcaagagaagagagcagaaagcaggctcttgctgctaaaagagaaaaaagaaaagaaaagagaaaaaagaaaaaagaggaacagaaaaggaaacaggaagaagatgaagaaaacaaacctaaggagaattcggaactaccagaggatgaagatgaagaggagaatgatgaagatgtggagcaagaagttcccatagaacctcctagtgcaaccaccaccactacgattggaatctctgcaacatctgcaacattcacaaatgtgtttgggaaaaaaagggccaatgtggtgacaactcccagcaccaatcggaaaaataagaagaacaaaacaaaagaaacccctcctacagcacatttaattttaccagaacaacatatgtctttagcccaacaaaaggcagataaaaataaaataaatggagaacctagaggtggtggtgcaggtgggaatagtgattcagataacttggacagcacagactgcaacagtgagagtagcagtggtggtaaaagccaagagttaaattttgtgatggatgtgaattcctctaaatacccctcactgctccttcattcccaagaagaaaagacaagtactgctacttccaaaactcagacacgacttgaaggtgaagtgactcctaattccttgtcaaccagctacaagacagtgtcattgccattaagctctccaaacataaagctgaatctcactagccctaaaaggggtcagaaaagagaagaagggtggaaagaagttgtacgaaggtcaaagaaattgtctgttccagcctcagtggtgtcgaggataatgggaagaggaggatgcaacatcactgcaatacaggatgttactggtgcccatattgatgtggataaacaaaaagataagaatggcgagagaatgatcacaataaggggtggcacagaatcaacaagatatgcagttcaactaatcaatgcactcattcaagatcctgctaaggaactggaagacttgattcctaaaaatcatatcagaacacctgccagcaccaaatcaattcatgctaacttctcatctggagtaggtaccacagcagcttccagtaaaaatgcatttcctttgggtgctccaactcttgtaacttcacaggcaacaacgttatctacgttccagcccgctaataaacttaataagaatgttccaacaaatgtacgttcttctttcccagtttctctacccttagcttatcctcaccctcattttgccctgctggctgctcaaactatgcaacagattcggcatcctcgcttacccatggcccagtttggaggaaccttctcaccttctcctaacacatggggaccattcccagtgagacctgtgaatcctggcaacacaaatagctctccaaagcataataacacaagccgtctacctaaccagaacgggactgttttaccctcagagtctgctggactagctactgccagttgtcctatcactgtctcttctgtagttgctgccagtcagcaactgtgtgtcactaatacccggactccttcatcagtcagaaagcagttgtttgcctgtgtgcctaagacaagtcctccagcaacagtgatttcttctgtgacaagcacttgtagttccctgccttctgtctcctctgcacctatcactagcgggcaagctcccaccacatttctacctgcaagtacttctcaagcacagctttcttcacaaaagatggagtctttctctgctgtgccacccaccaaagagaaagtgtccacacaggaccagcccatggcaaacctatgtaccccatcttcaactgcaaacagttgcagtagctctgccagcaacaccccgggagctccagaaactcacccatccagtagtcccactcctacttccagtaacacacaagaggaggcacagccatccagtgtgtctgatttaagtcctatgtcaatgccttttgcatctaactcagaacctgctccattgactttgacatcacccagaatggttgctgctgataatcaggacaccagtaatttacctcagttagctgtaccagcacctcgagtttctcatcgaatgcagcccagaggttctttttactccatggtaccaaatgcaactattcaccaggatccccagtctatttttgttacgaatccagttactttaacaccacctcaaggcccaccagctgcagtgcagctttcttcagctgtgaacattatgaatggttctcagatgcacataaacccagcaaataagtctttgccacctacatttggcccagccacacttttcaatcacttcagcagtctttttgatagtagtcaggtgccagctaaccagggctggggagatggtccactgtcctcacgagttgctacagatgcctctttcactgttcagtcagcgttcctgggtaactcagtgcttggacacttggaaaacatgcaccctgataactcaaaggcacctggcttcagaccaccttcccagcgagtttctactagtccagttgggttaccatccattgacccatcaggcagctccccatcttcctcttctgctcctctggcaagtttttccggcataccaggaacaagggttttcctgcaagggccagctcctgttgggactcctagtttcaacagacaacatttttctccccatccttggacaagcgcctcaaactcatgtgactctcctattccatctgtttcttcgggatcatcttcacctctttcagccacttctgccccaccaacgttgggccaaccaaaaggagtcagtgccagtcaagatcgaaagatacctcccccaattggaacagagagactggcccgaattcggcaaggagggtctgttgcacaagccccggcggggaccagttttgtcgctcccgttggacacagtggaatctggtcatttggtgtcaatgctgtgtcagaaggcttatcaggttggtcgcaatctgtgatggggaaccatccaatgcatcaacaattatcagacccaagcacattctcccaacatcagccaatggagagagatgattctggaatggtagccccctctaacatttttcatcagcctatggcaagtggttttgtggatttttctaaaggtctgccaatttccatgtatggaggcaccataataccctctcatcctcagcttgctgatgttccaggaggccctctgtttaatggacttcacaatccagatcctgcttggaaccctatgataaaagttatccaaaattcaactgaatgcactgatgcccagcagatttggcctggcacgtgggcacctcatattggaaacatgcatctcaaatatgtcaactaagttagaaggtctttactctttagccttgtttaagaaacctatgaccttggaagaaccatggggatttttttttaatgtgcctaagaaattttctctgaggctttagcaatggaaatttgattgcccattgtataagaacaaattgatttcctatccacctgattatgttctctggttagtttagccattttgaacttaagatcatatgaccttagtgcttttggctaaacatacagaatactacttgtatgcagaagagaattagttgattacatgtttcaaccttttagggtgataaatacatgtataattgtttacatacttaaaaggaaaaagttgagtaaatttcttgtcatatagtggctctacgtaatgtagcctgtattaatgtgaaatatttaccagaatattcaataaaaagatgaacagtctttagaagtggggtgtgatcctttcagtggtcatgcaggtaccactcaatccacattatattgaaccagatggttaatactatatttgtaacaggcttctcacatttaacacttgagtcccttcttagactgccttaaaaaagcacttttaagactatttacctatttattctgtgttaaacattccttgttcccttgttgtcttccataatcctttaacatatgagaaagtttcaagctctggcaatgtgtcttatctgactttagctagcagataggccactgataggttttttctctatggatcatgagaatgtcaataagaacaattggatttaaatcagatgacactaaacaaatgtagggacacccaaattatcaacttcaggttccttctgtgcttcctgaccttttttatctgaaagatttgtctggttatagatattttaagctttatatgagttgggacataaggaggtgactcctgtcattctgttgtattattgaatcagctgagtaatatttataaatatgtgagtaattccaggcttagttccatggccctaagcatggagagtcaatatgtttaacaagctaaacagaggaaccctggaatgggctgctttggccaaaccataggctatgccgagaatcagcatagagaaggaaaagttatcccactgaaaagtatagtcatcaacttatttgtgttttaatatagctgaatttttcctggtcagtataggcaatacagaaaagaaaacaagaaaatgtttggagctgatggagaagccaaaactcatatnaaggcaaagaaggatgcacagagaaagagtagtaactagggacagaactatattagcagcacctttctacncttatgccaacaggaattcttaattttctctgcccaggtcctaaagccaggaccacatcagacacaccatgtttgttctgtgtcagatatacctgcttctttaatcttctatatcatcttacatatgagaaagcttccttaattaagcttatgtcttatgttttgttttgaatggattttgaaagtgttgtttattgaagctactactttgtagtgattgataaccacatcaagtatcattaaggggccccttgacctttgtgggggcagttgggtggggcacaaaagactccttggatcacctgtgtatcttgctgtttccacttaccattaacagcaacaagaaaaatcacctaaaattggtgaaatgaatgaaactactcttgatgaaatatatactagtgagaaataatattaaataaattattcagtgggacaaaaaggtgagttttattctatcttaactgtctacaatacatttgaattgtctggaggagccttaagtccatattctgcaccttgaggacaaccaaatgagaaattttatttcaggtcagtaagtagaatttatgaagagaaaggagataattatgaggaatccctaggaaaattgggaggaaaacaacagttgtatagttgggagtagttctttaggatacgctcctcccttccttcttaccagcacttccttcctttctttctgactatttggatcccagtagcctgctcccaacctcatttcacctgctaaatctcttcttcctctgcctgcctcttcctggcactactttactgctattttaccaacctgaacatttggataaaacctagctcaggtaagaacttaattactttcaaaatatacaagggatatgggaggagacagcatggatacagtggagcagtagtcagtagtcagagcctaaattctattttcatttctgccgcttgaagctttatggccttaggcaaatcatctcacctttctgggtttcacttttctcatctgaaattgaactcaagagtcttctagttctaacacaggatttcttcttgtgaatgagaatataagatatggaaatatttgaagccattagattgtttacagtgctgagatttgagagcccctagcattggttctgataaggaatcgaaataaatcctgccattattatgggggccagtattgagattttagtggaggcagaagaagaccttgcacatctttagtgagccttcaagttgtgaagaaacatcctgctaaggtatagatcaaacccagtgaaatgaaactataggaatgaaactacatcatcaaggtttctggacccacttatttcaacttgtgttcaatgtaataaaattccgctaccaataaaattattaatgttttaagaccctttaaacctattgtggctacagtgtgctgacttgcccttttataggccagtctgcttccttcagtccctgctctcaaaggggaaatcccatcacctcagctaaccagaccgaagaagagaattggacggccgatggtggcctctcctaaccagaggtaagaaatttcaggacttggaactacggtttccctctcttcatgtagattctggccaagtcctccccacaatccgaaaactagtgcaagagagaaccatccttagtttaagttaacttacagaagtggaggccgggcatggtggcttacgcttgtaatcccagcactttgggaggccgaggtgggtggattatctgaggtcaggagtttgagaccagcttgggcaacatggtgaaaccccatctctactaaaaatacaaaagttagccaggtgtggtggcatgtgcctgtaatcccagctactcagcaggctgaggcaggagaatcgctagaacccaggaggtggaagctgcagtgagccaagatcacgctactgcactccagcctgggcaacagagcaagactctctct

SEQ ID NO: 376001 - DNA, 5171 bp, Homo sapiens
ttaaggcaggggctgatatagaacttggctgctccacacctctgatggaggcatctcaggagggacacctggaattggttaaatatttgctggcttctggcgctaatgtgcatgctacaacagcaacaggagacacagccttaacctatgcttgtgaaaatggacatacggatgttgcagatgttttacttcaagcaggggctgatttagaacatgaatctgaaggtggaagaacacctttgatgaaagctgcaagagctggtcatttgtgcactgtgcagtttcttattagcaaaggtgccaatgttaacagggctacagccaataatgatcatacagtagtgtcgctggcatgtgcaggaggccacctggcagttgttgagcttctcttggctcatggggctgaccctactcatcgactcaaggatggttcaacaatgctcattgaagctgcaaagggtggccatactaatgtagtttcttatctgttggattatccaaataatgttctgtcagttcccaccacagatgtgtctcagctccctccaccttctcaagatcagtctcaggtgccacgtgtgccaacgcatacacttgccatggttgtacctccccaggaacctgacagaacttcacaggagaactctcctgcccttttaggagtgcaaaaaggtacatccaagcagaagtccagttccctccaggtagcagatcaggacctactgccatcttttcacccataccagcctttggagtgcatagtagaggagactgaaggcaagctgaatgaactgggacaaagaattagtgctattgaaaaagcacagcttaagtcactggagttaattcaaggtgaacctctgaacaaagataagatagaagaacttaaaaagaacagagaagagcaagtccagaagaagaagaaaatattgaaagaactgcagaaagtggaaaggcagttgcagatgaaaacacagcagcaatttaccaaagaatacttggaaaccaaaggtcagaaagacacagtgtctctacaccaacagtgctctcatagaggagtcttcccagaaggggaaggagatggtagtctcccagaggatcacttttcagagttacctcaggttgacacaatcttatttaaagataatgatgttgatgatgagcaacagtctccaccatcggcagaacagattgattttgtcccagtccagcctttatcatctccacagtgtaacttttccagtgacttaggttctaatgggacaaattctcttgaacttcagaaagtatcaggtaatcagcagattgtaggacagcctcagattgctattactggacatgatcaggggctgttagttcaagaaccagatggactaatggttgcaactccagctcagacgcttaccgacactcttgatgacctgatagcagctgtgagtaccagagtgcccactggttccaacagttcttctcagaccacagagtgtcttacacctgaatcctgttcgcagactacaagcaatgtggcttcccaatcgatgcctcctgtgtatccttcagttgacattgatgcacatactgagagcaatcatgacacagcattaacactagcttgtgcaggtggtcatgaagaacttgtatctgtgctcattgcacgggatgccaaaattgaacacagagacaaaaaaggtttcacaccactaatcctggcagcaacagcagggcatgttggagttgttgaaatccttttggataaaggtggagatatagaagcacagtctgaacgaactaaggatactccgctttcattggcatgttctggtggacgtcaggaggtggtagacttgctgctggctcgaggtgcaaataaagaacataggaacgtatctgattatacaccactgagtctagctgcgtctggaggatatgttaatatcattaagattctgcttaatgctggggcagaaattaattcaaggactgggagtaaactaggtatttctcccctgatgttggctgcaatgaatggacatgttcctgcagtaaaattgctgctcgatatgggttcagacattaatgcccaaatagagaccaatcggaacacggctctcaccctggcctgtttccagggccgagcagaagtagtgagtttgcttctggaccgaaaagccaatgttgaacatagggcaaagacgggtcttacccccttgatggaagcagcttctggagggtatgcagaggttggaagagttcttcttgataaaggagcagatgttaatgctccccctgtgccttcctcaagagatactgctttaacaatagcagcagacaaaggtcactacaaattttgtgaactcctgattcataggggagcccacattgatgttcgtaacaaaaagggaaatacgccactttggctggcatccaatggaggtcattttgatgttgtgcagttgctagtgcaagcaggtgctgatgtggatgcagcagataaccggaaaatcacacctcttatgtcagcatttcgcaagggtcatgtaaaagttgttcaatatttggtaaaggaagtaaatcagttcccttctgatatagaatgcatgagatacatagcaacaattacagataaggaactgttgaaaaaatgtcatcaatgtgtcgaaaccattgtgaaggctaaagaccagcaagctgcagaagcaaataagaatgcgagtattcttttaaaggaacttgatctggaaaagtcaagagaagagagcagaaagcaggctcttgctgctaaaagagaaaaaagaaaagaaaagagaaaaaagaaaaaagaggaacagaaaaggaaacaggaagaagatgaagaaaacaaacctaaggagaattcggaactaccagaggatgaagatgaagaggagaatgatgaagatgtggagcaagaagttcccatagaacctcctagtgcaaccaccaccactacgattggaatctctgcaacatctgcaacattcacaaatgtgtttgggaaaaaaagggccaatgtggtgacaactcccagcaccaatcggaaaaataagaagaacaaaacaaaagaaacccctcctacagcacatttaattttaccagaacaacatatgtctttagcccaacaaaaggcagataaaaataaaataaatggagaacctagaggtggtggtgcaggtgggaatagtgattcagataacttggacagcacagactgcaacagtgagagtagcagtggtggtaaaagccaagagttaaattttgtgatggatgtgaattcctctaaatacccctcactgctccttcattcccaagaagaaaagacaagtactgctacttccaaaactcagacacgacttgaaggtgaagtgactcctaattccttgtcaaccagctacaagacagtgtcattgccattaagctctccaaacataaagctgaatctcactagccctaaaaggggtcagaaaagagaagaagggtggaaagaagttgtacgaaggtcaaagaaattgtctgttccagcctcagtggtgtcgaggataatgggaagaggaggatgcaacatcactgcaatacaggatgttactggtgcccatattgatgtggataaacaaaaagataagaatggcgagagaatgatcacaataaggggtggcacagaatcaacaagatatgcagttcaactaatcaatgcactcattcaagatcctgctaaggaactggaagacttgattcctaaaaatcatatcagaacacctgccagcaccaaatcaattcatgctaacttctcatctggagtaggtaccacagcagcttccagtaaaaatgcatttcctttgggtgctccaactcttgtaacttcacaggcaacaacgttatctacgttccagcccgctaataaacttaataagaatgttccaacaaatgtacgttcttctttcccagtttctctacccttagcttatcctcaccctcattttgccctgctggctgctcaaactatgcaacagattcggcatcctcgcttacccatggcccagtttggaggaaccttctcaccttctcctaacacatggggaccattcccagtgagacctgtgaatcctggcaacacaaatagctctccaaagcataataacacaagccgtctacctaaccagaacgggactgttttaccctcagagtctgctggactagctactgccagttgtcctatcactgtctcttctgtagttgctgccagtcagcaactgtgtgtcactaatacccggactccttcatcagtcagaaagcagttgtttgcctgtgtgcctaagacaagtcctccagcaacagtgatttcttctgtgacaagcacttgtagttccctgccttctgtctcctctgcacctatcactagcgggcaagctcccaccacatttctacctgcaagtacttctcaagcacagctttcttcacaaaagatggagtctttctctgctgtgccacccaccaaagagaaagtgtccacacaggaccagcccatggcaaacctatgtaccccatcttcaactgcaaacagttgcagtagctctgccagcaacaccccgggagctccagaaactcacccatccagtagtcccactcctacttccagtaacacacaagaggaggcacagccatccagtgtgtctgatttaagtcctatgtcaatgccttttgcatctaactcagaacctgctccattgactttgacatcacccagaatggttgctgctgataatcaggacaccagtaatttacctcagttagctgtaccagcacctcgagtttctcatcgaatgcagcccagaggttctttttactccatggtaccaaatgcaactattcaccaggatccccagtctatttttgttacgaatccagttactctttgggaggccgaggtgggaggatcacttgaggtcaggagtttgagaccagtctgaccaaagtggtgaaaccccgtctccactaaaaatataaaaattagccaggcatgctggcgtgggcctgtaatccctgctactcgggaggctgaggcaggagaatcacttgaacccgggaggtggaggttgcagtgagccgagattgtgccacagtactccagcctgggtgacacagcgagactctgtctc

SEQ ID NO: 376002 - DNA, 5820 bp, Homo sapiens
ttaaggcaggggctgatatagaacttggctgctccacacctctgatggaggcatctcaggagggacacctggaattggttaaatatttgctggcttctggcgctaatgtgcatgctacaacagcaacaggagacacagccttaacctatgcttgtgaaaatggacatacggatgttgcagatgttttacttcaagcaggggctgatttagaacatgaatctgaaggtggaagaacacctttgatgaaagctgcaagagctggtcatttgtgcactgtgcagtttcttattagcaaaggtgccaatgttaacagggctacagccaataatgatcatacagtagtgtcgctggcatgtgcaggaggccacctggcagttgttgagcttctcttggctcatggggctgaccctactcatcgactcaaggatggttcaacaatgctcattgaagctgcaaagggtggccatactaatgtagtttcttatctgttggattatccaaataatgttctgtcagttcccaccacagatgtgtctcagctccctccaccttctcaagatcagtctcaggtgccacgtgtgccaacgcatacacttgccatggttgtacctccccaggaacctgacagaacttcacaggagaactctcctgcccttttaggagtgcaaaaaggtacatccaagcagaagtccagttccctccaggtagcagatcaggacctactgccatcttttcacccataccagcctttggagtgcatagtagaggagactgaaggcaagctgaatgaactgggacaaagaattagtgctattgaaaaagcacagcttaagtcactggagttaattcaaggtgaacctctgaacaaagataagatagaagaacttaaaaagaacagagaagagcaagtccagaagaagaagaaaatattgaaagaactgcagaaagtggaaaggcagttgcagatgaaaacacagcagcaatttaccaaagaatacttggaaaccaaaggtcagaaagacacagtgtctctacaccaacagtgctctcatagaggagtcttcccagaaggggaaggagatggtagtctcccagaggatcacttttcagagttacctcaggttgacacaatcttatttaaagataatgatgttgatgatgagcaacagtctccaccatcggcagaacagattgattttgtcccagtccagcctttatcatctccacagtgtaacttttccagtgacttaggttctaatgggacaaattctcttgaacttcagaaagtatcaggtaatcagcagattgtaggacagcctcagattgctattactggacatgatcaggggctgttagttcaagaaccagatggactaatggttgcaactccagctcagacgcttaccgacactcttgatgacctgatagcagctgtgagtaccagagtgcccactggttccaacagttcttctcagaccacagagtgtcttacacctgaatcctgttcgcagactacaagcaatgtggcttcccaatcgatgcctcctgtgtatccttcagttgacattgatgcacatactgagagcaatcatgacacagcattaacactagcttgtgcaggtggtcatgaagaacttgtatctgtgctcattgcacgggatgccaaaattgaacacagagacaaaaaaggtttcacaccactaatcctggcagcaacagcagggcatgttggagttgttgaaatccttttggataaaggtggagatatagaagcacagtctgaacgaactaaggatactccgctttcattggcatgttctggtggacgtcaggaggtggtagacttgctgctggctcgaggtgcaaataaagaacataggaacgtatctgattatacaccactgagtctagctgcgtctggaggatatgttaatatcattaagattctgcttaatgctggggcagaaattaattcaaggactgggagtaaactaggtatttctcccctgatgttggctgcaatgaatggacatgttcctgcagtaaaattgctgctcgatatgggttcagacattaatgcccaaatagagaccaatcggaacacggctctcaccctggcctgtttccagggccgagcagaagtagtgagtttgcttctggaccgaaaagccaatgttgaacatagggcaaagacgggtcttacccccttgatggaagcagcttctggagggtatgcagaggttggaagagttcttcttgataaaggagcagatgttaatgctccccctgtgccttcctcaagagatactgctttaacaatagcagcagacaaaggtcactacaaattttgtgaactcctgattcataggggagcccacattgatgttcgtaacaaaaagggaaatacgccactttggctggcatccaatggaggtcattttgatgttgtgcagttgctagtgcaagcaggtgctgatgtggatgcagcagataaccggaaaatcacacctcttatgtcagcatttcgcaagggtcatgtaaaagttgttcaatatttggtaaaggaagtaaatcagttcccttctgatatagaatgcatgagatacatagcaacaattacagataaggaactgttgaaaaaatgtcatcaatgtgtcgaaaccattgtgaaggctaaagaccagcaagctgcagaagcaaataagaatgcgagtattcttttaaaggaacttgatctggaaaagtcaagagaagagagcagaaagcaggctcttgctgctaaaagagaaaaaagaaaagaaaagagaaaaaagaaaaaagaggaacagaaaaggaaacaggaagaagatgaagaaaacaaacctaaggagaattcggaactaccagaggatgaagatgaagaggagaatgatgaagatgtggagcaagaagttcccatagaacctcctagtgcaaccaccaccactacgattggaatctctgcaacatctgcaacattcacaaatgtgtttgggaaaaaaagggccaatgtggtgacaactcccagcaccaatcggaaaaataagaagaacaaaacaaaagaaacccctcctacagcacatttaattttaccagaacaacatatgtctttagcccaacaaaaggcagataaaaataaaataaatggagaacctagaggtggtggtgcaggtgggaatagtgattcagataacttggacagcacagactgcaacagtgagagtagcagtggtggtaaaagccaagagttaaattttgtgatggatgtgaattcctctaaatacccctcactgctccttcattcccaagaagaaaagacaagtactgctacttccaaaactcagacacgacttgaaggtgaagtgactcctaattccttgtcaaccagctacaagacagtgtcattgccattaagctctccaaacataaagctgaatctcactagccctaaaaggggtcagaaaagagaagaagggtggaaagaagttgtacgaaggtcaaagaaattgtctgttccagcctcagtggtgtcgaggataatgggaagaggaggatgcaacatcactgcaatacaggatgttactggtgcccatattgatgtggataaacaaaaagataagaatggcgagagaatgatcacaataaggggtggcacagaatcaacaagatatgcagttcaactaatcaatgcactcattcaagatcctgctaaggaactggaagacttgattcctaaaaatcatatcagaacacctgccagcaccaaatcaattcatgctaacttctcatctggagtaggtaccacagcagcttccagtaaaaatgcatttcctttgggtgctccaactcttgtaacttcacaggcaacaacgttatctacgttccagcccgctaataaacttaataagaatgttccaacaaatgtacgttcttctttcccagtttctctacccttagcttatcctcaccctcattttgccctgctggctgctcaaactatgcaacagattcggcatcctcgcttacccatggcccagtttggaggaaccttctcaccttctcctaacacatggggaccattcccagtgagacctgtgaatcctggcaacacaaatagctctccaaagcataataacacaagccgtctacctaaccagaacgggactgttttaccctcagagtctgctggactagctactgccagttgtcctatcactgtctcttctgtagttgctgccagtcagcaactgtgtgtcactaatacccggactccttcatcagtcagaaagcagttgtttgcctgtgtgcctaagacaagtcctccagcaacagtgatttcttctgtgacaagcacttgtagttccctgccttctgtctcctctgcacctatcactagcgggcaagctcccaccacatttctacctgcaagtacttctcaagcacagctttcttcacaaaagatggagtctttctctgctgtgccacccaccaaagagaaagtgtccacacaggaccagcccatggcaaacctatgtaccccatcttcaactgcaaacagttgcagtagctctgccagcaacaccccgggagctccagaaactcacccatccagtagtcccactcctacttccagtaacacacaagaggaggcacagccatccagtgtgtctgatttaagtcctatgtcaatgccttttgcatctaactcagaacctgctccattgactttgacatcacccagaatggttgctgctgataatcaggacaccagtaatttacctcagttagctgtaccagcacctcgagtttctcatcgaatgcagcccagaggttctttttactccatggtaccaaatgcaactattcaccaggatccccagtctatttttgttacgaatccagttactttaacaccacctcaaggcccaccagctgcagtgcagctttcttcagctgtgaacattatgaatggttctcagatgcacataaacccagcaaataagtctttgccacctacatttggcccagccacacttttcaatcacttcagcagtctttttgatagtagtcaggtgccagctaaccagggctggggagatggtccactgtcctcacgagttgctacagatgcctctttcactgttcagtcagcgttcctgggtaactcagtgcttggacacttggaaaacatgcaccctgataactcaaaggcacctggcttcagaccaccttcccagcgagtttctactagtccagttgggttaccatccattgacccatcaggcagctccccatcttcctcttctgctcctctggcaagtttttccggcataccaggaacaagggttttcctgcaagggccagctcctgttgggactcctagtttcaacagacaacatttttctccccatccttggacaagcgcctcaaactcatgtaggaatcctggaggaactcttcccaaagagttttgaataagttattaaatcatttatttcagttacaacaccatgttgtaactttagtaaactaagtggtatacagatgcccaaggtttgttctgtggtcatgtgaaaaaattgtcagtcatttttagcatagaaaacttgagaattattctttcaagccaaaaatgttttacagtagaacttggatcaagaaaagaggtactaggctgggtgcagtggctgacacctgtaatcccagcactttgggaggcctaggcaagaggatcgcttgagcccagcagttggagaccagcctgggcaacagcaagaccctgtctctattaaaaaaaaaaaa

SEQ ID NO: 376003 - DNA, 5724 bp, Homo sapiens
ttaaggcaggggctgatatagaacttggctgctccacacctctgatggaggcatctcaggagggacacctggaattggttaaatatttgctggcttctggcgctaatgtgcatgctacaacagcaacaggagacacagccttaacctatgcttgtgaaaatggacatacggatgttgcagatgttttacttcaagcaggggctgatttagaacatgaatctgaaggtggaagaacacctttgatgaaagctgcaagagctggtcatttgtgcactgtgcagtttcttattagcaaaggtgccaatgttaacagggctacagccaataatgatcatacagtagtgtcgctggcatgtgcaggaggccacctggcagttgttgagcttctcttggctcatggggctgaccctactcatcgactcaaggatggttcaacaatgctcattgaagctgcaaagggtggccatactaatgtagtttcttatctgttggattatccaaataatgttctgtcagttcccaccacagatgtgtctcagctccctccaccttctcaagatcagtctcaggtgccacgtgtgccaacgcatacacttgccatggttgtacctccccaggaacctgacagaacttcacaggagaactctcctgcccttttaggagtgcaaaaaggtacatccaagcagaagtccagttccctccaggtagcagatcaggacctactgccatcttttcacccataccagcctttggagtgcatagtagaggagactgaaggcaagctgaatgaactgggacaaagaattagtgctattgaaaaagcacagcttaagtcactggagttaattcaaggtgaacctctgaacaaagataagatagaagaacttaaaaagaacagagaagagcaagtccagaagaagaagaaaatattgaaagaactgcagaaagtggaaaggcagttgcagatgaaaacacagcagcaatttaccaaagaatacttggaaaccaaaggtcagaaagacacagtgtctctacaccaacagtgctctcatagaggagtcttcccagaaggggaaggagatggtagtctcccagaggatcacttttcagagttacctcaggttgacacaatcttatttaaagataatgatgttgatgatgagcaacagtctccaccatcggcagaacagattgattttgtcccagtccagcctttatcatctccacagtgtaacttttccagtgacttaggttctaatgggacaaattctcttgaacttcagaaagtatcaggtaatcagcagattgtaggacagcctcagattgctattactggacatgatcaggggctgttagttcaagaaccagatggactaatggttgcaactccagctcagacgcttaccgacactcttgatgacctgatagcagctgtgagtaccagagtgcccactggttccaacagttcttctcagaccacagagtgtcttacacctgaatcctgttcgcagactacaagcaatgtggcttcccaatcgatgcctcctgtgtatccttcagttgacattgatgcacatactgagagcaatcatgacacagcattaacactagcttgtgcaggtggtcatgaagaacttgtatctgtgctcattgcacgggatgccaaaattgaacacagagacaaaaaaggtttcacaccactaatcctggcagcaacagcagggcatgttggagttgttgaaatccttttggataaaggtggagatatagaagcacagtctgaacgaactaaggatactccgctttcattggcatgttctggtggacgtcaggaggtggtagacttgctgctggctcgaggtgcaaataaagaacataggaacgtatctgattatacaccactgagtctagctgcgtctggaggatatgttaatatcattaagattctgcttaatgctggggcagaaattaattcaaggactgggagtaaactaggtatttctcccctgatgttggctgcaatgaatggacatgttcctgcagtaaaattgctgctcgatatgggttcagacattaatgcccaaatagagaccaatcggaacacggctctcaccctggcctgtttccagggccgagcagaagtagtgagtttgcttctggaccgaaaagccaatgttgaacatagggcaaagacgggtcttacccccttgatggaagcagcttctggagggtatgcagaggttggaagagttcttcttgataaaggagcagatgttaatgctccccctgtgccttcctcaagagatactgctttaacaatagcagcagacaaaggtcactacaaattttgtgaactcctgattcataggggagcccacattgatgttcgtaacaaaaagggaaatacgccactttggctggcatccaatggaggtcattttgatgttgtgcagttgctagtgcaagcaggtgctgatgtggatgcagcagataaccggaaaatcacacctcttatgtcagcatttcgcaagggtcatgtaaaagttgttcaatatttggtaaaggaagtaaatcagttcccttctgatatagaatgcatgagatacatagcaacaattacagataaggaactgttgaaaaaatgtcatcaatgtgtcgaaaccattgtgaaggctaaagaccagcaagctgcagaagcaaataagaatgcgagtattcttttaaaggaacttgatctggaaaagtcaagagaagagagcagaaagcaggctcttgctgctaaaagagaaaaaagaaaagaaaagagaaaaaagaaaaaagaggaacagaaaaggaaacaggaagaagatgaagaaaacaaacctaaggagaattcggaactaccagaggatgaagatgaagaggagaatgatgaagatgtggagcaagaagttcccatagaacctcctagtgcaaccaccaccactacgattggaatctctgcaacatctgcaacattcacaaatgtgtttgggaaaaaaagggccaatgtggtgacaactcccagcaccaatcggaaaaataagaagaacaaaacaaaagaaacccctcctacagcacatttaattttaccagaacaacatatgtctttagcccaacaaaaggcagataaaaataaaataaatggagaacctagaggtggtggtgcaggtgggaatagtgattcagataacttggacagcacagactgcaacagtgagagtagcagtggtggtaaaagccaagagttaaattttgtgatggatgtgaattcctctaaatacccctcactgctccttcattcccaagaagaaaagacaagtactgctacttccaaaactcagacacgacttgaaggtgaagtgactcctaattccttgtcaaccagctacaagacagtgtcattgccattaagctctccaaacataaagctgaatctcactagccctaaaaggggtcagaaaagagaagaagggtggaaagaagttgtacgaaggtcaaagaaattgtctgttccagcctcagtggtgtcgaggataatgggaagaggaggatgcaacatcactgcaatacaggatgttactggtgcccatattgatgtggataaacaaaaagataagaatggcgagagaatgatcacaataaggggtggcacagaatcaacaagatatgcagttcaactaatcaatgcactcattcaagatcctgctaaggaactggaagacttgattcctaaaaatcatatcagaacacctgccagcaccaaatcaattcatgctaacttctcatctggagtaggtaccacagcagcttccagtaaaaatgcatttcctttgggtgctccaactcttgtaacttcacaggcaacaacgttatctacgttccagcccgctaataaacttaataagaatgttccaacaaatgtacgttcttctttcccagtttctctacccttagcttatcctcaccctcattttgccctgctggctgctcaaactatgcaacagattcggcatcctcgcttacccatggcccagtttggaggaaccttctcaccttctcctaacacatggggaccattcccagtgagacctgtgaatcctggcaacacaaatagctctccaaagcataataacacaagccgtctacctaaccagaacgggactgttttaccctcagagtctgctggactagctactgccagttgtcctatcactgtctcttctgtagttgctgccagtcagcaactgtgtgtcactaatacccggactccttcatcagtcagaaagcagttgtttgcctgtgtgcctaagacaagtcctccagcaacagtgatttcttctgtgacaagcacttgtagttccctgccttctgtctcctctgcacctatcactagcgggcaagctcccaccacatttctacctgcaagtacttctcaagcacagctttcttcacaaaagatggagtctttctctgctgtgccacccaccaaagagaaagtgtccacacaggaccagcccatggcaaacctatgtaccccatcttcaactgcaaacagttgcagtagctctgccagcaacaccccgggagctccagaaactcacccatccagtagtcccactcctacttccagtaacacacaagaggaggcacagccatccagtgtgtctgatttaagtcctatgtcaatgccttttgcatctaactcagaacctgctccattgactttgacatcacccagaatggttgctgctgataatcaggacaccagtaatttacctcagttagctgtaccagcacctcgagtttctcatcgaatgcagcccagaggttctttttactccatggtaccaaatgcaactattcaccaggatccccagtctatttttgttacgaatccagttactttaacaccacctcaaggcccaccagctgcagtgcagctttcttcagctgtgaacattatgaatggttctcagatgcacataaacccagcaaataagtctttgccacctacatttggcccagccacacttttcaatcacttcagcagtctttttgatagtagtcaggtgccagctaaccagggctggggagatggtccactgtcctcacgagttgctacagatgcctctttcactgttcagtcagcgttcctgggtaactcagtgcttggacacttggaaaacatgcaccctgataactcaaaggcacctggcttcagaccaccttcccagcgagtttctactagtccagttgggttaccatccattgacccatcaggcagctccccatcttcctgcttagcaggattaccaaaggtatcgtgaagagcgcttccgactgacgagcgagagcaccaaccagagggtcctatggtggtccattgctcagactgtcatcctcatcctcactggcatctggcagatgcgtcacctcaagagcttctttgaggccaagaagctggtgtagtgccctctttgtatgacccttcctttttacctcatttatttggtactttccccacacagtcctttatccacctggatttttagggaaaaaaatgaaaaagaataagtcacattggttccatggccacaaaccattcagatcagccacttgctgacctggttcttaaggacacatgacattagtccaatctttcaaaatcttgtcttagggcttgtgaggaatcagaactactcc

SEQ ID NO: 376004 - DNA, 7844 bp, Homo sapiens
  misc_feature (5701)..(5701): n is a, c, g, or t
  misc_feature (5772)..(5772): n is a, c, g, or t
tttaagcttaatattctatttggaagtatttgcctttttattcttaaattggtaggcatatatgcaaaatcaagggattcctttgtaattctgttgttttactttcttttattcttaagaataataatttttcttttcatgctaccttgtctaagattgttgtacttcttatagggtcatgtaaaagttgttcaatatttggtaaaggaagtaaatcagttcccttctgatatagaatgcatgagatacatagcaacaattacagataaggtaagtttaatatgctactgaagcacatttttgttctttgtggaatgatatgccaaagtgtgcagttaggaacttgttctttttatattctgaaaggttggtcacctgatctctttatgcgtttgtttctccatttgcaaaatagaggggtataatacttttgataaactattttgagatttctactgtggaccatagtcacagtgactacactaaggtactaaaccattagcctaatgagaaggcttcctaaggacatgcaggtttttagggaaatggtgtcttatttttgtgaaagattggactcaaaggataacttaatttggtttagtgacttttcagtttgaactttaacctctggactttaatgtgctcatcagcttaagttttatttggcctctttcattatatatttacataattctatttcctgctgtaggaactgttgaaaaaatgtcatcaatgtgtcgaaaccattgtgaaggctaaagaccagcaagctgcagaagcaaataagaatgcgagtattcttttaaaggaacttgatctggaaaagtcaagagaagagagcagaaagcaggctcttgctgctaaaagagaaaaaagaaaagaaaagagaaaaaagaaaaaagaggaacagaaaaggaaacaggaagaagatgaagaaaacaaacctaaggagaattcggaactaccagaggatgaagatgaagaggagaatgatgaagatgtggagcaagaagttcccatagaacctcctagtgcaaccaccaccactacgattggaatctctgcaacatctgcaacattcacaaatgtgtttgggaaaaaaagggccaatgtggtgacaactcccagcaccaatcggaaaaataagaagaacaaaacaaaagaaacccctcctacagcacatttaattttaccagaacaacatatgtctttagcccaacaaaaggcagataaaaataaaataaatggagaacctagaggtggtggtgcaggtgggaatagtgattcagataacttggacagcacagactgcaacagtgagagtagcagtggtggtaaaagccaagagttaaattttgtgatggatgtgaattcctctaaatacccctcactgctccttcattcccaagaagaaaagacaagtactgctacttccaaaactcagacacgacttgaaggtgaagtgactcctaattccttgtcaaccagctacaagacagtgtcattgccattaagctctccaaacataaagctgaatctcactagccctaaaaggggtcagaaaagagaagaagggtggaaagaagttgtacgaaggtcaaagaaattgtctgttccagcctcagtggtgtcgaggataatgggaagaggaggatgcaacatcactgcaatacaggatgttactggtgcccatattgatgtggataaacaaaaagataagaatggcgagagaatgatcacaataaggggtggcacagaatcaacaagatatgcagttcaactaatcaatgcactcattcaagatcctgctaaggaactggaagacttgattcctaaaaatcatatcagaacacctgccagcaccaaatcaattcatgctaacttctcatctggagtaggtaccacagcagcttccagtaaaaatgcatttcctttgggtgctccaactcttgtaacttcacaggcaacaacgttatctacgttccagcccgctaataaacttaataagaatgttccaacaaatgtacgttcttctttcccagtttctctacccttagcttatcctcaccctcattttgccctgctggctgctcaaactatgcaacagattcggcatcctcgcttacccatggcccagtttggaggaaccttctcaccttctcctaacacatggggaccattcccagtgagacctgtgaatcctggcaacacaaatagctctccaaagcataataacacaagccgtctacctaaccagaacgggactgttttaccctcagagtctgctggactagctactgccagttgtcctatcactgtctcttctgtagttgctgccagtcagcaactgtgtgtcactaatacccggactccttcatcagtcagaaagcagttgtttgcctgtgtgcctaagacaagtcctccagcaacagtgatttcttctgtgacaagcacttgtagttccctgccttctgtctcctctgcacctatcactagcgggcaagctcccaccacatttctacctgcaagtacttctcaagcacagctttcttcacaaaagatggagtctttctctgctgtgccacccaccaaagagaaagtgtccacacaggaccagcccatggcaaacctatgtaccccatcttcaactgcaaacagttgcagtagctctgccagcaacaccccgggagctccagaaactcacccatccagtagtcccactcctacttccagtaacacacaagaggaggcacagccatccagtgtgtctgatttaagtcctatgtcaatgccttttgcatctaactcagaacctgctccattgactttgacatcacccagaatggttgctgctgataatcaggacaccagtaatttacctcagttagctgtaccagcacctcgagtttctcatcgaatgcagcccagaggttctttttactccatggtaccaaatgcaactattcaccaggatccccagtctatttttgttacgaatccagttactttaacaccacctcaaggcccaccagctgcagtgcagctttcttcagctgtgaacattatgaatggttctcagatgcacataaacccagcaaataagtctttgccacctacatttggcccagccacacttttcaatcacttcagcagtctttttgatagtagtcaggtgccagctaaccagggctggggagatggtccactgtcctcacgagttgctacagatgcctctttcactgttcagtcagcgttcctgggtaactcagtgcttggacacttggaaaacatgcaccctgataactcaaaggcacctggcttcagaccaccttcccagcgagtttctactagtccagttgggttaccatccattgacccatcaggcagctccccatcttcctcttctgctcctctggcaagtttttccggcataccaggaacaagggttttcctgcaagggccagctcctgttgggactcctagtttcaacagacaacatttttctccccatccttggacaagcgcctcaaactcatgtgactctcctattccatctgtttcttcgggatcatcttcacctctttcagccacttctgccccaccaacgttgggccaaccaaaaggagtcagtgccagtcaagatcgaaagatacctcccccaattggaacagagagactggcccgaattcggcaaggagggtctgttgcacaagccccggcggggaccagttttgtcgctcccgttggacacagtggaatctggtcatttggtgtcaatgctgtgtcagaaggcttatcaggttggtcgcaatctgtgatggggaaccatccaatgcatcaacaattatcagacccaagcacattctcccaacatcagccaatggagagagatgattctggaatggtagccccctctaacatttttcatcagcctatggcaagtggttttgtggatttttctaaaggtctgccaatttccatgtatggaggcaccataataccctctcatcctcagcttgctgatgttccaggaggccctctgtttaatggacttcacaatccagatcctgcttggaaccctatgataaaagttatccaaaattcaactgaatgcactgatgcccagcaggtaaaatgggcttaatgctcttttgttttttagatttgtcacatcattctttttgttttgtgagaagtataagtactgaatatcaaaagtcataattgaccatttcgatctggattgctttttcaatatcaagatgatgctactgaacactttatttaatatatgtgtattcttcctaggcagaaacagtgaattgccattgcatttatatattcattttgtaactgtctaaagattcctaattagaaattccaatttttcctcccccttttcagatttggcctggcacgtgggcacctcatattggaaacatgcatctcaaatatgtcaactaagttagaaggtctttactctttagccttgtttaagaaacctatgaccttggaagaaccatggggatttttttttaatgtgcctaagaaattttctctgaggctttagcaatggaaatttgattgcccattgtataagaacaaattgatttcctatccacctgattatgttctctggttagtttagccattttgaacttaagatcatatgaccttagtgcttttggctaaacatacagaatactacttgtatgcagaagagaattagttgattacatgtttcaaccttttagggtgataaatacatgtataattgtttacatacttaaaaggaaaaagttgagtaaatttcttgtcatatagtggctctacgtaatgtagcctgtattaatgtgaaatatttaccagaatattcaataaaaagatgaacagtctttagaagtggggtgtgatcctttcagtggtcatgcaggtaccactcaatccacattatattgaaccagatggttaatactatatttgtaacaggcttctcacatttaacacttgagtcccttcttagactgccttaaaaaagcacttttaagactatttacctatttattctgtgttaaacattccttgttcccttgttgtcttccataatcctttaacatatgagaaagtttcaagctctggcaatgtgtcttatctgactttagctagcagataggccactgataggttttttctctatggatcatgagaatgtcaataagaacaattggatttaaatcagatgacactaaacaaatgtagggacacccaaattatcaacttcaggttccttctgtgcttcctgaccttttttatctgaaagatttgtctggttatagatattttaagctttatatgagttgggacataaggaggtgactcctgtcattctgttgtattattgaatcagctgagtaatatttataaatatgtgagtaattccaggcttagttccatggccctaagcatggagagtcaatatgtttaacaagctaaacagaggaaccctggaatgggctgctttggccaaaccataggctatgccgagaatcagcatagagaaggaaaagttatcccactgaaaagtatagtcatcaacttatttgtgttttaatatagctgaatttttcctggtcagtataggcaatacagaaaagaaaacaagaaaatgtttggagctgatggagaagccaaaactcatatnaaggcaaagaaggatgcacagagaaagagtagtaactagggacagaactatattagcagcacctttctacncttatgccaacaggaattcttaattttctctgcccaggtcctaaagccaggaccacatcagacacaccatgtttgttctgtgtcagatatacctgcttctttaatcttctatatcatcttacatatgagaaagcttccttaattaagcttatgtcttatgttttgttttgaatggattttgaaagtgttgtttattgaagctactactttgtagtgattgataaccacatcaagtatcattaaggggccccttgacctttgtgggggcagttgggtggggcacaaaagactccttggatcacctgtgtatcttgctgtttccacttaccattaacagcaacaagaaaaatcacctaaaattggtgaaatgaatgaaactactcttgatgaaatatatactagtgagaaataatattaaataaattattcagtgggacaaaaaggtgagttttattctatcttaactgtctacaatacatttgaattgtctggaggagccttaagtccatattctgcaccttgaggacaaccaaatgagaaattttatttcaggtcagtaagtagaatttatgaagagaaaggagataattatgaggaatccctaggaaaattgggaggaaaacaacagttgtatagttgggagtagttctttaggatacgctcctcccttccttcttaccagcacttccttcctttctttctgactatttggatcccagtagcctgctcccaacctcatttcacctgctaaatctcttcttcctctgcctgcctcttcctggcactactttactgctattttaccaacctgaacatttggataaaacctagctcaggtaagaacttaattactttcaaaatatacaagggatatgggaggagacagcatggatacagtggagcagtagtcagtagtcagagcctaaattctattttcatttctgccgcttgaagctttatggccttaggcaaatcatctcacctttctgggtttcacttttctcatctgaaattgaactcaagagtcttctagttctaacacaggatttcttcttgtgaatgagaatataagatatggaaatatttgaagccattagattgtttacagtgctgagatttgagagcccctagcattggttctgataaggaatcgaaataaatcctgccattattatgggggccagtattgagattttagtggaggcagaagaagaccttgcacatctttagtgagccttcaagttgtgaagaaacatcctgctaaggtatagatcaaacccagtgaaatgaaactataggaatgaaactacatcatcaaggtttctggacccacttatttcaacttgtgttcaatgtaataaaattccgctaccaataaaattattaatgttttaagaccctttaaacctattgtggctacagtgtgctgacttgcccttttataggccagtctgcttccttcagtccctgctctcaaaggggaaatcccatcacctcagctaaccagaccgaagaagagaattggacggccgatggtggcctctcctaaccagaggcaccaggatcatctacgaccgaaagttcctgctggagtgcaagaactcacccattgcccggacacccccctgctgcctccctcagattcccggggtcacaactcctccaacagcccctctctccaagctggaggagctgaaggagcaggagacagaggaagagatacccgatgacgcacaatttgaaatggacatctaatccagtgcagatgacctggcatgtggagttacagagggatccctcatgccactgctgccaccacctcttcctggggcatccaaaggccagctggcctcatctaatctggaagggagtgacttgttagttccaggcctcctttagttctgaggcagctagaccagggataggagtgggcaacttgccaagcccttaactctacttcctcttcagtctgtggtactcctcctaaccctaaaccctctatgctcaggggctggaactggggaatggagtaagtcaccttctgactgcttagtaaacattcaaagaaaaaa

SEQ ID NO: 376005 - DNA, 7209 bp, Homo sapiens
  misc_feature (5066)..(5066): n is a, c, g, or t
  misc_feature (5137)..(5137): n is a, c, g, or t
cgacctagaggacccccgtcctcatcatacctacctccttcatcatacctacccatagcaacaattacagataggaactgttgaaaaaatgtcatcaatgtgtcgaaaccattgtgaaggctaaagaccagcaagctgcagaagcaaataagaatgcgagtattcttttaaaggaacttgatctggaaaagtcaagagaagagagcagaaagcaggctcttgctgctaaaagagaaaaaagaaaagaaaagagaaaaaagaaaaaagaggaacagaaaaggaaacaggaagaagatgaagaaaacaaacctaaggagaattcggaactaccagaggatgaagatgaagaggagaatgatgaagatgtggagcaagaagttcccatagaacctcctagtgcaaccaccaccactacgattggaatctctgcaacatctgcaacattcacaaatgtgtttgggaaaaaaagggccaatgtggtgacaactcccagcaccaatcggaaaaataagaagaacaaaacaaaagaaacccctcctacagcacatttaattttaccagaacaacatatgtctttagcccaacaaaaggcagataaaaataaaataaatggagaacctagaggtggtggtgcaggtgggaatagtgattcagataacttggacagcacagactgcaacagtgagagtagcagtggtggtaaaagccaagagttaaattttgtgatggatgtgaattcctctaaatacccctcactgctccttcattcccaagaagaaaagacaagtactgctacttccaaaactcagacacgacttgaaggtgaagtgactcctaattccttgtcaaccagctacaagacagtgtcattgccattaagctctccaaacataaagctgaatctcactagccctaaaaggggtcagaaaagagaagaagggtggaaagaagttgtacgaaggtcaaagaaattgtctgttccagcctcagtggtgtcgaggataatgggaagaggaggatgcaacatcactgcaatacaggatgttactggtgcccatattgatgtggataaacaaaaagataagaatggcgagagaatgatcacaataaggggtggcacagaatcaacaagatatgcagttcaactaatcaatgcactcattcaagatcctgctaaggaactggaagacttgattcctaaaaatcatatcagaacacctgccagcaccaaatcaattcatgctaacttctcatctggagtaggtaccacagcagcttccagtaaaaatgcatttcctttgggtgctccaactcttgtaacttcacaggcaacaacgttatctacgttccagcccgctaataaacttaataagaatgttccaacaaatgtacgttcttctttcccagtttctctacccttagcttatcctcaccctcattttgccctgctggctgctcaaactatgcaacagattcggcatcctcgcttacccatggcccagtttggaggaaccttctcaccttctcctaacacatggggaccattcccagtgagacctgtgaatcctggcaacacaaatagctctccaaagcataataacacaagccgtctacctaaccagaacgggactgttttaccctcagagtctgctggactagctactgccagttgtcctatcactgtctcttctgtagttgctgccagtcagcaactgtgtgtcactaatacccggactccttcatcagtcagaaagcagttgtttgcctgtgtgcctaagacaagtcctccagcaacagtgatttcttctgtgacaagcacttgtagttccctgccttctgtctcctctgcacctatcactagcgggcaagctcccaccacatttctacctgcaagtacttctcaagcacagctttcttcacaaaagatggagtctttctctgctgtgccacccaccaaagagaaagtgtccacacaggaccagcccatggcaaacctatgtaccccatcttcaactgcaaacagttgcagtagctctgccagcaacaccccgggagctccagaaactcacccatccagtagtcccactcctacttccagtaacacacaagaggaggcacagccatccagtgtgtctgatttaagtcctatgtcaatgccttttgcatctaactcagaacctgctccattgactttgacatcacccagaatggttgctgctgataatcaggacaccagtaatttacctcagttagctgtaccagcacctcgagtttctcatcgaatgcagcccagaggttctttttactccatggtaccaaatgcaactattcaccaggatccccagtctatttttgttacgaatccagttactttaacaccacctcaaggcccaccagctgcagtgcagctttcttcagctgtgaacattatgaatggttctcagatgcacataaacccagcaaataagtctttgccacctacatttggcccagccacacttttcaatcacttcagcagtctttttgatagtagtcaggtgccagctaaccagggctggggagatggtccactgtcctcacgagttgctacagatgcctctttcactgttcagtcagcgttcctgggtaactcagtgcttggacacttggaaaacatgcaccctgataactcaaaggcacctggcttcagaccaccttcccagcgagtttctactagtccagttgggttaccatccattgacccatcaggcagctccccatcttcctcttctgctcctctggcaagtttttccggcataccaggaacaagggttttcctgcaagggccagctcctgttgggactcctagtttcaacagacaacatttttctccccatccttggacaagcgcctcaaactcatgtgactctcctattccatctgtttcttcgggatcatcttcacctctttcagccacttctgccccaccaacgttgggccaaccaaaaggagtcagtgccagtcaagatcgaaagatacctcccccaattggaacagagagactggcccgaattcggcaaggagggtctgttgcacaagccccggcggggaccagttttgtcgctcccgttggacacagtggaatctggtcatttggtgtcaatgctgtgtcagaaggcttatcaggttggtcgcaatctgtgatggggaaccatccaatgcatcaacaattatcagacccaagcacattctcccaacatcagccaatggagagagatgattctggaatggtagccccctctaacatttttcatcagcctatggcaagtggttttgtggatttttctaaaggtctgccaatttccatgtatggaggcaccataataccctctcatcctcagcttgctgatgttccaggaggccctctgtttaatggacttcacaatccagatcctgcttggaaccctatgataaaagttatccaaaattcaactgaatgcactgatgcccagcaggtaaaatgggcttaatgctcttttgttttttagatttgtcacatcattctttttgttttgtgagaagtataagtactgaatatcaaaagtcataattgaccatttcgatctggattgctttttcaatatcaagatgatgctactgaacactttatttaatatatgtgtattcttcctaggcagaaacagtgaattgccattgcatttatatattcattttgtaactgtctaaagattcctaattagaaattccaatttttcctcccccttttcagatttggcctggcacgtgggcacctcatattggaaacatgcatctcaaatatgtcaactaagttagaaggtctttactctttagccttgtttaagaaacctatgaccttggaagaaccatggggatttttttttaatgtgcctaagaaattttctctgaggctttagcaatggaaatttgattgcccattgtataagaacaaattgatttcctatccacctgattatgttctctggttagtttagccattttgaacttaagatcatatgaccttagtgcttttggctaaacatacagaatactacttgtatgcagaagagaattagttgattacatgtttcaaccttttagggtgataaatacatgtataattgtttacatacttaaaaggaaaaagttgagtaaatttcttgtcatatagtggctctacgtaatgtagcctgtattaatgtgaaatatttaccagaatattcaataaaaagatgaacagtctttagaagtggggtgtgatcctttcagtggtcatgcaggtaccactcaatccacattatattgaaccagatggttaatactatatttgtaacaggcttctcacatttaacacttgagtcccttcttagactgccttaaaaaagcacttttaagactatttacctatttattctgtgttaaacattccttgttcccttgttgtcttccataatcctttaacatatgagaaagtttcaagctctggcaatgtgtcttatctgactttagctagcagataggccactgataggttttttctctatggatcatgagaatgtcaataagaacaattggatttaaatcagatgacactaaacaaatgtagggacacccaaattatcaacttcaggttccttctgtgcttcctgaccttttttatctgaaagatttgtctggttatagatattttaagctttatatgagttgggacataaggaggtgactcctgtcattctgttgtattattgaatcagctgagtaatatttataaatatgtgagtaattccaggcttagttccatggccctaagcatggagagtcaatatgtttaacaagctaaacagaggaaccctggaatgggctgctttggccaaaccataggctatgccgagaatcagcatagagaaggaaaagttatcccactgaaaagtatagtcatcaacttatttgtgttttaatatagctgaatttttcctggtcagtataggcaatacagaaaagaaaacaagaaaatgtttggagctgatggagaagccaaaactcatatnaaggcaaagaaggatgcacagagaaagagtagtaactagggacagaactatattagcagcacctttctacncttatgccaacaggaattcttaattttctctgcccaggtcctaaagccaggaccacatcagacacaccatgtttgttctgtgtcagatatacctgcttctttaatcttctatatcatcttacatatgagaaagcttccttaattaagcttatgtcttatgttttgttttgaatggattttgaaagtgttgtttattgaagctactactttgtagtgattgataaccacatcaagtatcattaaggggccccttgacctttgtgggggcagttgggtggggcacaaaagactccttggatcacctgtgtatcttgctgtttccacttaccattaacagcaacaagaaaaatcacctaaaattggtgaaatgaatgaaactactcttgatgaaatatatactagtgagaaataatattaaataaattattcagtgggacaaaaaggtgagttttattctatcttaactgtctacaatacatttgaattgtctggaggagccttaagtccatattctgcaccttgaggacaaccaaatgagaaattttatttcaggtcagtaagtagaatttatgaagagaaaggagataattatgaggaatccctaggaaaattgggaggaaaacaacagttgtatagttgggagtagttctttaggatacgctcctcccttccttcttaccagcacttccttcctttctttctgactatttggatcccagtagcctgctcccaacctcatttcacctgctaaatctcttcttcctctgcctgcctcttcctggcactactttactgctattttaccaacctgaacatttggataaaacctagctcaggtaagaacttaattactttcaaaatatacaagggatatgggaggagacagcatggatacagtggagcagtagtcagtagtcagagcctaaattctattttcatttctgccgcttgaagctttatggccttaggcaaatcatctcacctttctgggtttcacttttctcatctgaaattgaactcaagagtcttctagttctaacacaggatttcttcttgtgaatgagaatataagatatggaaatatttgaagccattagattgtttacagtgctgagatttgagagcccctagcattggttctgataaggaatcgaaataaatcctgccattattatgggggccagtattgagattttagtggaggcagaagaagaccttgcacatctttagtgagccttcaagttgtgaagaaacatcctgctaaggtatagatcaaacccagtgaaatgaaactataggaatgaaactacatcatcaaggtttctggacccacttatttcaacttgtgttcaatgtaataaaattccgctaccaataaaattattaatgttttaagaccctttaaacctattgtggctacagtgtgctgacttgcccttttataggccagtctgcttccttcagtccctgctctcaaaggggaaatcccatcacctcagctaaccagaccgaagaagagaattggacggccgatggtggcctctcctaaccagaggcaccaggatcatctacgaccgaaagttcctgctggagtgcaagaactcacccattgcccggacacccccctgctgcctccctcagattcccggggtcacaactcctccaacagcccctctctccaagctggaggagctgaaggagcaggagacagaggaagagatacccgatgacgcacaatttgaaatggacatctaatccagtgcagatgacctggcatgtggagttacagagggatccctcatgccactgctgccaccacctcttcctggggcatccaaaggccagctggcctcatctaatctggaagggagtgacttgttagttccaggcctcctttagttctgaggcagctagaccagggataggagtgggcaacttgccaagcccttaactctacttcctcttcagtctgtggtactcctcctaaccctaaaccctctatgctcaggggctggaactggggaatggagtaagtcaccttctgactgcttagtaaacattcaaagaaaaaa

SEQ ID NO: 376006 - DNA, 4694 bp, Homo sapiens
  misc_feature (4685)..(4685): n is a, c, g, or t
ttaaggcaggggctgatatagaacttggctgctccacacctctgatggaggcatctcaggagggacacctggaattggttaaatatttgctggcttctggcgctaatgtgcatgctacaacagcaacaggagacacagccttaacctatgcttgtgaaaatggacatacggatgttgcagatgttttacttcaagcaggggctgatttagaacatgaatctgaaggtggaagaacacctttgatgaaagctgcaagagctggtcatttgtgcactgtgcagtttcttattagcaaaggtgccaatgttaacagggctacagccaataatgatcatacagtagtgtcgctggcatgtgcaggaggccacctggcagttgttgagcttctcttggctcatggggctgaccctactcatcgactcaaggatggttcaacaatgctcattgaagctgcaaagggtggccatactaatgtagtttcttatctgttggattatccaaataatgttctgtcagttcccaccacagatgtgtctcagctccctccaccttctcaagatcagtctcaggtgccacgtgtgccaacgcatacacttgccatggttgtacctccccaggaacctgacagaacttcacaggagaactctcctgcccttttaggagtgcaaaaaggtacatccaagcagaagtccagttccctccaggtagcagatcaggacctactgccatcttttcacccataccagcctttggagtgcatagtagaggagactgaaggcaagctgaatgaactgggacaaagaattagtgctattgaaaaagcacagcttaagtcactggagttaattcaaggtgaacctctgaacaaagataagatagaagaacttaaaaagaacagagaagagcaagtccagaagaagaagaaaatattgaaagaactgcagaaagtggaaaggcagttgcagatgaaaacacagcagcaatttaccaaagaatacttggaaaccaaaggtcagaaagacacagtgtctctacaccaacagtgctctcatagaggagtcttcccagaaggggaaggagatggtagtctcccagaggatcacttttcagagttacctcaggttgacacaatcttatttaaagataatgatgttgatgatgagcaacagtctccaccatcggcagaacagattgattttgtcccagtccagcctttatcatctccacagtgtaacttttccagtgacttaggttctaatgggacaaattctcttgaacttcagaaagtatcaggtaatcagcagattgtaggacagcctcagattgctattactggacatgatcaggggctgttagttcaagaaccagatggactaatggttgcaactccagctcagacgcttaccgacactcttgatgacctgatagcagctgtgagtaccagagtgcccactggttccaacagttcttctcagaccacagagtgtcttacacctgaatcctgttcgcagactacaagcaatgtggcttcccaatcgatgcctcctgtgtatccttcagttgacattgatgcacatactgagagcaatcatgacacagcattaacactagcttgtgcaggtggtcatgaagaacttgtatctgtgctcattgcacgggatgccaaaattgaacacagagacaaaaaaggtttcacaccactaatcctggcagcaacagcagggcatgttggagttgttgaaatccttttggataaaggtggagatatagaagcacagtctgaacgaactaaggatactccgctttcattggcatgttctggtggacgtcaggaggtggtagacttgctgctggctcgaggtgcaaataaagaacataggaacgtatctgattatacaccactgagtctagctgcgtctggaggatatgttaatatcattaagattctgcttaatgctggggcagaaattaattcaaggactgggagtaaactaggtatttctcccctgatgttggctgcaatgaatggacatgttcctgcagtaaaattgctgctcgatatgggttcagacattaatgcccaaatagagaccaatcggaacacggctctcaccctggcctgtttccagggccgagcagaagtagtgagtttgcttctggaccgaaaagccaatgttgaacatagggcaaagacgggtcttacccccttgatggaagcagcttctggagggtatgcagaggttggaagagttcttcttgataaaggagcagatgttaatgctccccctgtgccttcctcaagagatactgctttaacaatagcagcagacaaaggtcactacaaattttgtgaactcctgattcataggggagcccacattgatgttcgtaacaaaaagggaaatacgccactttggctggcatccaatggaggtcattttgatgttgtgcagttgctagtgcaagcaggtgctgatgtggatgcagcagataaccggaaaatcacacctcttatgtcagcatttcgcaagggtcatgtaaaagttgttcaatatttggtaaaggaagtaaatcagttcccttctgatatagaatgcatgagatacatagcaacaattacagataaggaactgttgaaaaaatgtcatcaatgtgtcgaaaccattgtgaaggctaaagaccagcaagctgcagaagcaaataagaatgcgagtattcttttaaaggaacttgatctggaaaagtcaagagaagagagcagaaagcaggctcttgctgctaaaagagaaaaaagaaaagaaaagagaaaaaagaaaaaagaggaacagaaaaggaaacaggaagaagatgaagaaaacaaacctaaggagaattcggaactaccagaggatgaagatgaagaggagaatgatgaagatgtggagcaagaagttcccatagaacctcctagtgcaaccaccaccactacgattggaatctctgcaacatctgcaacattcacaaatgtgtttgggaaaaaaagggccaatgtggtgacaactcccagcaccaatcggaaaaataagaagaacaaaacaaaagaaacccctcctacagcacatttaattttaccagaacaacatatgtctttagcccaacaaaaggcagataaaaataaaataaatggagaacctagaggtggtggtgcaggtgggaatagtgattcagataacttggacagcacagactgcaacagtgagagtagcagtggtggtaaaagccaagagttaaattttgtgatggatgtgaattcctctaaatacccctcactgctccttcattcccaagaagaaaagacaagtactgctacttccaaaactcagacacgacttgaaggtgaagtgactcctaattccttgtcaaccagctacaagacagtgtcattgccattaagctctccaaacataaagctgaatctcactagccctaaaaggggtcagaaaagagaagaagggtggaaagaagttgtacgaaggtcaaagaaattgtctgttccagcctcagtggtgtcgaggataatgggaagaggaggatgcaacatcactgcaatacaggatgttactggtgcccatattgatgtggataaacaaaaagataagaatggcgagagaatgatcacaataaggggtggcacagaatcaacaagatatgcagttcaactaatcaatgcactcattcaagatcctgctaaggaactggaagacttgattcctaaaaatcatatcagaacacctgccagcaccaaatcaattcatgctaacttctcatctggagtaggtaccacagcagcttccagtaaaaatgcatttcctttgggtgctccaactcttgtaacttcacaggcaacaacgttatctacgttccagcccgctaataaacttaataagaatgttccaacaaatgtacgttcttctttcccagtttctctacccttagcttatcctcaccctcattttgccctgctggctgctcaaactatgcaacagattcggcatcctcgcttacccatggcccagtttggaggaaccttctcaccttctcctaacacatggggaccattcccagtgagacctgtgaatcctggcaacacaaatagctctccaaagcataataacacaagccgtctacctaaccagaacgggactgttttaccctcagagtctgctggactagctactgccagttgtcctatcactgtctcttctgtagttgctgccagtcagcaactgtgtgtcactaatacccggactccttcatcagtcagaaagcagttgtttgcctgtgtgcctaagacaagtcctccagcaacagtgatttcttctgtgacaagcacttgtagttccctgccttctgtctcctctgcacctatcactagcgggcaagctcccaccacatttctacctgcaagtacttctcaagcacagctttcttcacaaaagatggagtctttctctgctgtgccacccaccaaagagaaagtgtccacacaggaccagcccatggcaaacctatgtaccccatcttcaactgcaaacagttgcagtagctctgccagcaacaccccgggagctccagaaactcacccatccagtagtcccactcctacttccagtaacacactggatggctgtgccctagttctagancgcgggcgg

SEQ ID NO: 376007 - DNA, 2967 bp, Homo sapiens
ttaaggcaggggctgatatagaacttggctgctccacacctctgatggaggcatctcaggagggacacctggaattggttaaatatttgctggcttctggcgctaatgtgcatgctacaacagcaacaggagacacagccttaacctatgcttgtgaaaatggacatacggatgttgcagatgttttacttcaagcaggggctgatttagaacatgaatctgaaggtggaagaacacctttgatgaaagctgcaagagctggtcatttgtgcactgtgcagtttcttattagcaaaggtgccaatgttaacagggctacagccaataatgatcatacagtagtgtcgctggcatgtgcaggaggccacctggcagttgttgagcttctcttggctcatggggctgaccctactcatcgactcaaggatggttcaacaatgctcattgaagctgcaaagggtggccatactaatgtagtttcttatctgttggattatccaaataatgttctgtcagttcccaccacagatgtgtctcagctccctccaccttctcaagatcagtctcaggtgccacgtgtgccaacgcatacacttgccatggttgtacctccccaggaacctgacagaacttcacaggagaactctcctgcccttttaggagtgcaaaaaggtacatccaagcagaagtccagttccctccaggtagcagatcaggacctactgccatcttttcacccataccagcctttggagtgcatagtagaggagactgaaggcaagctgaatgaactgggacaaagaattagtgctattgaaaaagcacagcttaagtcactggagttaattcaaggtgaacctctgaacaaagataagatagaagaacttaaaaagaacagagaagagcaagtccagaagaagaagaaaatattgaaagaactgcagaaagtggaaaggcagttgcagatgaaaacacagcagcaatttaccaaagaatacttggaaaccaaaggtcagaaagacacagtgtctctacaccaacagtgctctcatagaggagtcttcccagaaggggaaggagatggtagtctcccagaggatcacttttcagagttacctcaggttgacacaatcttatttaaagataatgatgttgatgatgagcaacagtctccaccatcggcagaacagattgattttgtcccagtccagcctttatcatctccacagtgtaacttttccagtgacttaggttctaatgggacaaattctcttgaacttcagaaagtatcaggtaatcagcagattgtaggacagcctcagattgctattactggacatgatcaggggctgttagttcaagaaccagatggactaatggttgcaactccagctcagacgcttaccgacactcttgatgacctgatagcagctgtgagtaccagagtgcccactggttccaacagttcttctcagaccacagagtgtcttacacctgaatcctgttcgcagactacaagcaatgtggcttcccaatcgatgcctcctgtgtatccttcagttgacattgatgcacatactgagagcaatcatgacacagcattaacactagcttgtgcaggtggtcatgaagaacttgtatctgtgctcattgcacgggatgccaaaattgaacacagagacaaaaaaggtttcacaccactaatcctggcagcaacagcagggcatgttggagttgttgaaatccttttggataaaggtggagatatagaagcacagtctgaacgaactaaggatactccgctttcattggcatgttctggtggacgtcaggaggtggtagacttgctgctggctcgaggtgcaaataaagaacataggaacgtatctgattatacaccactgagtctagctgcgtctggaggatatgttaatatcattaagattctgcttaatgctggggcagaaattaattcaaggactgggagtaaactaggtatttctcccctgatgttggctgcaatgaatggacatgttcctgcagtaaaattgctgctcgatatgggttcagacattaatgcccaaatagagaccaatcggaacacggctctcaccctggcctgtttccagggccgagcagaagtagtgagtttgcttctggaccgaaaagccaatgttgaacatagggcaaagacgggtcttacccccttgatggaagcagcttctggagggtatgcagaggttggaagagttcttcttgataaaggagcagatgttaatgctccccctgtgccttcctcaagagatactgctttaacaatagcagcagacaaaggtcactacaaattttgtgaactcctgattcataggggagcccacattgatgttcgtaacaaaaagggaaatacgccactttggctggcatccaatggaggtcattttgatgttgtgcagttgctagtgcaagcaggtgctgatgtggatgcagcagataaccggaaaatcacacctcttatgtcagcatttcgcaagggtcatgtaaaagttgttcaatatttggtaaaggaagtaaatcagttcccttctgatatagaatgcatgagatacatagcaacaattacagataaggaactgttgaaaaaatgtcatcaatgtgtcgaaaccattgtgaaggctaaagaccagcaagctgcagaagcaaataagaatgcgagtattcttttaaaggaacttgatctggaaaagtcaagagaagagagcagaaagcaggctcttgctgctaaaagagaaaaaagaaaagaaaagagaaaaaagaaaaaagaggaacagaaaaggaaacaggaagaagatgaagaaaacaaacctaaggagaattcggaactaccagaggatgaagatgaagaggagaatgatgaagatgtgggagcaagaagttcccatagacctcctagtgctcccaagagtgtcg

SEQ ID NO: 376008 - DNA, 454 bp, Homo sapiens
aactaaagatagaaccaccgttcaactcagcaatcctactactgggtttctatctaaaggaaaagaaatcagtatatcaaaaagatacctgcatgcgtatgtttatcgcagcaatattcatgatagcaaatcatgatagcaaatcagcctgtggaatcaacctgagtgtccatcgatggatgactagataaaggaaatgtggcatatatacacaatggaatagtattcagctataaaaaagaatgaattcaggtcttttgcagcaaaatgggtgggattggagaacactacataaaacaactcagacacagaaagacaaatacctcatgttttcacttatatgtgggagttaaacaatgggtccatatggaagcagggtggggagtgatggaacagtgaggtcggggagtgagaagggtggaataataataataataaagactggatcagaatt

SEQ ID NO: 376009 - DNA, 2062 bp, Homo sapiens
ggtcgcggagccgtccgcctacgggggccgggacgtcgcctgcgcgtctctcgttttcggacggctgcagcatcgcggtggggatcgaaagcgggggcttctgggacgcagctctggagacgcggcctcggaccagccatttcggtgtagaagtggcagcacggcagattcatctgaaaactacattaagatgaagacctttgaaggtttctgtgctttgcatctcgctgcaagtcaaggacattggaaaatcgtacagattcttttagaagctggggcagatcctaatgcaactactttagaagaaacgacaccattgtttttagctgttgaaaatggacagatagatgtgttaaggctgttgcttcaacacggagcaaatgttaatggatcccattctatgtgtggatggaactccttgcaccaggcttcttttcaggaaaatgctgagatcataaaattgcttcttagaaaaggagcaaacaaggaatgccaggatgactttggaatcacacctttatttgtggctgctcagtatggcaagctagaaagcttgagcatacttatttcatcgggtgcaaatgtcaattgtcaagccttggacaaagctacacccttgttcattgctgctcaagagggacacacaaaatgtgtggagcttttgctctccagtggggcagatcctgatctttactgtaatgaggacagttggcagttacctattcatgcagctgcacaaatgggccatacaaaaatcttggacttgttaataccacttactaaccgggcctgtgacactgggctaaacaaagtaagccctgtttactcagcagtgtttgggggacatgaagattgcctagaaatattactccggaatggctacagcccagacgcccaggcgtgccttgtttttggattcagttctcctgtgtgcatggctttccaaaaggactgtgagttctttggaattgtgaacattcttttgaaatatggagcccagataaatgaacttcatttggcatactgcctgaagtacgagaagttttcgatatttcgctactttttgaggaaaggttgctcattgggaccatggaaccatatatatgaatttgtaaatcatgcaattaaagcacaagcaaaatataaggagtggttgccacatcttctggttgctggatttgacccactgattctactgtgcaattcttggattgactcagtcagcattgacacccttatcttcactttggagtttactaattggaagacacttgcaccagctgttgaaaggatgctctctgctcgtgcctcaaacgcttggattctacagcaacatattgccactgttccatccctgacccatctttgtcgtttggaaattcggtccagtctaaaatcagaacgtctacggtctgacagttatattagtcagctgccacttcccagaagcctacataattatttgctctatgaagacgttctgaggatgtatgaagttccagaactggcagctattcaagatggataaatcagtgaaactacttaacacagctaatttttttctctgaaaaatcatcgagacaaaagagccacagagtacaagtttttatgattttatagtcaaaagatgattattgattgtgagataggttaggttttggggggccagtagttcagtgagaatgtttatgtttacaactagccttcccagtaaaaaaaaaaaaaaaaaaaaaaaaaaattgtaaacatcacttatattactttattgcagcttcatcaccagtacattatatgttgtaatatttatttacctgatcattttgatcattttctgctttattttgctaataaactgtgatgttacttctagtgctaaacatggcatatttccacctatgattcgtgtttacctggtattaggagctcagaatggaatgcataaagcttcactggaagtgtatacaactgtggtgtagaatctgttattattatcattattattttatttagacttgactatctcttatgtttattaaagaacatgttttcctaaaaaattgct

SEQ ID NO: 376010 - DNA, 884 bp, Homo sapiens
ggtcgcggagccgtccgcctacgggggccgggacgtcgcctgcgcgtctctcgttttcggacggctgcagcatcgcggtggggatcgaaagcgggggcttctgggacgcagctctggagacgcggcctcggaccagccatttcggtgtagaagtggcagcacggcagactggtcaaacaaatggattttacagaggcttacgcggacacgtgctctacagttggacttgctgccagggaaggcaatgttaaagtcttaaggaaactgctcaaaaagggccgaagtgtcgatgttgctgataacaggggatggatgccaattcatgaagcagcttatcacaactctgtagaatgtttgcaaatgttaattaatgcagattcatctgaaaactacattaagatgaagacctttgaaggtttctgtgctttgcatctcgctgcaagtcaaggacattggaaaatcgtacagattcttttagaagctggggcagatcctaatgcaactactttagaagaaacgacaccattgtttttagctgttgaaaatggacagatagatgtgttaaggctgttgcttcaacacggagcaaatgttaatggatcccattctatgtgtggatggaactccttgcaccaggcttcttttcaggaaaatgctgagatcataaaattgcttcttagaaaaggagcaaacaaggaatgccaggatgactttggaatcacacctttatttgtggctgctcagtatggcaagctagaaagcttgagcatacttatttcatcggacatgtggtctcaatctcccaacctcaagtgatcctcctgcctcagcctcccaaagtgctgggattacactgtaagtcgctgtgcctgcccaataatcca

SEQ ID NO: 376011 - DNA, 1910 bp, Homo sapiens
  misc_feature (1014)..(1014): n is a, c, g, or t
  misc_feature (1016)..(1017): n is a, c, g, or t
  misc_feature (1054)..(1055): n is a, c, g, or t
  misc_feature (1059)..(1059): n is a, c, g, or t
  misc_feature (1063)..(1063): n is a, c, g, or t
  misc_feature (1085)..(1085): n is a, c, g, or t
  misc_feature (1105)..(1105): n is a, c, g, or t
  misc_feature (1129)..(1129): n is a, c, g, or t
  misc_feature (1141)..(1141): n is a, c, g, or t
  misc_feature (1143)..(1143): n is a, c, g, or t
  misc_feature (1149)..(1149): n is a, c, g, or t
  misc_feature (1156)..(1156): n is a, c, g, or t
  misc_feature (1160)..(1161): n is a, c, g, or t
  misc_feature (1180)..(1181): n is a, c, g, or t
  misc_feature (1192)..(1192): n is a, c, g, or t
  misc_feature (1195)..(1195): n is a, c, g, or t
  misc_feature (1208)..(1208): n is a, c, g, or t
  misc_feature (1219)..(1219): n is a, c, g, or t
  misc_feature (1241)..(1242): n is a, c, g, or t
  misc_feature (1244)..(1244): n is a, c, g, or t
  misc_feature (1259)..(1259): n is a, c, g, or t
  misc_feature (1266)..(1266): n is a, c, g, or t
  misc_feature (1279)..(1279): n is a, c, g, or t
aggcttatcaaagtcaagcactgtgtcacctggtaatgcaaacccttccagcatctctgcctttaggttttaggggggaatcgtcaaaacagacatgcagcccactacaaagtacttgaaagcaatagggcaccattcaagcacacgcctgcatttactgggctacgtttatttagggcattcaggtggctgtaattattgtgcataaatagttttctaaaaagcataaaactaaaaacttgatccatggaaacacagtgtggtttaggatggagatcggatttcactcacctcaaaataactcctggtgtttgcctccaagacccattaatttatgttatctcttgctctgtagcagtttggatttgtcacacttagcaaagtaatttggtttcccacaggttttgttctgttttatagaagcaagagaacggttttgtgtttcagagcatgaatacattccttcagaaatttagccagcatttcagaaggatatgaatttttatttttagctatttacacctgcctgaaaggttgatgctgctaaacattgatattacttgaaaagttgtgcccaaggcatattgcttctttcctagctaggaattgaaatgtttatgaagcttgctgaaaatttaccaggttaccaaaataagagtttatatctcttatgtagtgactaacagaaatagatttatgtattcaaccaaccgtccaatatttattaagccactaatatatgcattgaattatgctggatttggggtgacatcagattatacaacatacacttctcctgttccagttcccttttaacatgttattactgggcacttacagaatgacaaaatcacattaataagactcaggcctgacttcagattgtaaacagtctagctggtgaaacaaactcataaacaaatgcccagacattttactacaatataataagttccgtgaaagagataaacacaggatatattttagaatctcagaagcaggtcttggccgggngnngtggctcacgcctgtaatcccagcactttgggaggcnnaggngggnggatcacgaggtcaggagatcnagaccatcctggctaacacngtgaaaccccatctctactaaaantacaaaaaattngncgggcntggtggngggnncctgtagtcccagctactnnggaggctgagncangagaatggcgtgnacccggaggcngagcttgcagtgagccaagatnncnccactgcactccagnctgggcnacagagtgagacnccgtctcaaaaaaaaaaaaaaagaaagaagcaggtcttaacagaacctgaaagcatcaggaaaggcttctggcaggagataaagcctgagcttgaagttttgagaagaaagacttcaatagatgtcagaaagtagaaaagctgtcccagacaaaagagccacagagtacaagtttttatgattttatagtcaaaagatgattattgattgtgagataggttaggttttggggggccagtagttcagtgagaatgtttatgtttacaactagccttcccagtaaaaaaaaaaaaaaaaaaaaaaaaaaattgtaaacatcacttatattactttattgcagcttcatcaccagtacattatatgttgtaatatttatttacctgatcattttgatcattttctgctttattttgctaataaactgtgatgttacttctagtgctaaacatggcatatttccacctatgattcgtgtttacctggtattaggagctcagaatggaatgcataaagcttcactggaagtgtatacaactgtggtgtagaatctgttattattatcattattattttatttagacttgactatctcttatgtttattaaagaacatgttttcctaaaaaattgct

SEQ ID NO: 376012 - DNA, 1081 bp, Homo sapiens
ggtcgcggagccgtccgcctacgggggccgggacgtcgcctgcgcgtctctcgttttcggacggctgcagcatcgcggtggggatcgaaagcgggggcttctgggacgcagctctggagacgcggcctcggaccagccatttcggtgtagaagtggcagcacggcagactggtcaaacaaatggattttacagaggcttacgcggacacgtgctctacagttggacttgctggctggctggctggctggctggctggctgctggctggctggctggctggctggctggctgctggctggctggctggctggctggctggctgctggctggctggctggctggctggctggctgctggctggctggctggctggctggctggctgctggctggctggctggctggctggctggctgctggctggctggctggctggctggctggctgctggctggctggctggctggctggctggctgctggctggctggctggctggctggctggctgctggctggctggctggctggctggctggctgctggctggctggctggctggctggctggctgctggctggctggctggctggctggctggctgctggctggctggctggctggctggctggctgctggctggctggctggctggctggctggctgctggctggctggctggctggctggctggctgctggctggctggctggctggctggctggctgctggctggctggctggctggctggctggctgctggctggctggctggctggctggctggctgctggctggctggctggctggctggctggctgctggctggctggctggctggctggctggctgcatggcatggcatggcatggcatggcatggcatggcatgcatggcatggcatggcatggcatggcatggcatggcatgcctggcctggcctggcctggcctggcctggcctggcctgcctggcctggcctggcctggcctggcctggcctggcctcctggcctggcctggcctggcctggcctggcctggcctgcctggcctggcctggcctggcctggcctggcctggcct

SEQ ID NO: 376013 - DNA, 2269 bp, Homo sapiens
tccgtgactgcgcctctgcgcccgcgtcttgccgcggctcccgggatgcgcggaggcggtggcgatggcgatgatgcctctagtcctgcatcatccagagcggcaggcggagctggggtccggactgcgagatggaggaggggcggcgctgcggccacccggcagactggtcaaacaaatggattttacagaggcttacgcggacacgtgctctacagttggacttgctgccagggaaggcaatgttaaagtcttaaggaaactgctcaaaaagggccgaagtgtcgatgttgctgataacaggggatggatgccaattcatgaagcagcttatcacaactctgtagaatgtttgcaaatgttaattaatgcagattcatctgaaaactacattaagatgaagacctttgaaggtttctgtgctttgcatctcgctgcaagtcaaggacattggaaaatcgtacagattcttttagaagctggggcagatcctaatgcaactactttagaagaaacgacaccattgtttttagctgttgaaaatggacagatagatgtgttaaggctgttgcttcaacacggagcaaatgttaatggatcccattctatgtgtggatggaactccttgcaccaggcttcttttcaggaaaatgctgagatcataaaattgcttcttagaaaaggagcaaacaaggaatgccaggatgactttggaatcacacctttatttgtggctgctcagtatggcaagctagaaagcttgagcatacttatttcatcgggtgcaaatgtcaattgtcaagccttggacaaagctacacccttgttcattgctgctcaagagggacacacaaaatgtgtggagcttttgctctccagtggggcagatcctgatctttactgtaatgaggacagttggcagttacctattcatgcagctgcacaaatgggccatacaaaaatcttggacttgttaataccacttactaaccgggcctgtgacactgggctaaacaaagtaagccctgtttactcagcagtgtttgggggacatgaagattgcctagaaatattactccggaatggctacagcccagacgcccaggcgtgccttgtttttggattcagttctcctgtgtgcatggctttccaaaaggactgtgagttctttggaattgtgaacattcttttgaaatatggagcccagataaatgaacttcatttggcatactgcctgaagtacgagaagttttcgatatttcgctactttttgaggaaaggttgctcattgggaccatggaaccatatatatgaatttgtaaatcatgcaattaaagcacaagcaaaatataaggagtggttgccacatcttctggttgctggatttgacccactgattctactgtgcaattcttggattgactcagtcagcattgacacccttatcttcactttggagtttactaattggaagacacttgcaccagctgttgaaaggatgctctctgctcgtgcctcaaacgcttggattctacagcaacatattgccactgttccatccctgacccatctttgtcgtttggaaattcggtccagtctaaaatcagaacgtctacggtctgacagttatattagtcagctgccacttcccagaagcctacataattatttgctctatgaagacgttctgaggatgtatgaagttccagaactggcagctattcaagatggataaatcagtgaaactacttaacacagctaatttttttctctgaaaaatcatcgagacaaaagagccacagagtacaagtttttatgattttatagtcaaaagatgattattgattgtgagataggttaggttttggggggccagtagttcagtgagaatgtttatgtttacaactagccttcccagtaaaaaaaaaaaaaaaaaaaaaaaaaaattgtaaacatcacttatattactttattgcagcttcatcaccagtacattatatgttgtaatatttatttacctgatcattttgatcattttctgctttattttgctaataaactgtgatgttacttctagtgctaaacatggcatatttccacctatgattcgtgtttacctggtattaggagctcagaatggaatgcataaagcttcactggaagtgtatacaactgtggtgtagaatctgttattattatcattattattttatttagacttgactatctcttatgtttattaaagaacatgttttcctaaaaaattgct

SEQ ID NO: 376014 - DNA, 1958 bp, Homo sapiens
gggtgaagccactgggaattctcaccttatgcagtggggaggagcctggcctcttcagctcatattcatctgaaaactacattaagatgaagacctttgaaggtttctgtgctttgcatctcgctgcaagtcaaggacattggaaaatcgtacagattcttttagaagctggggcagatcctaatgcaactactttagaagaaacgacaccattgtttttagctgttgaaaatggacagatagatgtgttaaggctgttgcttcaacacggagcaaatgttaatggatcccattctatgtgtggatggaactccttgcaccaggcttcttttcaggaaaatgctgagatcataaaattgcttcttagaaaaggagcaaacaaggaatgccaggatgactttggaatcacacctttatttgtggctgctcagtatggcaagctagaaagcttgagcatacttatttcatcgggtgcaaatgtcaattgtcaagccttggacaaagctacacccttgttcattgctgctcaagagggacacacaaaatgtgtggagcttttgctctccagtggggcagatcctgatctttactgtaatgaggacagttggcagttacctattcatgcagctgcacaaatgggccatacaaaaatcttggacttgttaataccacttactaaccgggcctgtgacactgggctaaacaaagtaagccctgtttactcagcagtgtttgggggacatgaagattgcctagaaatattactccggaatggctacagcccagacgcccaggcgtgccttgtttttggattcagttctcctgtgtgcatggctttccaaaaggactgtgagttctttggaattgtgaacattcttttgaaatatggagcccagataaatgaacttcatttggcatactgcctgaagtacgagaagttttcgatatttcgctactttttgaggaaaggttgctcattgggaccatggaaccatatatatgaatttgtaaatcatgcaattaaagcacaagcaaaatataaggagtggttgccacatcttctggttgctggatttgacccactgattctactgtgcaattcttggattgactcagtcagcattgacacccttatcttcactttggagtttactaattggaagacacttgcaccagctgttgaaaggatgctctctgctcgtgcctcaaacgcttggattctacagcaacatattgccactgttccatccctgacccatctttgtcgtttggaaattcggtccagtctaaaatcagaacgtctacggtctgacagttatattagtcagctgccacttcccagaagcctacataattatttgctctatgaagacgttctgaggatgtatgaagttccagaactggcagctattcaagatggataaatcagtgaaactacttaacacagctaatttttttctctgaaaaatcatcgagacaaaagagccacagagtacaagtttttatgattttatagtcaaaagatgattattgattgtgagataggttaggttttggggggccagtagttcagtgagaatgtttatgtttacaactagccttcccagtaaaaaaaaaaaaaaaaaaaaaaaaaaattgtaaacatcacttatattactttattgcagcttcatcaccagtacattatatgttgtaatatttatttacctgatcattttgatcattttctgctttattttgctaataaactgtgatgttacttctagtgctaaacatggcatatttccacctatgattcgtgtttacctggtattaggagctcagaatggaatgcataaagcttcactggaagtgtatacaactgtggtgtagaatctgttattattatcattattattttatttagacttgactatctcttatgtttattaaagaacatgttttcctaaaaaattgct

SEQ ID NO: 376015 - DNA, 2090 bp, Homo sapiens
agtgctggtttcttttacgggagaatgatagtgaaaaccaagatgtaaggccaggcatggtggctcacgcctgtaatctcagcactttgggaggccaagtcgggcagatcacctgaggccaggagtttgagaccagcctggccaacatggcaaaaacatgtctctactaaaaaaaaaatacaaaaaattacccagattcatctgaaaactacattaagatgaagacctttgaaggtttctgtgctttgcatctcgctgcaagtcaaggacattggaaaatcgtacagattcttttagaagctggggcagatcctaatgcaactactttagaagaaacgacaccattgtttttagctgttgaaaatggacagatagatgtgttaaggctgttgcttcaacacggagcaaatgttaatggatcccattctatgtgtggatggaactccttgcaccaggcttcttttcaggaaaatgctgagatcataaaattgcttcttagaaaaggagcaaacaaggaatgccaggatgactttggaatcacacctttatttgtggctgctcagtatggcaagctagaaagcttgagcatacttatttcatcgggtgcaaatgtcaattgtcaagccttggacaaagctacacccttgttcattgctgctcaagagggacacacaaaatgtgtggagcttttgctctccagtggggcagatcctgatctttactgtaatgaggacagttggcagttacctattcatgcagctgcacaaatgggccatacaaaaatcttggacttgttaataccacttactaaccgggcctgtgacactgggctaaacaaagtaagccctgtttactcagcagtgtttgggggacatgaagattgcctagaaatattactccggaatggctacagcccagacgcccaggcgtgccttgtttttggattcagttctcctgtgtgcatggctttccaaaaggactgtgagttctttggaattgtgaacattcttttgaaatatggagcccagataaatgaacttcatttggcatactgcctgaagtacgagaagttttcgatatttcgctactttttgaggaaaggttgctcattgggaccatggaaccatatatatgaatttgtaaatcatgcaattaaagcacaagcaaaatataaggagtggttgccacatcttctggttgctggatttgacccactgattctactgtgcaattcttggattgactcagtcagcattgacacccttatcttcactttggagtttactaattggaagacacttgcaccagctgttgaaaggatgctctctgctcgtgcctcaaacgcttggattctacagcaacatattgccactgttccatccctgacccatctttgtcgtttggaaattcggtccagtctaaaatcagaacgtctacggtctgacagttatattagtcagctgccacttcccagaagcctacataattatttgctctatgaagacgttctgaggatgtatgaagttccagaactggcagctattcaagatggataaatcagtgaaactacttaacacagctaatttttttctctgaaaaatcatcgagacaaaagagccacagagtacaagtttttatgattttatagtcaaaagatgattattgattgtgagataggttaggttttggggggccagtagttcagtgagaatgtttatgtttacaactagccttcccagtaaaaaaaaaaaaaaaaaaaaaaaaaaattgtaaacatcacttatattactttattgcagcttcatcaccagtacattatatgttgtaatatttatttacctgatcattttgatcattttctgctttattttgctaataaactgtgatgttacttctagtgctaaacatggcatatttccacctatgattcgtgtttacctggtattaggagctcagaatggaatgcataaagcttcactggaagtgtatacaactgtggtgtagaatctgttattattatcattattattttatttagacttgactatctcttatgtttattaaagaacatgttttcctaaaaaattgct

SEQ ID NO: 376016 - DNA, 2358 bp, Homo sapiens
ggtcgcggagccgtccgcctacgggggccgggacgtcgcctgcgcgtctctcgttttcggacggctgcagcatcgcggtggggatcgaaagcgggggcttctgggacgcagctctggagacgcggcctcggaccagccatttcggtgtagaagtggcagcacggcagactggtcaaacaaatggattttacagaggcttacgcggacacgtgctctacagttggacttgctgccagggaaggcaatgttaaagtcttaaggaaactgctcaaaaagggccgaagtgtcgatgttgctgataacaggggatggatgccaattcatgaagcagcttatcacaactctgtagaatgtttgcaaatgttaattaatgcagattcatctgaaaactacattaagatgaagacctttgaaggtttctgtgctttgcatctcgctgcaagtcaaggacattggaaaatcgtacagattcttttagaagctggggcagatcctaatgcaactactttagaagaaacgacaccattgtttttagaggaagcatttattgaggctcagctatacgcaatctccattctagccgctttcctcaagaaatcgtctacgtggaggagtaaaaaagctgttgaaaatggacagatagatgtgttaaggctgttgcttcaacacggagcaaatgttaatggatcccattctatgtgtggatggaactccttgcaccaggcttcttttcaggaaaatgctgagatcataaaattgcttcttagaaaaggagcaaacaaggaatgccaggatgactttggaatcacacctttatttgtggctgctcagtatggcaagctagaaagcttgagcatacttatttcatcgggtgcaaatgtcaattgtcaagccttggacaaagctacacccttgttcattgctgctcaagagggacacacaaaatgtgtggagcttttgctctccagtggggcagatcctgatctttactgtaatgaggacagttggcagttacctattcatgcagctgcacaaatgggccatacaaaaatcttggacttgttaataccacttactaaccgggcctgtgacactgggctaaacaaagtaagccctgtttactcagcagtgtttgggggacatgaagattgcctagaaatattactccggaatggctacagcccagacgcccaggcgtgccttgtttttggattcagttctcctgtgtgcatggctttccaaaaggactgtgagttctttggaattgtgaacattcttttgaaatatggagcccagataaatgaacttcatttggcatactgcctgaagtacgagaagttttcgatatttcgctactttttgaggaaaggttgctcattgggaccatggaaccatatatatgaatttgtaaatcatgcaattaaagcacaagcaaaatataaggagtggttgccacatcttctggttgctggatttgacccactgattctactgtgcaattcttggattgactcagtcagcattgacacccttatcttcactttggagtttactaattggaagacacttgcaccagctgttgaaaggatgctctctgctcgtgcctcaaacgcttggattctacagcaacatattgccactgttccatccctgacccatctttgtcgtttggaaattcggtccagtctaaaatcagaacgtctacggtctgacagttatattagtcagctgccacttcccagaagcctacataattatttgctctatgaagacgttctgaggatgtatgaagttccagaactggcagctattcaagatggataaatcagtgaaactacttaacacagctaatttttttctctgaaaaatcatcgagacaaaagagccacagagtacaagtttttatgattttatagtcaaaagatgattattgattgtgagataggttaggttttggggggccagtagttcagtgagaatgtttatgtttacaactagccttcccagtaaaaaaaaaaaaaaaaaaaaaaaaaaattgtaaacatcacttatattactttattgcagcttcatcaccagtacattatatgttgtaatatttatttacctgatcattttgatcattttctgctttattttgctaataaactgtgatgttacttctagtgctaaacatggcatatttccacctatgattcgtgtttacctggtattaggagctcagaatggaatgcataaagcttcactggaagtgtatacaactgtggtgtagaatctgttattattatcattattattttatttagacttgactatctcttatgtttattaaagaacatgttttcctaaaaaattgct

SEQ ID NO: 376017 - DNA, 1901 bp, Homo sapiens
tccgtgactgcgcctctgcgcccgcgtcttgccgcggctcccgggatgcgcggaggcggtggcgatggcgatgatgcctctagtcctgcatcatccagagcggcaggcggagctggggtccggactgcgagatggaggaggggcggcgctgcggccacccggcagctgttgaaaatggacagatagatgtgttaaggctgttgcttcaacacggagcaaatgttaatggatcccattctatgtgtggatggaactccttgcaccaggcttcttttcaggaaaatgctgagatcataaaattgcttcttagaaaaggagcaaacaaggaatgccaggatgactttggaatcacacctttatttgtggctgctcagtatggcaagctagaaagcttgagcatacttatttcatcgggtgcaaatgtcaattgtcaagccttggacaaagctacacccttgttcattgctgctcaagagggacacacaaaatgtgtggagcttttgctctccagtggggcagatcctgatctttactgtaatgaggacagttggcagttacctattcatgcagctgcacaaatgggccatacaaaaatcttggacttgttaataccacttactaaccgggcctgtgacactgggctaaacaaagtaagccctgtttactcagcagtgtttgggggacatgaagattgcctagaaatattactccggaatggctacagcccagacgcccaggcgtgccttgtttttggattcagttctcctgtgtgcatggctttccaaaaggactgtgagttctttggaattgtgaacattcttttgaaatatggagcccagataaatgaacttcatttggcatactgcctgaagtacgagaagttttcgatatttcgctactttttgaggaaaggttgctcattgggaccatggaaccatatatatgaatttgtaaatcatgcaattaaagcacaagcaaaatataaggagtggttgccacatcttctggttgctggatttgacccactgattctactgtgcaattcttggattgactcagtcagcattgacacccttatcttcactttggagtttactaattggaagacacttgcaccagctgttgaaaggatgctctctgctcgtgcctcaaacgcttggattctacagcaacatattgccactgttccatccctgacccatctttgtcgtttggaaattcggtccagtctaaaatcagaacgtctacggtctgacagttatattagtcagctgccacttcccagaagcctacataattatttgctctatgaagacgttctgaggatgtatgaagttccagaactggcagctattcaagatggataaatcagtgaaactacttaacacagctaatttttttctctgaaaaatcatcgagacaaaagagccacagagtacaagtttttatgattttatagtcaaaagatgattattgattgtgagataggttaggttttggggggccagtagttcagtgagaatgtttatgtttacaactagccttcccagtaaaaaaaaaaaaaaaaaaaaaaaaaaattgtaaacatcacttatattactttattgcagcttcatcaccagtacattatatgttgtaatatttatttacctgatcattttgatcattttctgctttattttgctaataaactgtgatgttacttctagtgctaaacatggcatatttccacctatgattcgtgtttacctggtattaggagctcagaatggaatgcataaagcttcactggaagtgtatacaactgtggtgtagaatctgttattattatcattattattttatttagacttgactatctcttatgtttattaaagaacatgttttcctaaaaaattgct

SEQ ID NO: 376018 - DNA, 2271 bp, Homo sapiens
ggtcgcggagccgtccgcctacgggggccgggacgtcgcctgcgcgtctctcgttttcggacggctgcagcatcgcggtggggatcgaaagcgggggcttctgggacgcagctctggagacgcggcctcggaccagccatttcggtgtagaagtggcagcacggcagactggtcaaacaaatggattttacagaggcttacgcggacacgtgctctacagttggacttgctgccagggaaggcaatgttaaagtcttaaggaaactgctcaaaaagggccgaagtgtcgatgttgctgataacaggggatggatgccaattcatgaagcagcttatcacaactctgtagaatgtttgcaaatgttaattaatgcagattcatctgaaaactacattaagatgaagacctttgaaggtttctgtgctttgcatctcgctgcaagtcaaggacattggaaaatcgtacagattcttttagaagctggggcagatcctaatgcaactactttagaagaaacgacaccattgtttttagctgttgaaaatggacagatagatgtgttaaggctgttgcttcaacacggagcaaatgttaatggatcccattctatgtgtggatggaactccttgcaccaggcttcttttcaggaaaatgctgagatcataaaattgcttcttagaaaaggagcaaacaaggaatgccaggatgactttggaatcacacctttatttgtggctgctcagtatggcaagctagaaagcttgagcatacttatttcatcgggtgcaaatgtcaattgtcaagccttggacaaagctacacccttgttcattgctgctcaagagggacacacaaaatgtgtggagcttttgctctccagtggggcagatcctgatctttactgtaatgaggacagttggcagttacctattcatgcagctgcacaaatgggccatacaaaaatcttggacttgttaataccacttactaaccgggcctgtgacactgggctaaacaaagtaagccctgtttactcagcagtgtttgggggacatgaagattgcctagaaatattactccggaatggctacagcccagacgcccaggcgtgccttgtttttggattcagttctcctgtgtgcatggctttccaaaaggactgtgagttctttggaattgtgaacattcttttgaaatatggagcccagataaatgaacttcatttggcatactgcctgaagtacgagaagttttcgatatttcgctactttttgaggaaaggttgctcattgggaccatggaaccatatatatgaatttgtaaatcatgcaattaaagcacaagcaaaatataaggagtggttgccacatcttctggttgctggatttgacccactgattctactgtgcaattcttggattgactcagtcagcattgacacccttatcttcactttggagtttactaattggaagacacttgcaccagctgttgaaaggatgctctctgctcgtgcctcaaacgcttggattctacagcaacatattgccactgttccatccctgacccatctttgtcgtttggaaattcggtccagtctaaaatcagaacgtctacggtctgacagttatattagtcagctgccacttcccagaagcctacataattatttgctctatgaagacgttctgaggatgtatgaagttccagaactggcagctattcaagatggataaatcagtgaaactacttaacacagctaatttttttctctgaaaaatcatcgagacaaaagagccacagagtacaagtttttatgattttatagtcaaaagatgattattgattgtgagataggttaggttttggggggccagtagttcagtgagaatgtttatgtttacaactagccttcccagtaaaaaaaaaaaaaaaaaaaaaaaaaaattgtaaacatcacttatattactttattgcagcttcatcaccagtacattatatgttgtaatatttatttacctgatcattttgatcattttctgctttattttgctaataaactgtgatgttacttctagtgctaaacatggcatatttccacctatgattcgtgtttacctggtattaggagctcagaatggaatgcataaagcttcactggaagtgtatacaactgtggtgtagaatctgttattattatcattattattttatttagacttgactatctcttatgtttattaaagaacatgttttcctaaaaaattgct

SEQ ID NO: 376019 - DNA, 430 bp, Homo sapiens
ggtcgcggagccgtccgcctacgggggccgggacgtcgcctgcgcgtctctcgttttcggacggctgcagcatcgcggtggggatcgaaagcgggggcttctgggacgcagctctggagacgcggcctcggaccagccatttcggtgtagaagtggcagcacggcagactggtcaaacaaatggattttacagaggcttacgcggacacgtgctctacagttggacttgctgccagggaaggcaatgttaaagtcttaaggaaactgctcaaaaagggccgaagtgtcgatgttgctgataacaggggatggatgccaattcatgaagcagcttatcacaactctgtagaatgtttgcaaatgttaattaatgcaggtaaagtaaattcaaggtatggaggctttgcctacaagctggattaataaaaca

SEQ ID NO: 376020 - DNA, 882 bp, Homo sapiens
aatttcagattttcagattagggatgctgaactggtgtaatgcccagtattccaaaatccaaaataatttgaaatctgaaacacttaatggtcccagcatgttggataagggatactcaacctgtattgatttttctccactataattcagttctataagttcttccctataaaaaatgaatgaattagaaatttgataataaaacatattttattaattttaaactctatcttgcagtctgatcattcagaaaggtcaacctagaaaaaagacatggctaagtaaactattttaagccataactaagtattttggaaagccttcattaacacataaagaattttggccaagtactgtggcttatgcctgtaatcctagcactttggaaagccgaggccgacggatcacttgagctcaggagtttgagaccaacctgcgtaacatggtgaaaccccatatctacaaaaagtacaaaaattagctgggtgcggtggcgcatgcctgtagtcccatctactcggaagactgaggcagcagaaccgcttgagcctaggaggtggaggttgcagtaagatgagatcatgctgctgtactctagcctgggcaatgagagtgaaactcttatctcaaaaaaaaaaaaaaaaaagagctatactcatagtactttgggagaccaagcagggaggattacttgagaccaggagtttgagactaccatggacaacatagcaagaccccatctttacaaaaaatttaaaaattagccagacacctatagtaccagctacttaggagtctaaagtgggagaattgcttgagcctgggaggttgaagcagcagtgagctttgatcatgccactgcattccagcctgggtaacaa

SEQ ID NO: 376021 - DNA, 5547 bp, Homo sapiens
gcatgatttatgcctctcttgggctttagattttattcctttacttttctataactctgtcatgaccagtttaaaggccccaatgtcatgtcctcgcattaacaaccaaggctacaatgcaagccctgccatgtgcgcttctttacaaaaggtcaaagtaaaaaggaaatctataccaaagagcctctagatactatttccagcttcggggaagtccatagtaggtacttccacgggtagagaacattatcttagactgggataagggttggtattcgcagtccccttcctacgttctgcccattgtaaagaccagggtcagcgttgagcctcgcccttcttgctagaactacaactcccaggatgccccgcggcacgggagtgcgcacgcgcgtcggaggcgaaggaggaacccaccgcacctacagggcggtcgagtgagggagctgctggcgggtgggtctggcaactctttgggaggccgacgcgggcggaccggcgggtgctgggaaccgagcctcggcttgcggccggcagtttccgtgggtctgtgaagaggtcggcggcccctgcgggcgccagtcagctttaagaaaaagtagagatcacttctgactgtactgaacagcaaaaattaagtgacttgctgccctgcacatcatggcactgccattccgtaaggacttagaaaagtacaaagaccttgatgaagatgagctccttgggaatctgtcagaaacagaactgaaacaactggaaactgttttggatgatcttgaccccgagaatgcccttctgcctgcagggttccggcagaagaaccagacatcaaagtccaccacagggccatttgatagagagcatctcctttcatatctggagaaagaagcattggagcataaagacagggaagactatgtgccctacactggagaaaaaaaagggaaaatatttatccccaaacagaaacctgtacagacttttacagaagaaaaagtgtctcttgatccagaattagaagaagctttgacaagtgcttctgatacagaattgtgtgacctcgcagcaattcttgggatgcacaatttgataacgaatacaaagttctgtaatataatgggaagtagtaatggtgttgaccaagaacatttttcaaatgtggtcaaaggtgaaaagattcttccggtatttgatgagccaccaaatccaaccaatgtagaagagagtttgaagagaactaaagaaaacgatgctcatcttgttgaagttaatttgaataatataaagaatatcccaattccaaccctaaaagattttgcaaaggctttggaaaccaacacacatgtgaaatgtttcagtcttgcagccacccggagcaatgaccctgttgctactgcttttgcagaaatgctgaaagtgaacaaaactttgaagagcttaaatgtggagtccaactttatcacgggagttgggattctggcactgattgatgcgttaagagataatgaaaccctggcagagctcaagattgacaatcagaggcagcagttggggacagctgtagaattggaaatggccaagatgcttgaggaaaatacaaatatccttaaatttggatatcagtttacacagcagggaccacgaaccagagcagctaatgctataacaaaaaacaatgacttagtgcgtaagagacgagttgaaggagatcaccagtaagtctgcaaaggtgtaatctttggaagacttcagaagatcaccaagggctcatgttggtgacatcatgtaaaattttcctgggtagaagggaaaagactggaaaaatttttttagtgacatgcattttttttttagttgttatcaaattgtaaaatcagtaatgtgatattttatattctgaaacatttctactttctgctaaaatcaattttaatttagtttaattgaatgatttatgatgaatcttgggcaaaaaaatacaactgtaaaaaatttcacaggtcatttgtgtagaataatttgaacattgtgaggaccaatcttttttaaatcaaaagggatgttgctggtatcagaattgttattgcttcatttagacataaaacacttaagtgttttcttcactccgtgacctggagagttttccattttttaaaatacatgaacttggcaagggtgtgatttttctttatcaagagaacaaaatgccagaatgttaaaacagttaactcaaaatctagtcatctgtgtaggagctaaagcaggtctccctccccaccccccaaaaaaggcgtacagccaactcttagttatttagggtaagagaaaaaagaaaactgttaaacaatgaaatcaaagataataaatatgatagatttccagtatgaggcacttgcaaaacagtcatttaaactgatggttactgtaagtcagttggaagctggcatgtatgtaaattacttggtgttacaccatatccgaagaagttcctatgtgcagtgcagaattgcataaacagtatttaatcactgctacaaatcttccaaccaagaaggaaaactgctattcttcataaatctaatttttagtatatgcttcctttcatcttatacttttatcaatatttataaaagtcatttctataataaaagcagtctttcttgctcaaagtattaaggtgaacaattgaatagagtactgtggtcgggagactgatttgagactgcagagctgatgctgggtagagggtctggacttgtattcatgttctgtctcagggcagcccctggagcaggagatggcagaggcatttacagctgcagaaaacagggaggaatggaatctgaggtagccctggcctcaaaattcaggcctggctgtatcatttacagagatttttctggagggaaaagtctcatttctgaggaaggcaaggtggctaatcattattaattttttttaaactttttgggccgggcgcagtggctcacgcctgtaatcccagcacttttgggaagccaaagtgggtggatcacttaaggtcaggagttcaagaccagcctggccaacatggtgaaaccctgtctctactaaaaatcaaaaaagtagccgggtgtggtggtgcacacctgtaatcccagctactcgggaggctgaggcaggagaattgcttgaacctgggagatggagattgcagtgagctgagatcgtaccactgcactgcagtctgggtgacaaagcaagactctgtctcaaaaaacaaacaaacaaacaaactttttgaaattgaattgcaatatgtctgctactttggcttgggctggacagtttatctaataagcaaggcagcttcttgtgtgctatggtaataagccttcttaacaggctaagcttccctcataagaactgtggtgtttctctttttttttttttgttttggtttgttttggttttttggtttggttttgttttgttttttaaatcagtatccaatgttttataggggccaaaggttaactttgcactattccctgtcagttaaaggccactgatatttttctaagttagcaaggctcacttgcttgctttcttgcctcccttgcctccatccctctcccttcctaccttctctatttacctatttctctccctccctctcttctcctctctttttttttcccccgcatatgcagctttttgattgtacttgattttatagagactgcacagttccagcaagattgggagtcaggcatggagcaggcatctcaggctaccagaaagaattggtcacctagactttcagtcaggcatcctcgtttgcattgtcctgtaagtcaattagttgataaatagttcccccttcatcccttaagttttgtttttgtttttgtttttaatataggtaagtgggactctacctaaaattttgcatcatacttatgggtaatatctttttcatatattatttatcaaagtatgaagttgagtattttgcttgtaccatttcaattctgcattatagtagttcattgtataactgaaagaaatgatttcttcataagtgacattaaatatgaacattcatccaattgaatttacaaaatctttccaaaattataagggagaaaaatcgggtttacttcaatctttaaaaatctggcacctcttagtaactttcagtatttctaaattgctctaaaattttataataaatagattagggttttgcaatagtcttaatttttaagccaaaggttttctgagaccttaggttttgtagtctaaccagcttatgtggttatttaaaagaatattctttgtgtttttaaattgctatttttaaaaaagctttttattacccattttataaaatgttatactcatatttgtctgaatttttccagtattcctacatgaaattgtatgtattaaaaactcaatattagtggcaaatattaatactattaaaatggattttggtgctatattcttgtagctaaagcctagtagaattctcaagaataggtgaaatacactttcaaagttgcctgtcatttaaaagaccaaataagcattttgtattaaataaattagcagatggttagagacttcaaggagagttagcttggtcatttaattgcgacttcatgttatttgattgaaataacccacatccttgctttgtataagatattcgctctggagaagttacatgtaaatagaattctataaattgttttccagttgaccgagtatctgttgtgtttttgtttaaaaagaggattccatgacataataaaaattattttaaaaaatgttttggtgctgggattacaggtgtttgccaccgcgcccagcccaaattattacattcgtaagacagacacctcttagaatctatatatatgaggttttactcccttttctacactcagtatgttttaattgatgcaaagcaattaattggcctaaaatgtttcaaatattatagtctatacattcagaaagtaaggtttaagaatgaattattggtgcttcttggtgggtgtatatagcagtttttagaagtttaaatttcacctctactcagaaagataagcttttgattcagtggtttcaaattttcagatcgatccatttaagaattgttttttcaaatgtatatacacgtataacataaaaatttttgtaatttcaaatgtctttttttcagttttttggatgaattattatatttggttttagttacatttaaaagcttgaaaattacctttctaacaatcatttgaatgtcattcattgtcacatgaaatcaggtatttacgtttttttctaatgctaaaatatccaacattgtaattgccctatttttccatttttataagtataaaagcaatgaattttaacactggtatttaaataatacaaaatattatccaaattcataacagcacagtgaagtttcttttgaagactatgtactggaagcatttagaacttaccaatatatactgggataaatcgtttcaataaagtttatcaaat

SEQ ID NO: 376022 - DNA, 4845 bp, Homo sapiens
gcatgatttatgcctctcttgggctttagattttattcctttacttttctataactctgtcatgaccagtttaaaggccccaatgtcatgtcctcgcattaacaaccaaggctacaatgcaagccctgccatgtgcgcttctttacaaaaggtcaaagtaaaaaggaaatctataccaaagagcctctagatactatttccagcttcggggaagtccatagtaggtacttccacgggtagagaacattatcttagactgggataagggttggtattcgcagtccccttcctacgttctgcccattgtaaagaccagggtcagcgttgagcctcgcccttcttgctagaactacaactcccaggatgccccgcggcacgggagtgcgcacgcgcgtcggaggcgaaggaggaacccaccgcacctacagggcggtcgagtgagggagctgctggcgggtgggtctggcaactctttgggaggccgacgcgggcggaccggcgggtgctgggaaccgagcctcggcttgcggccggcagtttccgtgggtctgtgaagaggtcggcggcccctgcgggcgccagtcagctttaagaaaaagtagagatcacttctgactgtactgaacagcaaaaattaagtgacttgctgccctgcacatcatggcactgccattccgtaaggacttagaaaagtacaaagaccttgatgaagatgagctccttgggaatctgtcagaaacagaactgaaacaactggaaactgttttggatgatcttgaccccgagaatgcccttctgcctgcagggttccggcagaagaaccagacatcaaagtccaccacagggccatttgatagagagcatctcctttcatatctggagaaagaagcattggagcataaagacagggaagactatgtgccctacactggagaaaaaaaagggaaaatatttatccccaaacagaaacctgtacagacttttacagaagaaaaagtgtctcttgatccagaattagaagaagctttgacaagtgcttctgatacagaattgtgtgacctcgcagcaattcttgggatgcacaatttgataacgaatacaaagttctgtaatataatgggaagtagtaatggtgttgaccaagaacatttttcaaatgtggtcaaaggtgaaaagattcttccggtatttgatgagccaccaaatccaaccaatgtagaagagagtttgaagagaactaaagaaaacgatgctcatcttgttgaagttaatttgaataatataaagaatatcccaattccaaccctaaaagattttgcaaaggctttggaaaccaacacacatgtgaaatgtttcagtcttgcagccacccggagcaatgaccctgttgctactgcttttgcagaaatgctgaaagtgaacaaaactttgaagagcttaaatgtggagtccaactttatcacgggagttgggattctggcactgattgatgcgttaagagataatgaaaccctggcagagctcaagattgacaatcagaggcagcagttggggacagctgtagaattggaaatggccaagatgcttgaggaaaatacaaatatccttaaatttggatatcagtttacacagcagggaccacgaaccagagcagctaatgctataacaaaaaacaatgacttagtgcgtaagagacgagttgaaggagatcaccagtaagtctgcaaaggtgtaatctttggaagacttcagaagatcaccaagggctcatgttggtgacatcatgtaaaattttcctgggtagaagggaaaagactggaaaaatttttttagtgacatgcattttttttttagttgttatcaaattgtaaaatcagtaatgtgatattttatattctgaaacatttctactttctgctaaaatcaattttaatttagtttaattgaatgatttatgatgaatcttgggcaaaaaaatacaactgtaaaaaatttcacaggtcatttgtgtagaataatttgaacattgtgaggaccaatcttttttaaatcaaaagggatgttgctggtatcagaattgttattgcttcatttagacataaaacacttaagtgttttcttcactccgtgacctggagagttttccattttttaaaatacatgaacttggcaagggtgtgatttttctttatcaagagaacaaaatgccagaatgttaaaacagttaactcaaaatctagtcatctgtgtaggagctaaagcaggtctccagggagagagggtggtcgtctgtgcattccaggttactgcacttgtctgatgtgacgtagcaacacccaggtcttcttaaaacaaagtcatcagctttgccaggttacatactttatttaaaagtatagtgaggtcgaagttcattccagtgtttcattttaataatgtgggcattattaaatttttgtggaagctaatagtaaaaaataaaagctgttttcaccacctccctccccaccccccaaaaaaggcgtacagccaactcttagttatttagggtaagagaaaaaagaaaactgttaaacaatgaaatcaaagataataaatatgatagatttccagtatgaggcacttgcaaaacagtcatttaaactgatggttactgtaagtcagttggaagctggcatgtatgtaaattacttggtgttacaccatatccgaagaagttcctatgtgcagtgcagaattgcataaacagtatttaatcactgctacaaatcttccaaccaagaaggaaaactgctattcttcataaatctaatttttagtatatgcttcctttcatcttatacttttatcaatatttataaaagtcatttctataataaaagcagtctttcttgctcaaagtattaaggtgaacaattgaatagagtactgtggtcgggagactgatttgagactgcagagctgatgctgggtagagggtctggacttgtattcatgttctgtctcagggcagcccctggagcaggagatggcagaggcatttacagctgcagaaaacagggaggaatggaatctgaggtagccctggcctcaaaattcaggcctggctgtatcatttacagagatttttctggagggaaaagtctcatttctgaggaaggcaaggtggctaatcattattaattttttttaaactttttgggccgggcgcagtggctcacgcctgtaatcccagcacttttgggaagccaaagtgggtggatcacttaaggtcaggagttcaagaccagcctggccaacatggtgaaaccctgtctctactaaaaatcaaaaaagtagccgggtgtggtggtgcacacctgtaatcccagctactcgggaggctgaggcaggagaattgcttgaacctgggagatggagattgcagtgagctgagatcgtaccactgcactgcagtctgggtgacaaagcaagactctgtctcaaaaaacaaacaaacaaacaaactttttgaaattgaattgcaatatgtctgctactttggcttgggctggacagtttatctaataagcaaggcagcttcttgtgtgctatggtaataagccttcttaacaggctaagcttccctcataagaactgtggtgtttctctttttttttttttgttttggtttgttttggttttttggtttggttttgttttgttttttaaatcagtatccaatgttttataggggccaaaggttaactttgcactattccctgtcagttaaaggccactgatatttttctaagttagcaaggctcacttgcttgctttcttgcctcccttgcctccatccctctcccttcctaccttctctatttacctatttctctccctccctctcttctcctctctttttttttcccccgcatatgcagctttttgattgtacttgattttatagagactgcacagttccagcaagattgggagtcaggcatggagcaggcatctcaggctaccagaaagaattggtcacctagactttcagtcaggcatcctcgtttgcattgtcctgtaagtcaattagttgataaatagttcccccttcatcccttaagttttgtttttgtttttgtttttaatataggtaagtgggactctacctaaaattttgcatcatacttatgggtaatatctttttcatatattatttatcaaagtatgaagttgagtattttgcttgtaccatttcaattctgcattatagtagttcattgtataactgaaagaaatgatttcttcataagtgacattaaatatgaacattcatccaattgaatttacaaaatctttccaaaattataagggagaaaaatcgggtttacttcaatctttaaaaatctggcacctcttagtaactttcagtatttctaaattgctctaaaattttataataaatagattagggttttgcaatagtcttaatttttaagccaaaggttttctgagaccttaggttttgtagtctaaccagcttatgtggttatttaaaagaatattctttgtgtttttaaattgctatttttaaaaaagctttttattacccattttataaaatgttatactcatatttgtctgaatttttccagtattcctacatgaaattgtatgtattaaaaactcaatattagtggcaaatattaatactattaaaatggattttggtgctatattcttgtagctaaagcctagtagaattctcaagaataggtgaaatacactttcaaagttgcctgtcatttaaaagaccaaataagcattttgtattaaataaattagcagatggttagagacttc

SEQ ID NO: 376023 - DNA, 3880 bp, Homo sapiens
ccgagtctggctcccatcagagaagtagtatggtgtagaccaagaacatatttcaaatgtggtcaaaggtgaaaagattcttccggtatttgatgagccaccaaatccaaccaatgtagaagagagtttgaagagaactaaagaaaacgatgctcatcttgttgaagttaatttgaataatataaagaatatcccaattccaaccctaaaagattttgcaaaggctttggaaaccaacacacatgtgaaatgtttcagtcttgcagccacccggagcaatgaccctgttgctactgcttttgcagaaatgctgaaagtgaacaaaactttgaagagcttaaatgtggagtccaactttatcacgggagttgggattctggcactgattgatgcgttaagagataatgaaaccctggcagagctcaagattgacaatcagaggcagcagttggggacagctgtagaattggaaatggccaagatgcttgaggaaaatacaaatatccttaaatttggatatcagtttacacagcagggaccacgaaccagagcagctaatgctataacaaaaaacaatgacttagtgcgtaagagacgagttgaaggagatcaccagtaagtctgcaaaggtgtaatctttggaagacttcagaagatcaccaagggctcatgttggtgacatcatgtaaaattttcctgggtagaagggaaaagactggaaaaatttttttagtgacatgcattttttttttagttgttatcaaattgtaaaatcagtaatgtgatattttatattctgaaacatttctactttctgctaaaatcaattttaatttagtttaattgaatgatttatgatgaatcttgggcaaaaaaatacaactgtaaaaaatttcacaggtcatttgtgtagaataatttgaacattgtgaggaccaatcttttttaaatcaaaagggatgttgctggtatcagaattgttattgcttcatttagacataaaacacttaagtgttttcttcactccgtgacctggagagttttccattttttaaaatacatgaacttggcaagggtgtgatttttctttatcaagagaacaaaatgccagaatgttaaaacagttaactcaaaatctagtcatctgtgtaggagctaaagcaggtctccagggagagagggtggtcgtctgtgcattccaggttactgcacttgtctgatgtgacgtagcaacacccaggtcttcttaaaacaaagtcatcagctttgccaggttacatactttatttaaaagtatagtgaggtcgaagttcattccagtgtttcattttaataatgtgggcattattaaatttttgtggaagctaatagtaaaaaataaaagctgttttcaccacctccctccccaccccccaaaaaaggcgtacagccaactcttagttatttagggtaagagaaaaaagaaaactgttaaacaatgaaatcaaagataataaatatgatagatttccagtatgaggcacttgcaaaacagtcatttaaactgatggttactgtaagtcagttggaagctggcatgtatgtaaattacttggtgttacaccatatccgaagaagttcctatgtgcagtgcagaattgcataaacagtatttaatcactgctacaaatcttccaaccaagaaggaaaactgctattcttcataaatctaatttttagtatatgcttcctttcatcttatacttttatcaatatttataaaagtcatttctataataaaagcagtctttcttgctcaaagtattaaggtgaacaattgaatagagtactgtggtcgggagactgatttgagactgcagagctgatgctgggtagagggtctggacttgtattcatgttctgtctcagggcagcccctggagcaggagatggcagaggcatttacagctgcagaaaacagggaggaatggaatctgaggtagccctggcctcaaaattcaggcctggctgtatcatttacagagatttttctggagggaaaagtctcatttctgaggaaggcaaggtggctaatcattattaattttttttaaactttttgggccgggcgcagtggctcacgcctgtaatcccagcacttttgggaagccaaagtgggtggatcacttaaggtcaggagttcaagaccagcctggccaacatggtgaaaccctgtctctactaaaaatcaaaaaagtagccgggtgtggtggtgcacacctgtaatcccagctactcgggaggctgaggcaggagaattgcttgaacctgggagatggagattgcagtgagctgagatcgtaccactgcactgcagtctgggtgacaaagcaagactctgtctcaaaaaacaaacaaacaaacaaactttttgaaattgaattgcaatatgtctgctactttggcttgggctggacagtttatctaataagcaaggcagcttcttgtgtgctatggtaataagccttcttaacaggctaagcttccctcataagaactgtggtgtttctctttttttttttttgttttggtttgttttggttttttggtttggttttgttttgttttttaaatcagtatccaatgttttataggggccaaaggttaactttgcactattccctgtcagttaaaggccactgatatttttctaagttagcaaggctcacttgcttgctttcttgcctcccttgcctccatccctctcccttcctaccttctctatttacctatttctctccctccctctcttctcctctctttttttttcccccgcatatgcagctttttgattgtacttgattttatagagactgcacagttccagcaagattgggagtcaggcatggagcaggcatctcaggctaccagaaagaattggtcacctagactttcagtcaggcatcctcgtttgcattgtcctgtaagtcaattagttgataaatagttcccccttcatcccttaagttttgtttttgtttttgtttttaatataggtaagtgggactctacctaaaattttgcatcatacttatgggtaatatctttttcatatattatttatcaaagtatgaagttgagtattttgcttgtaccatttcaattctgcattatagtagttcattgtataactgaaagaaatgatttcttcataagtgacattaaatatgaacattcatccaattgaatttacaaaatctttccaaaattataagggagaaaaatcgggtttacttcaatctttaaaaatctggcacctcttagtaactttcagtatttctaaattgctctaaaattttataataaatagattagggttttgcaatagtcttaatttttaagccaaaggttttctgagaccttaggttttgtagtctaaccagcttatgtggttatttaaaagaatattctttgtgtttttaaattgctatttttaaaaaagctttttattacccattttataaaatgttatactcatatttgtctgaatttttccagtattcctacatgaaattgtatgtattaaaaactcaatattagtggcaaatattaatactattaaaatggattttggtgctatattcttgtagctaaagcctagtagaattctcaagaataggtgaaatacactttcaaagttgcctgtcatttaaaagaccaaataagcattttgtattaaataaattagcagatggttagagacttcaaggagagttagcttggtcatttaattgcgacttcatgttatttgattgaaataacccacatccttgctttgtataagatattcgctctggagaagttacatgtaaatagaattctataaattgttttccagttg

SEQ ID NO: 376024 - DNA, 2767 bp, Homo sapiens
gcatgatttatgcctctcttgggctttagattttattcctttacttttctataactctgtcatgaccagtttaaaggccccaatgtcatgtcctcgcattaacaaccaaggctacaatgcaagccctgccatgtgcgcttctttacaaaaggtcaaagtaaaaaggaaatctataccaaagagcctctagatactatttccagcttcggggaagtccatagtaggtacttccacgggtagagaacattatcttagactgggataagggttggtattcgcagtccccttcctacgttctgcccattgtaaagaccagggtcagcgttgagcctcgcccttcttgctagaactacaactcccaggatgccccgcggcacgggagtgcgcacgcgcgtcggaggcgaaggaggaacccaccgcacctacagggcggtcgagtgagggagctgctggcgggtgggtctggcaactctttgggaggccgacgcgggcggaccggcgggtgctgggaaccgagcctcggcttgcggccggcagtttccgtgggtctgtgaagaggtcggcggcccctgcgggcgccagtcagctttaagaaaaagtagagatcacttctgactgtactgaacagcaaaaattaagtgacttgctgccctgcacatcatggcactgccattccgtaaggacttagaaaagtacaaagaccttgatgaagatgagctccttgggaatctgtcagaaacagaactgaaacaactggaaactgttttggatgatcttgaccccgagaatgcccttctgcctgcagggttccggcagaagaaccagacatcaaagtccaccacagggccatttgatagagagcatctcctttcatatctggagaaagaagcattggagcataaagacagggaagactatgtgccctacactggagaaaaaaaagggaaaatatttatccccaaacagaaacctgtacagacttttacagaagaaaaagtgtctcttgatccagaattagaagaagctttgacaagtgcttctgatacagaattgtgtgacctcgcagcaattcttgggatgcacaatttgataacgaatacaaagttctgtaatataatgggaagtagtaatggtgttgaccaagaacatttttcaaatgtggtcaaaggtgaaaagattcttccggtatttgatgagccaccaaatccaaccaatgtagaagagagtttgaagagaactaaagaaaacgatgctcatcttgttgaagttaatttgaataatataaagaatatcccaattccaaccctaaaagattttgcaaaggctttggaaaccaacacacatgtgaaatgtttcagtcttgcagccacccggagcaatgaccctgttgctactgcttttgcagaaatgctgaaagtgaacaaaactttgaagagcttaaatgtggagtccaactttatcacgggagttgggattctggcactgattgatgcgttaagagataatgaaaccctggcagagctcaagattgacaatcagaggcagcagttggggacagctgtagaattggaaatggccaagatgcttgaggaaaatacaaatatccttaaatttggatatcagtttacacagcagggaccacgaaccagagcagctaatgctataacaaaaaacaatgacttagtgcgtaagagacgagttgaaggagatcaccagtaagtctgcaaaggtgtaatctttggaagacttcagaagatcaccaagggctcatgttggtgacatcatgtaaaattttcctgggtagaagggaaaagactggaaaaatttttttagtgacatgcattttttttttagttgttatcaaattgtaaaatcagtaatgtgatattttatattctgaaacatttctactttctgctaaaatcaattttaatttagtttaattgaatgatttatgatgaatcttgggcaaaaaaatacaactgtaaaaaatttcacaggtcatttgtgtagaataatttgaacattgtgaggaccaatcttttttaaatcaaaagggatgttgctggtatcagaattgttattgcttcatttagacataaaacacttaagtgttttcttcactccgtgacctggagagttttccattctttgcaagtttagtactgcccaaatttactcattctacagtgttactgcactttgaacgtattgacccatgtcacccaagagaagcaaacatatggatgcactagagacaactcgggttgctgctctcagttaagggctatgagttcttggggtctaagtatctgtaaaattatcctctccatcagctctcactgatcattaatgtttctggatatttcttaccctaagatttgcttaccaacaaatcaaagaaacgcttcactaattatttttaaattgagaaaatagtattcagaggcaaagatttttatattcttttttgagaccatctagcctgggcaatgagagtgaaactcttatctcaaaaaaaaaaaaaaaaaagagctatactcatagtactttgggagaccaagcagggaggattacttgagaccaggagtttgagactaccatggacaacatagcaagaccccatctttacaaaaaatttaaaaattagccagacacctatagtaccagctacttaggagtctaaagtgggagaattgcttgagcctgggaggttgaagcagcagtgagctttgatcatgccactgcattccagcctgggtaacaa

SEQ ID NO: 376025 - DNA, 2466 bp, Homo sapiens
gcttcgcttgtttcttttgtgtgtgtgttttgttttgttttgttttgttttgagacagtctcgctgtgtcgcccaagcaggagaattgcttgaacctgggagatggagattgcagtgagctgagatcgtaccactgcactgcagtctgggtgacaaagcaagactctgtctcaaaaaacaaacaaacaaacaaactttttgaaattgaattgcaatatgtctgctactttggcttgggctggacagtttatctaataagcaaggcagcttcttgtgtgctatggtaataagccttcttaacaggctaagcttccctcataagaactgtggtgtttctctttttttttttttgttttggtttgttttggttttttggtttggttttgttttgttttttaaatcagtatccaatgttttataggggccaaaggttaactttgcactattccctgtcagttaaaggccactgatatttttctaagttagcaaggctcacttgcttgctttcttgcctcccttgcctccatccctctcccttcctaccttctctatttacctatttctctccctccctctcttctcctctctttttttttcccccgcatatgcagctttttgattgtacttgattttatagagactgcacagttccagcaagattgggagtcaggcatggagcaggcatctcaggctaccagaaagaattggtcacctagactttcagtcaggcatcctcgtttgcattgtcctgtaagtcaattagttgataaatagttcccccttcatcccttaagttttgtttttgtttttgtttttaatataggtaagtgggactctacctaaaattttgcatcatacttatgggtaatatctttttcatatattatttatcaaagtatgaagttgagtattttgcttgtaccatttcaattctgcattatagtagttcattgtataactgaaagaaatgatttcttcataagtgacattaaatatgaacattcatccaattgaatttacaaaatctttccaaaattataagggagaaaaatcgggtttacttcaatctttaaaaatctggcacctcttagtaactttcagtatttctaaattgctctaaaattttataataaatagattagggttttgcaatagtcttaatttttaagccaaaggttttctgagaccttaggttttgtagtctaaccagcttatgtggttatttaaaagaatattctttgtgtttttaaattgctatttttaaaaaagctttttattacccattttataaaatgttatactcatatttgtctgaatttttccagtattcctacatgaaattgtatgtattaaaaactcaatattagtggcaaatattaatactattaaaatggattttggtgctatattcttgtagctaaagcctagtagaattctcaagaataggtgaaatacactttcaaagttgcctgtcatttaaaagaccaaataagcattttgtattaaataaattagcagatggttagagacttcaaggagagttagcttggtcatttaattgcgacttcatgttatttgattgaaataacccacatccttgctttgtataagatattcgctctggagaagttacatgtaaatagaattctataaattgttttccagttgaccgagtatctgttgtgtttttgtttaaaaagaggattccatgacataataaaaattattttaaaaaatgttttggtgctgggattacaggtgtttgccaccgcgcccagcccaaattattacattcgtaagacagacacctcttagaatctatatatatgaggttttactcccttttctacactcagtatgttttaattgatgcaaagcaattaattggcctaaaatgtttcaaatattatagtctatacattcagaaagtaaggtttaagaatgaattattggtgcttcttggtgggtgtatatagcagtttttagaagtttaaatttcacctctactcagaaagataagcttttgattcagtggtttcaaattttcagatcgatccatttaagaattgttttttcaaatgtatatacacgtataacataaaaatttttgtaatttcaaatgtctttttttcagttttttggatgaattattatatttggttttagttacatttaaaagcttgaaaattacctttctaacaatcatttgaatgtcattcattgtcacatgaaatcaggtatttacgtttttttctaatgctaaaatatccaacattgtaattgccctatttttccatttttataagtataaaagcaatgaattttaacactggtatttaaataatacaaaatattatccaaattcataacagcacagtgaagtttcttttgaagactatgtactggaagcatttagaacttaccaatatatactgggataaatcgtttcaataaagtttatcaaat

SEQ ID NO: 376026 - DNA, 2390 bp, Homo sapiens
tgagacagagtctcgctctgtcgcccaggctggagtgcatgagctgagatcgtaccactgcactgcagtctgggtgacaaagcaagactctgtctcaaaaaacaaacaaacaaacaaactttttgaaattgaattgcaatatgtctgctactttggcttgggctggacagtttatctaataagcaaggcagcttcttgtgtgctatggtaataagccttcttaacaggctaagcttccctcataagaactgtggtgtttctctttttttttttttgttttggtttgttttggttttttggtttggttttgttttgttttttaaatcagtatccaatgttttataggggccaaaggttaactttgcactattccctgtcagttaaaggccactgatatttttctaagttagcaaggctcacttgcttgctttcttgcctcccttgcctccatccctctcccttcctaccttctctatttacctatttctctccctccctctcttctcctctctttttttttcccccgcatatgcagctttttgattgtacttgattttatagagactgcacagttccagcaagattgggagtcaggcatggagcaggcatctcaggctaccagaaagaattggtcacctagactttcagtcaggcatcctcgtttgcattgtcctgtaagtcaattagttgataaatagttcccccttcatcccttaagttttgtttttgtttttgtttttaatataggtaagtgggactctacctaaaattttgcatcatacttatgggtaatatctttttcatatattatttatcaaagtatgaagttgagtattttgcttgtaccatttcaattctgcattatagtagttcattgtataactgaaagaaatgatttcttcataagtgacattaaatatgaacattcatccaattgaatttacaaaatctttccaaaattataagggagaaaaatcgggtttacttcaatctttaaaaatctggcacctcttagtaactttcagtatttctaaattgctctaaaattttataataaatagattagggttttgcaatagtcttaatttttaagccaaaggttttctgagaccttaggttttgtagtctaaccagcttatgtggttatttaaaagaatattctttgtgtttttaaattgctatttttaaaaaagctttttattacccattttataaaatgttatactcatatttgtctgaatttttccagtattcctacatgaaattgtatgtattaaaaactcaatattagtggcaaatattaatactattaaaatggattttggtgctatattcttgtagctaaagcctagtagaattctcaagaataggtgaaatacactttcaaagttgcctgtcatttaaaagaccaaataagcattttgtattaaataaattagcagatggttagagacttcaaggagagttagcttggtcatttaattgcgacttcatgttatttgattgaaataacccacatccttgctttgtataagatattcgctctggagaagttacatgtaaatagaattctataaattgttttccagttgaccgagtatctgttgtgtttttgtttaaaaagaggattccatgacataataaaaattattttaaaaaatgttttggtgctgggattacaggtgtttgccaccgcgcccagcccaaattattacattcgtaagacagacacctcttagaatctatatatatgaggttttactcccttttctacactcagtatgttttaattgatgcaaagcaattaattggcctaaaatgtttcaaatattatagtctatacattcagaaagtaaggtttaagaatgaattattggtgcttcttggtgggtgtatatagcagtttttagaagtttaaatttcacctctactcagaaagataagcttttgattcagtggtttcaaattttcagatcgatccatttaagaattgttttttcaaatgtatatacacgtataacataaaaatttttgtaatttcaaatgtctttttttcagttttttggatgaattattatatttggttttagttacatttaaaagcttgaaaattacctttctaacaatcatttgaatgtcattcattgtcacatgaaatcaggtatttacgtttttttctaatgctaaaatatccaacattgtaattgccctatttttccatttttataagtataaaagcaatgaattttaacactggtatttaaataatacaaaatattatccaaattcataacagcacagtgaagtttcttttgaagactatgtactggaagcatttagaacttaccaatatatactgggataaatcgtttcaataaagtttatcaaat

SEQ ID NO: 376027 - DNA, 1637 bp, Homo sapiens
gcatgatttatgcctctcttgggctttagattttattcctttacttttctataactctgtcatgaccagtttaaaggccccaatgtcatgtcctcgcattaacaaccaaggctacaatgcaagccctgccatgtgcgcttctttacaaaaggtcaaagtaaaaaggaaatctataccaaagagcctctagatactatttccagcttcggggaagtccatagtaggtacttccacgggtagagaacattatcttagactgggataagggttggtattcgcagtccccttcctacgttctgcccattgtaaagaccagggtcagcgttgagcctcgcccttcttgctagaactacaactcccaggatgccccgcggcacgggagtgcgcacgcgcgtcggaggcgaaggaggaacccaccgcacctacagggcggtcgagtgagggagctgctggcgggtgggtctggcaactctttgggaggccgacgcgggcggaccggcgggtgctgggaaccgagcctcggcttgcggccggcagtttccgtgggtctgtgaagaggtcggcggcccctgcgggcgccagtcagctttaagaaaaagtagagatcacttctgactgtactgaacagcaaaaattaagtgacttgctgccctgcacatcatggcactgccattccgtaaggacttagaaaagtacaaagaccttgatgaagatgagctccttgggaatctgtcagaaacagaactgaaacaactggaaactgttttggatgatcttgaccccgagaatgcccttctgcctgcagggttccggcagaagaaccagacatcaaagtccaccacagggccatttgatagagagcatctcctttcatatctggagaaagaagcattggagcataaagacagggaagactatgtgccctacactggagaaaaaaaagggaaaatatttatccccaaacagaaacctgtacagacttttacagaagaaaaagtgtctcttgatccagaattagaagaagctttgacaagtgcttctgatacagaattgtgtgacctcgcagcaattcttgggatgcacaatttgataacgaatacaaagttctgtaatataatgggaagtagtaatggtgttgaccaagaacatttttcaaatgtggtcaaaggtgaaaagattcttccggtatttgatgagccaccaaatccaaccaatgtagaagagagtttgaagagaactaaagaaaacgatgctcatcttgttgaagttaatttgaataatataaagaatatcccaattccaaccctaaaagattttgcaaaggctttggaaaccaacacacatgtgaaatgtttcagtcttgcagccacccggagcaatgaccctgttgctactgcttttgcagaaatgctgaaagtgaacaaaactttgaagagcttaaatgtggagtccaactttatcacgggagttgggattctggcactgatgggagaagactgcgctaaaatacaacaacaacaacaacaacaaactaagtacacttggtaccttggaaaatgctgaatgctatcatgatgctggtatatttgttatgagccacagaaatacctttatataactatactactgatgcgaga

SEQ ID NO: 376028 - DNA, 1174 bp, Homo sapiens
aatttcagattttcagattagggatgctgaactggtgtaatgcccagtattccaaaatccaaaataatttgaaatctgaaacacttaatggtcccagcatgttggataagggatactcaacctgtattgatttttctccactataattcagttctataagttcttccctataaaaaatgaatgaattagaaatttgataataaaacatattttattaattttaaactctatcttgcagtctgatcattcagaaaggtcaacctagaaaaaagacatggctaagtaaactattttaagccataactaagtattttggaaagccttcattaacacataaagaattttggccaagtactgtggcttatgcctgtaatcctagcactttggaaagccgaggccgacggatcacttgagtcctgacctcgtaatccacccgcctcggcctcccaaagtgctgggattacaggtgtttgccaccgcgcccagcccaaattattacattcgtaagacagacacctcttagaatctatatatatgaggttttactcccttttctacactcagtatgttttaattgatgcaaagcaattaattggcctaaaatgtttcaaatattatagtctatacattcagaaagtaaggtttaagaatgaattattggtgcttcttggtgggtgtatatagcagtttttagaagtttaaatttcacctctactcagaaagataagcttttgattcagtggtttcaaattttcagatcgatccatttaagaattgttttttcaaatgtatatacacgtataacataaaaatttttgtaatttcaaatgtctttttttcagttttttggatgaattattatatttggttttagttacatttaaaagcttgaaaattacctttctaacaatcatttgaatgtcattcattgtcacatgaaatcaggtatttacgtttttttctaatgctaaaatatccaacattgtaattgccctatttttccatttttataagtataaaagcaatgaattttaacactggtatttaaataatacaaaatattatccaaattcataacagcacagtgaagtttcttttgaagactatgtactggaagcatttagaacttaccaatatatactgggataaatcgtttcaataaagtttatcaaat

SEQ ID NO: 376029 - DNA, 1120 bp, Homo sapiens
aatttcagattttcagattagggatgctgaactggtgtaatgcccagtattccaaaatccaaaataatttgaaatctgaaacacttaatggtcccagcatgttggataagggatactcaacctgtattgatttttctccactataattcagttctataagttcttccctataaaaaatgaatgaattagaaatttgataataaaacatattttattaattttaaactctatcttgcagtctgatcattcagaaaggtcaacctagaccttcattaacacataaagaattttggccaagtactgtggcttatgcctgtaatcctagcactttggaaagccgaggccgacggatcacttgagtcctgacctcgtaatccacccgcctcggcctcccaaagtgctgggattacaggtgtttgccaccgcgcccagcccaaattattacattcgtaagacagacacctcttagaatctatatatatgaggttttactcccttttctacactcagtatgttttaattgatgcaaagcaattaattggcctaaaatgtttcaaatattatagtctatacattcagaaagtaaggtttaagaatgaattattggtgcttcttggtgggtgtatatagcagtttttagaagtttaaatttcacctctactcagaaagataagcttttgattcagtggtttcaaattttcagatcgatccatttaagaattgttttttcaaatgtatatacacgtataacataaaaatttttgtaatttcaaatgtctttttttcagttttttggatgaattattatatttggttttagttacatttaaaagcttgaaaattacctttctaacaatcatttgaatgtcattcattgtcacatgaaatcaggtatttacgtttttttctaatgctaaaatatccaacattgtaattgccctatttttccatttttataagtataaaagcaatgaattttaacactggtatttaaataatacaaaatattatccaaattcataacagcacagtgaagtttcttttgaagactatgtactggaagcatttagaacttaccaatatatactgggataaatcgtttcaataaagtttatcaaat

SEQ ID NO: 376030 - DNA, 169 bp, Homo sapiens
taattcttttttatatgggtaatcttcggaagcatatagcattagcattcttattggtcatattggctgattcattctctctggcagaatgcccttctgcctgcagggttccggcagaagaaccagacatcaaagtccaccacagggccatttgatagagagcatctcc

SEQ ID NO: 376031 - DNA, 4980 bp, Homo sapiens
gcatgatttatgcctctcttgggctttagattttattcctttacttttctataactctgtcatgaccagtttaaaggccccaatgtcatgtcctcgcattaacaaccaaggctacaatgcaagccctgccatgtgcgcttctttacaaaaggtcaaagtaaaaaggaaatctataccaaagagcctctagatactatttccagcttcggggaagtccatagtaggtacttccacgggtagagaacattatcttagactgggataagggttggtattcgcagtccccttcctacgttctgcccattgtaaagaccagggtcagcgttgagcctcgcccttcttgctagaactacaactcccaggatgccccgcggcacgggagtgcgcacgcgcgtcggaggcgaaggaggaacccaccgcacctacagggcggtcgagtgagggagctgctggcgggtgggtctggcaactctttgggaggccgacgcgggcggaccggcgggtgctgggaaccgagcctcggcttgcggccggcagtttccgtgggtctgtgaagaggtcggcggcccctgcgggcgccagtcagctttaagaaaaagtagagatcacttctgactgtactgaacagcaaaaattaagtgacttgctgccctgcacatcatggcactgccattccgtaaggacttagaaaagtacaaagaccttgatgaagatgagctccttgggaatctgtcagaaacagaactgaaacaactggaaactgttttggatgatcttgaccccgagaatgcccttctgcctgcagggttccggcagaagaaccagacatcaaagtccaccacagggccatttgatagagagcatctcctttcatatctggagaaagaagcattggagcataaagacagggaagactatgtgccctacactggagaaaaaaaagggaaaatatttatccccaaacagaaacctgtacagacttttacagaagaaaaagtgtctcttgatccagaattagaagaagctttgacaagtgcttctgatacagaattgtgtgacctcgcagcaattcttgggatgcacaatttgataacgaatacaaagttctgtaatataatgggaagtagtaatggtgttgaccaagaacatttttcaaatgtggtcaaaggtgaaaagattcttccggtatttgatgagccaccaaatccaaccaatgtagaagagagtttgaagagaactaaagaaaacgatgctcatcttgttgaagttaatttgaataatataaagaatatcccaattccaaccctaaaagattttgcaaaggctttggaaaccaacacacatgtgaaatgtttcagtcttgcagccacccggagcaatgaccctgttgctactgcttttgcagaaatgctgaaagtgaacaaaactttgaagagcttaaatgtggagtccaactttatcacgggagttgggattctggcactgattgatgcgttaagagataatgaaaccctggcagagctcaagattgacaatcagaggcagcagttggggacagctgtagaattggaaatggccaagatgcttgaggaaaatacaaatatccttaaatttggatatcagtttacacagcagggaccacgaaccagagcagctaatgctataacaaaaaacaatgacttagtgcgtaagagacgagttgaaggagatcaccagtaagtctgcaaaggtgtaatctttggaagacttcagaagatcaccaagggctcatgttggtgacatcatgtaaaattttcctgggtagaagggaaaagactggaaaaatttttttagtgacatgcattttttttttagttgttatcaaattgtaaaatcagtaatgtgatattttatattctgaaacatttctactttctgctaaaatcaattttaatttagtttaattgaatgatttatgatgaatcttgggcaaaaaaatacaactgtaaaaaatttcacaggtcatttgtgtagaataatttgaacattgtgaggaccaatcttttttaaatcaaaagggatgttgctggtatcagaattgttattgcttcatttagacataaaacacttaagtgttttcttcactccgtgacctggagagttttccattttttaaaatacatgaacttggcaagggtgtgatttttctttatcaagagaacaaaatgccagaatgttaaaacagttaactcaaaatctagtcatctgtgtaggagctaaagcaggtctccagggagagagggtggtcgtctgtgcattccaggttactgcacttgtctgatgtgacgtagcaacacccaggtcttcttaaaacaaagtcatcagctttgccaggttacatactttatttaaaagtatagtgaggtcgaagttcattccagtgtttcattttaataatgtgggcattattaaatttttgtggaagctaatagtaaaaaataaaagctgttttcaccacctccctccccaccccccaaaaaaggcgtacagccaactcttagttatttagggtaagagaaaaaagaaaactgttaaacaatgaaatcaaagataataaatatgatagatttccagtatgaggcacttgcaaaacagtcatttaaactgatggttactgtaagtcagttggaagctggcatgtatgtaaattacttggtgttacaccatatccgaagaagttcctatgtgcagtgcagaattgcataaacagtatttaatcactgctacaaatcttccaaccaagaaggaaaactgctattcttcataaatctaatttttagtatatgcttcctttcatcttatacttttatcaatatttataaaagtcatttctataataaaagcagtctttcttgctcaaagtattaaggtgaacaattgaatagagtactgtggtcgggagactgatttgagactgcagagctgatgctgggtagagggtctggacttgtattcatgttctgtctcagggcagcccctggagcaggagatggcagaggcatttacagctgcagaaaacagggaggaatggaatctgaggtagccctggcctcaaaattcaggcctggctgtatcatttacagagatttttctggagggaaaagtctcatttctgaggaaggcaaggtggctaatcattattaattttttttaaactttttgggccgggcgcagtggctcacgcctgtaatcccagcacttttgggaagccaaagtgggtggatcacttaaggtcaggagttcaagaccagcctggccaacatggtgaaaccctgtctctactaaaaatcaaaaaagtagccgggtgtggtggtgcacacctgtaatcccagctactcgggaggctgaggcaggagaattgcttgaacctgggagatggagattgcagtgagctgagatcgtaccactgcactgcagtctgggtgacaaagcaagactctgtctcaaaaaacaaacaaacaaacaaactttttgaaattgaattgcaatatgtctgctactttggcttgggctggacagtttatctaataagcaaggcagcttcttgtgtgctatggtaataagccttcttaacaggctaagcttccctcataagaactgtggtgtttctctttttttttttttgttttggtttgttttggttttttggtttggttttgttttgttttttaaatcagtatccaatgttttataggggccaaaggttaactttgcactattccctgtcagttaaaggccactgatatttttctaagttagcaaggctcacttgcttgctttcttgcctcccttgcctccatccctctcccttcctaccttctctatttacctatttctctccctccctctcttctcctctctttttttttcccccgcatatgcagctttttgattgtacttgattttatagagactgcacagttccagcaagattgggagtcaggcatggagcaggcatctcaggctaccagaaagaattggtcacctagactttcagtcaggcatcctcgtttgcattgtcctgtaagtcaattagttgataaatagttcccccttcatcccttaagttttgtttttgtttttgtttttaatataggtaagtgggactctacctaaaattttgcatcatacttatgggtaatatctttttcatatattatttatcaaagtatgaagttgagtattttgcttgtaccatttcaattctgcattatagtagttcattgtataactgaaagaaatgatttcttcataagtgacattaaatatgaacattcatccaattgaatttacaaaatctttccaaaattataagggagaaaaatcgggtttacttcaatctttaaaaatctggcacctcttagtaactttcagtatttctaaattgctctaaaattttataataaatagattagggttttgcaatagtcttaatttttaagccaaaggttttctgagaccttaggttttgtagtctaaccagcttatgtggttatttaaaagaatattctttgtgtttttaaattgctatttttaaaaaagctttttattacccattttataaaatgttatactcatatttgtctgaatttttccagtattcctacatgaaattgtatgtattaaaaactcaatattagtggcaaatattaatactattaaaatggattttggtgctatattcttgtagctaaagcctagtagaattctcaagaataggtgaaatacactttcaaagttgcctgtcatttaaaagaccaaataagcattttgtattaaataaattagcagatggttagagacttcaaggagagttagcttggtcatttaattgcgacttcatgttatttgattgaaataacccacatccttgctttgtataagatattcgctctggagaagttacatgtaaatagaattctataaattgttttccagttg

SEQ ID NO: 376032 - DNA, 4614 bp, Homo sapiens
gcatgatttatgcctctcttgggctttagattttattcctttacttttctataactctgtcatgaccagtttaaaggccccaatgtcatgtcctcgcattaacaaccaaggctacaatgcaagccctgccatgtgcgcttctttacaaaaggtcaaagtaaaaaggaaatctataccaaagagcctctagatactatttccagcttcggggaagtccatagtaggtacttccacgggtagagaacattatcttagactgggataagggttggtattcgcagtccccttcctacgttctgcccattgtaaagaccagggtcagcgttgagcctcgcccttcttgctagaactacaactcccaggatgccccgcggcacgggagtgcgcacgcgcgtcggaggcgaaggaggaacccaccgcacctacagggcggtcgagtgagggagctgctggcgggtgggtctggcaactctttgggaggccgacgcgggcggaccggcgggtgctgggaaccgagcctcggcttgcggccggcagtttccgtgggtctgtgaagaggtcggcggcccctgcgggcgccagtcagctttaagaaaaagtagagatcacttctgactgtactgaacagcaaaaattaagtgacttgctgccctgcacatcatggcactgccattccgtaaggacttagaaaagtacaaagaccttgatgaagatgagctccttgggaatctgtcagaaacagaactgaaacaactggaaactgttttggatgatcttgaccccgagaatgcccttctgcctgcagggttccggcagaagaaccagacatcaaagtccaccacagggccatttgatagagagcatctcctttcatatctggagaaagaagcattggagcataaagacagggaagactatgtgccctacactggagaaaaaaaagggaaaatatttatccccaaacagaaacctgtacagacttttacagaagaaaaagtgtctcttgatccagaattagaagaagctttgacaagtgcttctgatacagaattgtgtgacctcgcagcaattcttgggatgcacaatttgataacgaatacaaagttctgtaatataatgggaagtagtaatggtgttgaccaagaacatttttcaaatgtggtcaaaggtgaaaagattcttccggtatttgatgagccaccaaatccaaccaatgtagaagagagtttgaagagaactaaagaaaacgatgctcatcttgttgaagttaatttgaataatataaagaatatcccaattccaaccctaaaagattttgcaaaggctttggaaaccaacacacatgtgaaatgtttcagtcttgcagccacccggagcaatgaccctgttgctactgcttttgcagaaatgctgaaagtgaacaaaactttgaagagcttaaatgtggagtccaactttatcacgggagttgggattctggcactgattgatgcgttaagagataatgaaaccctggcagagctcaagattgacaatcagaggcagcagttggggacagctgtagaattggaaatggccaagatgcttgaggaaaatacaaatatccttaaatttggatatcagtttacacagcagggaccacgaaccagagcagctaatgctataacaaaaaacaatgacttagtgcgtaagagacgagttgaaggagatcaccagtaagtctgcaaaggtgtaatctttggaagacttcagaagatcaccaagggctcatgttggtgacatcatgtaaaattttcctgggtagaagggaaaagactggaaaaatttttttagtgacatgcattttttttttagttgttatcaaattgtaaaatcagtaatgtgatattttatattctgaaacatttctactttctgctaaaatcaattttaatttagtttaattgaatgatttatgatgaatcttgggcaaaaaaatacaactgtaaaaaatttcacaggtcatttgtgtagaataatttgaacattgtgaggaccaatcttttttaaatcaaaagggatgttgctggtatcagaattgttattgcttcatttagacataaaacacttaagtgttttcttcactccgtgacctggagagttttccattttttaaaatacatgaacttggcaagggtgtgatttttctttatcaagagaacaaaatgccagaatgttaaaacagttaactcaaaatctagtcatctgtgtaggagctaaagcaggtctccctccccaccccccaaaaaaggcgtacagccaactcttagttatttagggtaagagaaaaaagaaaactgttaaacaatgaaatcaaagataataaatatgatagatttccagtatgaggcacttgcaaaacagtcatttaaactgatggttactgtaagtcagttggaagctggcatgtatgtaaattacttggtgttacaccatatccgaagaagttcctatgtgcagtgcagaattgcataaacagtatttaatcactgctacaaatcttccaaccaagaaggaaaactgctattcttcataaatctaatttttagtatatgcttcctttcatcttatacttttatcaatatttataaaagtcatttctataataaaagcagtctttcttgctcaaagtattaaggtgaacaattgaatagagtactgtggtcgggagactgatttgagactgcagagctgatgctgggtagagggtctggacttgtattcatgttctgtctcagggcagcccctggagcaggagatggcagaggcatttacagctgcagaaaacagggaggaatggaatctgaggtagccctggcctcaaaattcaggcctggctgtatcatttacagagatttttctggagggaaaagtctcatttctgaggaaggcaaggtggctaatcattattaattttttttaaactttttgggccgggcgcagtggctcacgcctgtaatcccagcacttttgggaagccaaagtgggtggatcacttaaggtcaggagttcaagaccagcctggccaacatggtgaaaccctgtctctactaaaaatcaaaaaagtagccgggtgtggtggtgcacacctgtaatcccagctactcgggaggctgaggcaggagaattgcttgaacctgggagatggagattgcagtgagctgagatcgtaccactgcactgcagtctgggtgacaaagcaagactctgtctcaaaaaacaaacaaacaaacaaactttttgaaattgaattgcaatatgtctgctactttggcttgggctggacagtttatctaataagcaaggcagcttcttgtgtgctatggtaataagccttcttaacaggctaagcttccctcataagaactgtggtgtttctctttttttttttttgttttggtttgttttggttttttggtttggttttgttttgttttttaaatcagtatccaatgttttataggggccaaaggttaactttgcactattccctgtcagttaaaggccactgatatttttctaagttagcaaggctcacttgcttgctttcttgcctcccttgcctccatccctctcccttcctaccttctctatttacctatttctctccctccctctcttctcctctctttttttttcccccgcatatgcagctttttgattgtacttgattttatagagactgcacagttccagcaagattgggagtcaggcatggagcaggcatctcaggctaccagaaagaattggtcacctagactttcagtcaggcatcctcgtttgcattgtcctgtaagtcaattagttgataaatagttcccccttcatcccttaagttttgtttttgtttttgtttttaatataggtaagtgggactctacctaaaattttgcatcatacttatgggtaatatctttttcatatattatttatcaaagtatgaagttgagtattttgcttgtaccatttcaattctgcattatagtagttcattgtataactgaaagaaatgatttcttcataagtgacattaaatatgaacattcatccaattgaatttacaaaatctttccaaaattataagggagaaaaatcgggtttacttcaatctttaaaaatctggcacctcttagtaactttcagtatttctaaattgctctaaaattttataataaatagattagggttttgcaatagtcttaatttttaagccaaaggttttctgagaccttaggttttgtagtctaaccagcttatgtggttatttaaaagaatattctttgtgtttttaaattgctatttttaaaaaagctttttattacccattttataaaatgttatactcatatttgtctgaatttttccagtattcctacatgaaattgtatgtattaaaaactcaatattagtggcaaatattaatactattaaaatggattttggtgctatattcttgtagctaaagcctagtagaattctcaagaataggtgaaatacactttcaaagttgcctgtcatttaaaagaccaaataagcattttgtattaaataaattagcagatggttagagacttc

SEQ ID NO: 376033 - DNA, 3408 bp, Homo sapiens
gcatgatttatgcctctcttgggctttagattttattcctttacttttctataactctgtcatgaccagtttaaaggccccaatgtcatgtcctcgcattaacaaccaaggctacaatgcaagccctgccatgtgcgcttctttacaaaaggtcaaagtaaaaaggaaatctataccaaagagcctctagatactatttccagcttcggggaagtccatagtaggtacttccacgggtagagaacattatcttagactgggataagggttggtattcgcagtccccttcctacgttctgcccattgtaaagaccagggtcagcgttgagcctcgcccttcttgctagaactacaactcccaggatgccccgcggcacgggagtgcgcacgcgcgtcggaggcgaaggaggaacccaccgcacctacagggcggtcgagtgagggagctgctggcgggtgggtctggcaactctttgggaggccgacgcgggcggaccggcgggtgctgggaaccgagcctcggcttgcggccggcagtttccgtgggtctgtgaagaggtcggcggcccctgcgggcgccagtcagctttaagaaaaagtagagatcacttctgactgtactgaacagcaaaaattaagtgacttgctgccctgcacatcatggcactgccattccgtaaggacttagaaaagtacaaagaccttgatgaagatgagctccttgggaatctgtcagaaacagaactgaaacaactggaaactgttttggatgatcttgaccccgagaatgcccttctgcctgcagggttccggcagaagaaccagacatcaaagtccaccacagggccatttgatagagagcatctcctttcatatctggagaaagaagcattggagcataaagacagggaagactatgtgccctacactggagaaaaaaaagggaaaatatttatccccaaacagaaacctgtacagacttttacagaagaaaaagtgtctcttgatccagaattagaagaagctttgacaagtgcttctgatacagaattgtgtgacctcgcagcaattcttgggatgcacaatttgataacgaatacaaagttctgtaatataatgggaagtagtaatggtgttgaccaagaacatttttcaaatgtggtcaaaggtgaaaagattcttccggtatttgatgagccaccaaatccaaccaatgtagaagagagtttgaagagaactaaagaaaacgatgctcatcttgttgaagttaatttgaataatataaagaatatcccaattccaaccctaaaagattttgcaaaggctttggaaaccaacacacatgtgaaatgtttcagtcttgcagccacccggagcaatgaccctgttgctactgcttttgcagaaatgctgaaagtgaacaaaactttgaagagcttaaatgtggagtccaactttatcacgggagttgggattctggcactgattgatgcgttaagagataatgaaaccctggcagagctcaagattgacaatcagaggcagcagttggggacagctgtagaattggaaatggccaagatgcttgaggaaaatacaaatatccttaaatttggatatcagtttacacagcagggaccacgaaccagagcagctaatgctataacaaaaaacaatgacttagtgcgtaagagacgagttgaaggagatcaccagtaagtctgcaaaggtgtaatctttggaagacttcagaagatcaccaagggctcatgttggtgacatcatgtaaaattttcctgggtagaagggaaaagactggaaaaatttttttagtgacatgcattttttttttagttgttatcaaattgtaaaatcagtaatgtgatattttatattctgaaacatttctactttctgctaaaatcaattttaatttagtttaattgaatgatttatgatgaatcttgggcaaaaaaatacaactgtaaaaaatttcacaggtcatttgtgtagaataatttgaacattgtgaggaccaatcttttttaaatcaaaagggatgttgctggtatcagaattgttattgcttcatttagacataaaacacttaagtgttttcttcactccgtgacctggagagttttccattctttgcaagtttagtactgcccaaatttactcattctacagtgttactgcactttgaacgtattgacccatgtcacccaagagaagcaaacatatggatgcactagagacaactcgggttgctgctctcagttaagggctatgagttcttggggtctaagtatctgtaaaattatcctctccatcagctctcactgatcattaatgtttctggatatttcttaccctaagatttgcttaccaacaaatcaaagaaacgcttcactaattatttttaaattgagaaaatagtattcagaggcaaagatttttatattcttttttgagaccatgagactgtctcaaaaaacaaaacaaaacaaaaaaatgggtttttttgttgttgtttttgtcttttacttaggacacctgctctagaggctagataaaaatagattgtaatggccgggtgcagtggctcacacttgtaatcccagcacttgtccaggctggtctcgaactcctgacctcgtaatccacccgcctcggcctcccaaagtgctgggattacaggtgtttgccaccgcgcccagcccaaattattacattcgtaagacagacacctcttagaatctatatatatgaggttttactcccttttctacactcagtatgttttaattgatgcaaagcaattaattggcctaaaatgtttcaaatattatagtctatacattcagaaagtaaggtttaagaatgaattattggtgcttcttggtgggtgtatatagcagtttttagaagtttaaatttcacctctactcagaaagataagcttttgattcagtggtttcaaattttcagatcgatccatttaagaattgttttttcaaatgtatatacacgtataacataaaaatttttgtaatttcaaatgtctttttttcagttttttggatgaattattatatttggttttagttacatttaaaagcttgaaaattacctttctaacaatcatttgaatgtcattcattgtcacatgaaatcaggtatttacgtttttttctaatgctaaaatatccaacattgtaattgccctatttttccatttttataagtataaaagcaatgaattttaacactggtatttaaataatacaaaatattatccaaattcataacagcacagtgaagtttcttttgaagactatgtactggaagcatttagaacttaccaatatatactgggataaatcgtttcaataaagtttatcaaat

SEQ ID NO: 376034 - DNA, 2028 bp, Homo sapiens
cagcggtaccagccatgagaaggcccggaaaaggaagagctgaaaatggaggaaaccagagttagaactggtggataccggagaagaaaccgcagctgcactaccgaccccccccccaggtttgatgtccctccctctcttctcctctctttttttttcccccgcatatgcagctttttgattgtacttgattttatagagactgcacagttccagcaagattgggagtcaggcatggagcaggcatctcaggctaccagaaagaattggtcacctagactttcagtcaggcatcctcgtttgcattgtcctgtaagtcaattagttgataaatagttcccccttcatcccttaagttttgtttttgtttttgtttttaatataggtaagtgggactctacctaaaattttgcatcatacttatgggtaatatctttttcatatattatttatcaaagtatgaagttgagtattttgcttgtaccatttcaattctgcattatagtagttcattgtataactgaaagaaatgatttcttcataagtgacattaaatatgaacattcatccaattgaatttacaaaatctttccaaaattataagggagaaaaatcgggtttacttcaatctttaaaaatctggcacctcttagtaactttcagtatttctaaattgctctaaaattttataataaatagattagggttttgcaatagtcttaatttttaagccaaaggttttctgagaccttaggttttgtagtctaaccagcttatgtggttatttaaaagaatattctttgtgtttttaaattgctatttttaaaaaagctttttattacccattttataaaatgttatactcatatttgtctgaatttttccagtattcctacatgaaattgtatgtattaaaaactcaatattagtggcaaatattaatactattaaaatggattttggtgctatattcttgtagctaaagcctagtagaattctcaagaataggtgaaatacactttcaaagttgcctgtcatttaaaagaccaaataagcattttgtattaaataaattagcagatggttagagacttcaaggagagttagcttggtcatttaattgcgacttcatgttatttgattgaaataacccacatccttgctttgtataagatattcgctctggagaagttacatgtaaatagaattctataaattgttttccagttgaccgagtatctgttgtgtttttgtttaaaaagaggattccatgacataataaaaattattttaaaaaatgttttggtgctgggattacaggtgtttgccaccgcgcccagcccaaattattacattcgtaagacagacacctcttagaatctatatatatgaggttttactcccttttctacactcagtatgttttaattgatgcaaagcaattaattggcctaaaatgtttcaaatattatagtctatacattcagaaagtaaggtttaagaatgaattattggtgcttcttggtgggtgtatatagcagtttttagaagtttaaatttcacctctactcagaaagataagcttttgattcagtggtttcaaattttcagatcgatccatttaagaattgttttttcaaatgtatatacacgtataacataaaaatttttgtaatttcaaatgtctttttttcagttttttggatgaattattatatttggttttagttacatttaaaagcttgaaaattacctttctaacaatcatttgaatgtcattcattgtcacatgaaatcaggtatttacgtttttttctaatgctaaaatatccaacattgtaattgccctatttttccatttttataagtataaaagcaatgaattttaacactggtatttaaataatacaaaatattatccaaattcataacagcacagtgaagtttcttttgaagactatgtactggaagcatttagaacttaccaatatatactgggataaatcgtttcaataaagtttatcaaat

SEQ ID NO: 376035 - DNA, 1234 bp, Homo sapiens
gcatgatttatgcctctcttgggctttagattttattcctttacttttctataactctgtcatgaccagtttaaaggccccaatgtcatgtcctcgcattaacaaccaaggctacaatgcaagccctgccatgtgcgcttctttacaaaaggtcaaagtaaaaaggaaatctataccaaagagcctctagatactatttccagcttcggggaagtccatagtaggtacttccacgggtagagaacattatcttagactgggataagggttggtattcgcagtccccttcctacgttctgcccattgtaaagaccagggtcagcgttgagcctcgcccttcttgctagaactacaactcccaggatgccccgcggcacgggagtgcgcacgcgcgtcggaggcgaaggaggaacccaccgcacctacagggcggtcgagtgagggagctgctggcgggtgggtctggcaactctttgggaggccgacgcgggcggaccggcgggtgctgggaaccgagcctcggcttgcggccggcagtttccgtgggtctgtgaagaggtcggcggcccctgcgggcgccagtcagctttaagaaaaagtagagatcacttctgactgtactgaacagcaaaaattaagtgacttgctgccctgcacatcatggcactgccattccgtaaggacttagaaaagtacaaagaccttgatgaagatgagctccttgggaatctgtcagaaacagaactgaaacaactggaaactgttttggatgatcttgaccccgagaatgcccttctgcctgcagggttccggcagaagaaccagacatcaaagtccaccacagggccatttgatagagagcatctcctttcatatctggagaaagaagcattggagcataaagacagggaagactatgtgccctacactggagaaaaaaaagggaaaatatttatccccaaacagaaacctgtacagacttttacagaagaaaaagtgtctcttgatccagaattagaagaagctttgacaagtgcttctgatacagaattgtgtgacctcgcagcaattcttgggatgcacaatttgataacgaatacaaagttctgtaatataatgggaagtagtaatagtttatgctgtaatagtttatgctgtaatagcttatgctgtaatagtttatgctgtaatagtttatgctgtaatagtttatgctgtaatagtttatgctgta

SEQ ID NO: 376036 - DNA, 2182 bp, Homo sapiens
ccattagtgtacctctcattcataagaaaaaagtttctctgatttattgaactaagtatgcagtgcctactctatcaaaaaacaaaacaaaacatgttttgcactacactgagtcctatgttactatttttggcaaggaatgcatgtcttatgattttatgccattctcaatcctctactctccaatctaatttgcacgcacaacaacaacaaaaagctatgagaactctaagccacttagttttctctgctataaagttactgtagcttacttccaaggttatgtaaccaatattttctaataaatgcataataacatgatgtagcttggctacgtttaatagtcgaaagcgttcacatgttatctttctcactagctgcaccaaaaatcaagacagctgaccaagaccttgtggttgatgttggcaagcctctgacaatggtggtgccatatgatgcctaccccaaagcagaagctgaatggtttaaagaaaatgaacctttatctacaaaaaccattgatactacggctgaacaaacttctttcagaattttagaagccaagaaaggagacaaagggaggtataaaattgtgcttcagaacaaacatggaaaagcagaaggattcatcaatttaaaagttattggtaagcccttgggtctctcagacttaattggcaaagcacaatttaaaagcaagacagcacactaaaaaaattcctctatatgtgaatttcagatgttcctgggccagtacgtaacttagaagtgacagaaacatttgatggtgaagtgagccttgcttgggaagaacctttaactgatggtggaagcaaaatcataggttacgttgttgaaagacgtgacattaagagaaagacctgggttctggccacagaccgtgcagagagttgtgagtttactgtcactggtctacagaaaggaggagttgagtacctattccgtgtgagtgcaagaaacagagttggcactggtgagccagtagaaactgacaatcctgtagaagcaaggagtaaatatgatgttccaggccctcctttgaatgtaaccatcactgatgtgaatcgatttggtgtctcactgacatgggaaccaccagagtatgatggaggtgctgagatcacaaactacgtcattgaattaagagacaagacttctatcaggtgggatactgccatgactgtgagagctgaagacctgtctgcaactgttactgatgtggtagaaggacaggagtacagtttccgagtgagagcccaaaatcgaattggagttggaaaaccaagtgcagccacacccttcgtcaaagttgctgatccaattgagagaccaagtcctcctgtaaacctaacttcctcagatcagactcagtcatcagttcagctcaaatgggaacctcctctgaaagatggaggaagcccaatattaggctatataattgagcgatgcgaagaaggaaaagataattggattcgttgcaatatgaaacttgtccctgaactgacttacaaggttaccggattggaaaaaggaaataaatatttatatagagtatctgcagaaaataaagctggtgtttcagatccatctgaaattcttggtcctctcaccgctgacgatgcatttatagatattttatttttagatcggggaatagcacatagctactttggggcaacagggacttaaatatggcactgcaaactcattaacttttcttctttgtagttgaaccaacaatggatttaagtgcatttaaagatggtctggaagttattgtcccaaatcctatcacgatcctggttccaagtacaggctatccaaggccaactgcaacctggtgttttggagataaagtactagaaacaggggaccgggtgaaaatgaagaccttgtctgcctatgccgaacttgtcatttctccaagtgaacgttcagacaagggcatttatacactgaaattagaaaaccgtgtgaaaacaatttctggggaaattgatgtcaatgtaattggtaaggaacaaaacatttatcatctaaggtgatttggcagtattaacaaatattagttcagactattaacagtgactcgtgagtgcattttttttcagctcgcccaagtgcacccaaagaattgaaatttggtgatataaccaaggac

SEQ ID NO: 376037 - DNA, 2289 bp, Homo sapiens
ccattagtgtacctctcattcataagaaaaaagtttctctgatttattgaactaagtatgcagtgcctactctatcaaaaaacaaaacaaaacatgttttgcactacactgagtcctatgttactatttttggcaaggaatgcatgtcttatgattttatgccattctcaatcctctactctccaatctaatttgcacgcacaacaacaacaaaaagctatgagaactctaagccacttagttttctctgctataaagttactgtagcttacttccaaggttatgtaaccaatattttctaataaatgcataataacatgatgtagcttggctacgtttaatagtcgaaagcgttcacatgttatctttctcactagctgcaccaaaaatcaagacagctgaccaagaccttgtggttgatgttggcaagcctctgacaatggtggtgccatatgatgcctaccccaaagcagaagctgaatggtttaaagaaaatgaacctttatctacaaaaaccattgatactacggctgaacaaacttctttcagaattttagaagccaagaaaggagacaaagggaggtataaaattgtgcttcagaacaaacatggaaaagcagaaggattcatcaatttaaaagttattggtaagcccttgggtctctcagacttaattggcaaagcacaatttaaaagcaagacagcacactaaaaaaattcctctatatgtgaatttcagatgttcctgggccagtacgtaacttagaagtgacagaaacatttgatggtgaagtgagccttgcttgggaagaacctttaactgatggtggaagcaaaatcataggttacgttgttgaaagacgtgacattaagagaaagacctgggttctggccacagaccgtgcagagagttgtgagtttactgtcactggtctacagaaaggaggagttgagtacctattccgtgtgagtgcaagaaacagagttggcactggtgagccagtagaaactgacaatcctgtagaagcaaggagtaaatatggtaagaagttttaagtaaattcaagttagcttttaagtaaattgcagtctttgccttcatcatcgttaccccaaactcatattttcttcttctgtggtgaaatccagatgttccaggccctcctttgaatgtaaccatcactgatgtgaatcgatttggtgtctcactgacatgggaaccaccagagtatgatggaggtgctgagatcacaaactacgtcattgaattaagagacaagacttctatcaggtgggatactgccatgactgtgagagctgaagacctgtctgcaactgttactgatgtggtagaaggacaggagtacagtttccgagtgagagcccaaaatcgaattggagttggaaaaccaagtgcagccacacccttcgtcaaagttgctgatccaattgagagaccaagtcctcctgtaaacctaacttcctcagatcagactcagtcatcagttcagctcaaatgggaacctcctctgaaagatggaggaagcccaatattaggctatataattgagcgatgcgaagaaggaaaagataattggattcgttgcaatatgaaacttgtccctgaactgacttacaaggttaccggattggaaaaaggaaataaatatttatatagagtatctgcagaaaataaagctggtgtttcagatccatctgaaattcttggtcctctcaccgctgacgatgcatttatagatattttatttttagatcggggaatagcacatagctactttggggcaacagggacttaaatatggcactgcaaactcattaacttttcttctttgtagttgaaccaacaatggatttaagtgcatttaaagatggtctggaagttattgtcccaaatcctatcacgatcctggttccaagtacaggctatccaaggccaactgcaacctggtgttttggagataaagtactagaaacaggggaccgggtgaaaatgaagaccttgtctgcctatgccgaacttgtcatttctccaagtgaacgttcagacaagggcatttatacactgaaattagaaaaccgtgtgaaaacaatttctggggaaattgatgtcaatgtaattggtaaggaacaaaacatttatcatctaaggtgatttggcagtattaacaaatattagttcagactattaacagtgactcgtgagtgcattttttttcagctcgcccaagtgcacccaaagaattgaaatttggtgatataaccaaggac

SEQ ID NO: 376038 - DNA, 2081 bp, Homo sapiens
ccattagtgtacctctcattcataagaaaaaagtttctctgatttattgaactaagtatgcagtgcctactctatcaaaaaacaaaacaaaacatgttttgcactacactgagtcctatgttactatttttggcaaggaatgcatgtcttatgattttatgccattctcaatcctctactctccaatctaatttgcacgcacaacaacaacaaaaagctatgagaactctaagccacttagttttctctgctataaagttactgtagcttacttccaaggttatgtaaccaatattttctaataaatgcataataacatgatgtagcttggctacgtttaatagtcgaaagcgttcacatgttatctttctcactagctgcaccaaaaatcaagacagctgaccaagaccttgtggttgatgttggcaagcctctgacaatggtggtgccatatgatgcctaccccaaagcagaagctgaatggtttaaagaaaatgaacctttatctacaaaaaccattgatactacggctgaacaaacttctttcagaattttagaagccaagaaaggagacaaagggaggtataaaattgtgcttcagaacaaacatggaaaagcagaaggattcatcaatttaaaagttattggtaagcccttgggtctctcagacttaattggcaaagcacaatttaaaagcaagacagcacactaaaaaaattcctctatatgtgaatttcagatgttcctgggccagtacgtaacttagaagtgacagaaacatttgatggtgaagtgagccttgcttgggaagaacctttaactgatggtggaagcaaaatcataggttacgttgttgaaagacgtgacattaagagaaagacctgggttctggccacagaccgtgcagagagttgtgagtttactgtcactggtctacagaaaggaggagttgagtacctattccgtgtgagtgcaagaaacagagttggcactggtgagccagtagaaactgacaatcctgtagaagcaaggagtaaatatgatgttccaggccctcctttgaatgtaaccatcactgatgtgaatcgatttggtgtctcactgacatgggaaccaccagagtatgatggaggtgctgagatcacaaactacgtcattgaattaagagacaagacttctatcaggtgggatactgccatgactgtgagagctgaagacctgtctgcaactgttactgatgtggtagaaggacaggagtacagtttccgagtgagagcccaaaatcgaattggagttggaaaaccaagtgcagccacacccttcgtcaaagttgctgatccaattgagagaccaagtcctcctgtaaacctaacttcctcagatcagactcagtcatcagttcagctcaaatgggaacctcctctgaaagatggaggaagcccaatattaggctatataattgagcgatgcgaagaaggaaaagataattggattcgttgcaatatgaaacttgtccctgaactgacttacaaggttaccggattggaaaaaggaaataaatatttatatagagtatctgcagaaaataaagctggtgtttcagatccatctgaaattcttggtcctctcaccgctgacgatgcatttgttgaaccaacaatggatttaagtgcatttaaagatggtctggaagttattgtcccaaatcctatcacgatcctggttccaagtacaggctatccaaggccaactgcaacctggtgttttggagataaagtactagaaacaggggaccgggtgaaaatgaagaccttgtctgcctatgccgaacttgtcatttctccaagtgaacgttcagacaagggcatttatacactgaaattagaaaaccgtgtgaaaacaatttctggggaaattgatgtcaatgtaattggtaaggaacaaaacatttatcatctaaggtgatttggcagtattaacaaatattagttcagactattaacagtgactcgtgagtgcattttttttcagctcgcccaagtgcacccaaagaattgaaatttggtgatataaccaaggac

SEQ ID NO: 376039 - DNA, 1199 bp, Homo sapiens
ggattgatgagactctgcatgtctgaggactcagatggttctagggtggctagaggatctctcatctagtaggctagtccaggcctcacatgtgacggagggttcccagttgcaagagagagtaagtcccaatgtacaaacattttcaagcctccaacagtgtcacatttgctattgtcccattggcaaagaaaatcacatggccaaaccctaaaccaacaagtggcaaagtcacaatgcagaggggtatacataccaggaggcatgaacaaattgtttgttattattaaaaccatcaacactttacttaggtttcctcttctgtagaaaaatgatttaccatctattggcctaaataacacaaagttgtttgcagtttttggcaattacaaagctgtaattaatgtataggtgttgtgtgaaacataggttttctgcctaggtcatttgctaagtttatatttagctttatagtaaactgcaaatttacttaccaaagtggttgaactgttttacgttcccatatatgagttccagttgctccacatcttcaccagcacttgatattgtcagtttttgttgatgctcattttgggctactgggtttttgttttatttgccattctaataagcatttacctgtatctcattgtagttttaattttcattttgctaatgactaatgatgttgagcatcttttcatgtgcatatttaccaaccgtatatcttctttggtgaagtgtctgttcatgtcttctgctctcttattttaaaattgagttgttattgttttcagagttgtttatatatcttatatacaagtcctttgtcacatatgtgattagctaatattttctccttttctatggcctgtgtcttttcattcttttaacagtgtcattcacagagcaaaaatgttttatttttatgaagtccaatttatcaattttttcttttagggactgccttggtgtcctatctaagaactttcttacaaaaccaaggttacaaagacttttcctgtattttcttctaaaaatcctagaattttatgttttacatttagatccattttacattttaaagtaatttctgtataaggtgttagggtttgcttgatactctttttttgcatataactgttcatttatttcagcattgcttattaaaaagtttgttcttcctccaaagaattgcc

SEQ ID NO: 376040 - DNA, 555 bp, Homo sapiens
cctccccttctgactgcaacacagctccacctgcaacctgagacctgggtgagcatctttgccctgccccgtgccattgttctggctatacaccagcgacctggacaggttttcacatctctatgctggatgggctggcccagccggttgtgcactgtgaggtgctgcaggaggagctgcgaggacacattcttcttgacttctcagcataggaatgtctcacgtccagtccacgtccctgtcctagtcctcctctctgctccttccacacttcctcacggtggtctcctgcacgctcgtggctgtcagtatcagacgagggcagcttctgcattttctcaattccaaccactcctctccacttacctacccagtatctctactgggtgtcttccagtcatcctgcactcaacgcgactgacaatttacttccaaccggctttacaatttccctgactttgttgatgggcaactttttccttccagttgcttaagccagatacgttgggagtcattctttaaccattctgttcaacttcatacctattcctcaag

SEQ ID NO: 376041 - DNA, 496 bp, Homo sapiens
cctccccttctgactgcaacacagctccacctgcaacctgagacctgggtgagcatctttgccctgccccgtgccattgttctggctatacaccagcgacctggacaggttttcacatctctatgctggatgggctggcccagccggttgtgcactgtgaggtgctgcaggaggagctgcgaggacacactgccagcttctgactctgattctttaatcttttctatagtcaggtaacccaggattgggacagcaaaacataagccctctactatcatatttgttgaatgtaagatttcctcagaatcaagaatatgaatagattatgcacttactgttcataattttaaattctaggatggctattatgattactttttgccttttctttggaccaaagaattttgtggtgctaaaagtgtcttttccatttccctttattatggagaacaaatccaagctttgtccggacaccagtggctccaacacctaatcc

SEQ ID NO: 376042 - DNA, 396 bp, Homo sapiens
gagtgaagtccctgctttaaagtgtactcctgtggacacagtaatacatatatttaaaatggttcatgttaagagtaggtatatttctatctaaatactctgtagcttttgtgattcagggaaatgagtggagcctcacaggcacaagaatctagtaaattctaggtttcttgtgtggaaatcagtgggcaaaatcttaactgagtgaattcttgattattggtatcacatttgttagtctgtatgtatctgtgtcatcgatctccttaagaagagactcgtagatattgactgggagacccaagctgaatgctaaaatctgctccatggatataagctgatgcagtcatcatttcacattaaaatgtaccacagctatatatgcagcaaaaaaaa

SEQ ID NO: 376043 - DNA, 348 bp, Homo sapiens
tagaagtttggtgatgtttttgtgacgagaaatatgttgcaggaacttaactcttgtttatatcaatcagcccatagtaaattggttttattaccagtggttttgcttaaagtcacagtttccaagaacctatcgatgataagtgaggacttactggacttaatactactgaactgtacacataaaaatggttaagatgatgaagtttacgtctattttaccacaatttttaaaaacgaaaaaaagaaatcctggggagtgagctgttcaaagaaggctttgaaaagctctgatacattccagagatctagacagctacacaggggcagggctttgtgcatggccatg

SEQ ID NO: 376044 - DNA, 362 bp, Homo sapiens
gtttgcttccccagagctccagggccattgctattgtcctctttcctgcacgcttcctcatttgcaaaacaatgtgaattctgttcttgcccttataattaaaggaaaaatgaggatgatcaagagtggttgcttcagggaccttccacactgctaaggccacctctatttttccagactcccaggtatattttaaaatgaagacatgtcaaaataggtttctgttgtagttaaaatgtttacacctattagcaattatatttgtatgagagttgaaggctcttccaacactgtcagtgtacttctgtgacagtatgtatctaaactcatttggaaataaacaataattgtctaattttggc

SEQ ID NO: 376045 - DNA, 1338 bp, Homo sapiens
gcatatggttggtgaacagttttgcagccctaggctcctgtactgtgcgcgcaccgccgcccgggcagccgctggctccagctcacgaaacagccccgggcgccgcgccgctctgagtccagcctcctactgagaacagtccctcccttgtgcgggtcgcacggctagccgcaggttcggccacgtcaaatccattttctaaaaaagcagggagcagagctctctcttcgccgccgacgcagaaaggagctggggaggaaaaagctgctgccttttgcgctggagattcgtgggcaaggcttctcattttcccaggctgcttcccctcccgggtgaggagcgtcctgagactaaggaaagagcctggaaaatggagcagacctggacgagagattattttgcagaggatgatggggagatggtacccagaacgagtcacacagcagcttttcttagtgacactaaagatcgaggccctccagtgcagtcacagatctggagaagtggtgaaaaggtcccgtttgtgcagacatattccttgagagcatttgagaaaccccctcaggtacagacccaggctcttcgagactttgagaagcacctcaatgacctgaagaaggagaacttcagcctcaagctgcgcatctacttcctggaggagcgcatgcaacagaagtatgaggccagccgggaggacatctacaagcggaacactgagctgaaggttgaagtggagagcttgaaacgagaactccaggacaagaaacagcatctggataaaacatgggctgatgtggagaatctcaacagtcagaatgaagctgagctccgacgccagtttgaggagcgacagcaggagacggagcatgtttatgagctcttggagaataagatgcagcttctgcaggaggaatccaggctagcaaagaatgaagctgcgcggatggcagctctggtggaagcagagaaggagtgtaacctggagctctcagagaaactgaagggagtcaccaaaaactgggaagatgtaccaggagaccaggtcaagcccgaccaatacactgaggccctggcccagagggacaagatctaaaaaaaataatgctgggaagtcctaaccacatcaagaatgcctcagatcagtgacccaaggaccttccagaatggatgaaatagacccaaagctgaattcacctaattttagggccaaaaacccaaaaaacaaaacaagaccaaaaaaatcttcagatactgggagaacaaatctcaattgctcaattgtatcttatgaaaacaatttttcaaaataaaacaagagatatttaagattcaaaaaaa

SEQ ID NO: 376046 - DNA, 903 bp, Homo sapiens
agcgggaaaaaaaacttatctgaggttggaaataaagagaaggtgacattggagcggatagaaaggaagaaacggcgtgggatctgggaatgaggcagtgggtggagagagaatggggagacgacagaggatgaagggcagctgagtgtgtctgcgggagaaggaccaaagcaatctgggcggagcaggtggcagaggcagccgcggaggaggcccagggaactgacggggatgctcagccaggcccagaggatgcgccctggcagtcccggaagacaccaggaaaacaagcaggaaccgtagctaggactggggtggccaggcccaggaaatccatgaagggcacagacagcgggtcctgctgccgccgccgatgcgactttggctgctgctgtcgcgcgtcccgccgggctcactacacgccttaccggtccggggacgcgacgcgaacccctcagtccccacggcagaccccgagccgggaaagacggcgcccggagccagccgggagctgggcagcagcggccgaggaggaagaagcagctgcggcggccacaccctggatgagagatggagtctcactgtgttgcctaggttggagtgaagtggtgcaatcatagctccctgcagtctccaactcctgggctcaagggatcctcttgccttggcctcccaagtagctgagatcacagttgtgtaccaccatttccggctacttttaaaaaattattttgtgtagagatggagtcttgctatgttgcctaggctggtctcaaactcctggcttcaagcaatcctaccaccccaccctcccaaagtgctgagactataggcatgagccactgcacccagccaagtctgtttcttaaactgataaatcacaggactactatataaacccag

SEQ ID NO: 376047 - DNA, 684 bp, Homo sapiens
  misc_feature (229)..(229): n is a, c, g, or t
cactgatgccgtagcatgacctgactcagaggatacccatccgatgtgccgctcctggggaggaaaaagctgctgccttttgcgctggagattcgtgggcaaggcttctcattttcccaggctgcttcccctcccgggtgaggagcgtcctgagactaaggaaagagcctggaaaatggagcagacctggacgagagattattttgcagaggatgatggggagcggcanatgcgtcgcccctcatgttcttttcattccgcttcattctcgtcttttcagcatagacggcttgtatgctcactgtcaggctcgtaaccccgcacttgtggcctagtactgcgtctccaagcgctcattatcgattgtaatgtcaggtgagcgaggtctgaactcttactgagcgacctttgctttgtcttgcctgcctggaatgcttttcatgacaatagctttctattgtgtgaaatgttatacgatttcattctctacctccttacactcgcattcctatgcgttaatcctttagcgcttattcagttactttctcattttatttgtttttgcacactgttccttttttcattctggatatcttgtgcgttttatttcttattcattcagtccatctctctggttaggccgttcttttctttctcgcattttcctattactacggctcttcg

SEQ ID NO: 376048 - DNA, 1668 bp, Homo sapiens
aaggatccttaattttattaatccccccccccggagtcgtgtctcagcctggagagtgcgcgcaccgccgcccgggcagccgctggctccagctcacgaaacagccccgggcgccgcgccgctctgagtccagcctcctactgagaacagtccctcccttgtgcgggtcgcacggctagccgcaggttcggccacgtcaaatccattttctaaaaaagcagggagcagagctctctcttcgccgccgacgcagaaaggagctggggaggaaaaagctgctgccttttgcgctggagattcgtgggcaaggcttctcattttcccaggctgcttcccctcccgggtgaggagcgtcctgagactaaggaaagagcctggaaaatggagcagacctggacgagagattattttgcagaggatgatggggagatggtacccagaacgagtcacacagcagcttttcttagtgacactaaagatcgaggccctccagtgcagtcacagatctggagaagtggtgaaaaggtcccgtttgtgcagacatattccttgagagcatttgagaaaccccctcaggtacagacccaggctcttcgagactttgagaagcacctcaatgacctgaagaaggagaacttcagcctcaagctgcgcatctacttcctggaggagcgcatgcaacagaagtatgaggccagccgggaggacatctacaagcggaacactgagctgaaggttgaagtggagagcttgaaacgagaactccaggacaagaaacagcatctggataaaacatgggctgatgtggagaatctcaacagtcagaatgaagctgagctccgacgccagtttgaggagcgacagcaggagacggagcatgtttatgagctcttggagaataagatgcagcttctgcaggaggaatccaggctagcaaagaatgaagctgcgcggatggcagctctggtggaagcagagaaggagtgtaacctggagctctcagagaaactgaagggagtcaccaaaaactgggaagatgtaccaggagaccaggtcaagcccgaccaatacactgaggccctggcccagagggacaagagaattgaagaactgaatcagagcctggctgcccaggagaggcttgtagaacagctatctcgggagaaacaacaactgctacatctgttggaggagccaactagcatggaagtgcagttatagttccactgtattctactcaaaccttgtctgccatgccaactgtcaccacagaagaaagacccttacaatgtggaaggtaaaagttcaatttctaagctctgggcctgttcttcagaggttaaagaatctcctcatctccagtgaagccatccctggaatccctcactgattcagctggagtatggaggagcttaagttctaaagacctattcacttcctttaattccacctatacttcacaactgagaataccacaaacagttgggccctagaagaaagaagagctcacagatcttgcacttctaggtctgaattgtccaagtgaagaacgctaatttactccacatcccacagataactatctctcaagtgatcccagtatgaaagtctggagtatgagtataatatactcactgtaatatctgagtacaggaagttcacttcaga

SEQ ID NO: 376049 - DNA, 990 bp, Homo sapiens
aaggatccttaattttattaatccccccccccggagtcgtgtctcagcctggagagtgcgcgcaccgccgcccgggcagccgctggctccagctcacgaaacagccccgggcgccgcgccgctctgagtccagcctcctactgagaacagtccctcccttgtgcgggtcgcacggctagccgcaggttcggccacgtcaaatccattttctaaaaaagcagggagcagagctctctcttcgccgccgacgcagaaaggagctggggaggaaaaagctgctgccttttgcgctggagattcgtgggcaaggcttctcattttcccaggctgcttcccctcccgggtgaggagcgtcctgagactaaggaaagagcctggaaaatggagcagacctggacgagagattattttgcagaggatgatggggagatggtacccagaacgagtcacacagcagcttttcttagtgacactaaagatcgaggccctccagtgcagtcacagatctggagaagtggtgaaaaggtcccgtttgtgcagacatattccttgagagcatttgagaaaccccctcaggtacagacccaggctcttcgagactttgagaagcacctcaatgacctgaagaaggagaacttcagcctcaagctgcgcatctacttcctggaggagcgcatgcaacagaagtatgaggccagccgggaggacatctacaagcggaacactgagctgaaggttgaagtggagagcttgaaacgagaactccaggacaagaaacagcatctggataaaacatgggctgatgtggagaatctcaacagtcagaatgaagctgagctccgacgccagtttgaggagcgacagcaggagacggagcatgtttatgagctcttggagaataagatgcagcttctgcaggaggaattccggcctagcaaaagaatgaaaactttctcgggatggggaaccttctggttggaaagacagaaa

SEQ ID NO: 376050 - DNA, 1066 bp, Homo sapiens
gcctacagttgggcctgggaggctccaggagggtgacagcagagtcctggcttggagtcgggttacaccacttgtgtctgagttcacgcagcatgttcctctgtcagggattccgcaaatatctccctgagcacctcaatgacctgaagaaggagaacttcagcctcaagctgcgcatctacttcctggaggagcgcatgcaacagaagtatgaggccagccgggaggacatctacaagcggaacactgagctgaaggttgaagtggagagcttgaaacgagaactccaggacaagaaacagcatctggataaaacatgggctgatgtggagaatctcaacagtcagaatgaagctgagctccgacgccagtttgaggagcgacagcaggagacggagcatgtttatgagctcttggagaataagatgcagcttctgcaggaggaatccaggctagcaaagaatgaagctgcgcggatggcagctctggtggaagcagagaaggagtgtaacctggagctctcagagaaactgaagggagtcaccaaaaactgggaagatgtaccaggagaccaggtcaagcccgaccaatacactgaggccctggcccagagggacaagtaggtgccttcggtgctctttttgtcgcttgtcttttgcccattctcaaggcatacagcagctgtcctgttccctttcaaggactgacagtaggagcttcactatttctaagactttatgggcccacaaccgaagacattcttttcagggttgaattttcagtggtatccattatgaaaactcacttcatggattcagtgggcaaatagcggcaagcaagagacatggattcacttattcggcaaacatttactgggcatgccacatgccagataccgggctaagtatctggcatgtgttacagaaacaaaagacctaaatcttgtcaccaagaaacatgttacatgattttaataagttccctgatagaagagcatggggtgctctggggaaatattggagggtcatccattccacattaaaagagcaagttgtcaaatgtggtc

SEQ ID NO: 376051 - DNA, 498 bp, Homo sapiens
  misc_feature (424)..(424): n is a, c, g, or t
gcatatggttggtgaacagttttgcagccctaggctcctgtactgtgcgcgcaccgccgcccgggcagccgctggctccagctcacgaaacagccccgggcgccgcgccgctctgagtccagcctcctactgagaacagtccctcccttgtgcgggtcgcacggctagccgcaggttcggccacgtcaaatccattttctaaaaaagcagggagcagagctctctcttcgccgccgacgcagaaaggagctggggaggaaaaagctgctgccttttgcgctggagattcgtgggcaaggcttctcattttcccaggctgcttcccctcccgggtgaggagcgtcctgagactaaggaaagagcctggaaaatggagcagacctggacgagagattattttgcagaggatgatggggagcggcanatgcgttggggtatcctcaagagtcgaggtgcatactgatgtagtcagtcggtaagaaagccgataataagtca

SEQ ID NO: 376052 - DNA, 1161 bp, Homo sapiens
gcacccagagcagtgagcccagtcccgagtcccggagagagctccagcaataggggccatgtcgccgtagccccagcctctcggtccgcagcctcagcagcgtcccagccggctggcttcatgctgcggtgcagctgcaccatgttcctgggttgagggggcaatcgggcacgctcctccccatgggttgcccatcatgtctaatggatatcgcactctgtcccagcacctcaatgacctgaagaaggagaacttcagcctcaagctgcgcatctacttcctggaggagcgcatgcaacagaagtatgaggccagccgggaggacatctacaagcggaacactgagctgaaggttgaagtggagagcttgaaacgagaactccaggacaagaaacagcatctggataaaacatgggctgatgtggagaatctcaacagtcagaatgaagctgagctccgacgccagtttgaggagcgacagcaggagacggagcatgtttatgagctcttggagaataagatgcagcttctgcaggaggaatccaggctagcaaagaatgaagctgcgcggatggcagctctggtggaagcagagaaggagtgtaacctggagctctcagagaaactgaagggagtcaccaaaaactgggaagatgtaccaggagaccaggtcaagcccgaccaatacactgaggccctggcccagagggacaagtaggtgccttcggtgctctttttgtcgcttgtcttttgcccattctcaaggcatacagcagctgtcctgttccctttcaaggactgacagtaggagcttcactatttctaagactttatgggcccacaaccgaagacattcttttcagggttgaattttcagtggtatccattatgaaaactcacttcatggattcagtgggcaaatagcggcaagcaagagacatggattcacttattcggcaaacatttactgggcatgccacatgccagataccgggctaagtatctggcatgtgttacagaaacaaaagacctaaatcttgtcaccaagaaacatgttacatgattttaataagttccctgatagaagagcatggggtgctctggggaaatattggagggtcatccattccacattaaaagagcaagttgtcaaatgtggtc

SEQ ID NO: 376053 - DNA, 1131 bp, Homo sapiens
agcgggaaaaaaaacttatctgaggttggaaataaagagaaggtgacattggagcggatagaaaggaagaaacggcgtgggatctgggaatgaggcagtgggtggagagagaatggggagacgacagaggatgaagggcagctgagtgtgtctgcgggagaaggaccaaagcaatctgggcggagcaggtggcagaggcagccgcggaggaggcccagggaactgacggggatgctcagccaggcccagaggatgcgccctggcagtcccggaagacaccaggaaaacaagcaggaaccgtagctaggactggggtggccaggcccaggaaatccatgaagggcacagacagcgggtcctgctgccgccgccgatgcgactttggctgctgctgtcgcgcgtcccgccgggctcactacacgccttaccggtccggggacgcgacgcgaacccctcagtccccacggcagaccccgagccgggaaagacggcgcccggagccagccgggagctgggcagcagcggccgaggaggaagaagcagctgcggcggccacaccctggatgagagattattttgcagaggatgatggggagatggtacccagaacgagtcacacagcagcttttcttagtgacactaaagatcgaggccctccagtgcagtcacagatctggagaagtggtgaaaaggtcccgtttgtgcagacatattccttgagagcatttgagaaaccccctcaggtacagacccaggctcttcgagactttgagaagcacctcaatgacctgaagaaggagaacttcagcctcaagctgcgcatctacttcctggaggagcgcatgcaacagaagtatgaggccagccgggaggacatctacaagcggcaattgcctacccaaaccctaggcccagccgactttggaggtctccagttgaaccttcaccttttactggaatggagcagtctctgcaagaggggttggtggaagtaggaagcaaaaaaattgagaaaagaaacagtaagaagaggaagttcttgcagggagaattgtttttcaagagagctatatttttattttgaacagcatccatttgtttgataaatatatcattatcttctgtgtgtgg

SEQ ID NO: 376054 - DNA, 1544 bp, Homo sapiens
aaggatccttaattttattaatccccccccccggagtcgtgtctcagcctggagagtgcgcgcaccgccgcccgggcagccgctggctccagctcacgaaacagccccgggcgccgcgccgctctgagtccagcctcctactgagaacagtccctcccttgtgcgggtcgcacggctagccgcaggttcggccacgtcaaatccattttctaaaaaagcagggagcagagctctctcttcgccgccgacgcagaaaggagctggggaggaaaaagctgctgccttttgcgctggagattcgtgggcaaggcttctcattttcccaggctgcttcccctcccgggtgaggagcgtcctgagactaaggaaagagcctggaaaatggagcagacctggacgagagattattttgcagaggatgatggggagatggtacccagaacgagtcacacagcagcttttcttagtgacactaaagatcgaggccctccagtgcagtcacagatctggagaagtggtgaaaaggtcccgtttgtgcagacatattccttgagagcatttgagaaaccccctcaggtacagacccaggctcttcgagactttgagaagcacctcaatgacctgaagaaggagaacttcagcctcaagctgcgcatctacttcctggaggagcgcatgcaacagaagtatgaggccagccgggaggacatctacaagcggaacactgagctgaaggttgaagtggagagcttgaaacgagaactccaggacaagaaacagcatctggataaaacatgggctgatgtggagaatctcaacagtcagaatgaagctgagctccgacgccagtttgaggagcgacagcaggagacggagcatgtttatgagctcttggagaataagatgcagcttctgcaggaggaatccaggctagcaaagaatgaagctgcgcggatggcagctctggtggaagcagagaaggagtgtaacctggagctctcagagaaactgaagggagtcaccaaaaactgggaagatgtaccaggagaccaggtcaagcccgaccaatacactgaggccctggcccagagggacaagtaggtgccttcggtgctctttttgtcgcttgtcttttgcccattctcaaggcatacagcagctgtcctgttccctttcaaggactgacagtaggagcttcactatttctaagactttatgggcccacaaccgaagacattcttttcagggttgaattttcagtggtatccattatgaaaactcacttcatggattcagtgggcaaatagcggcaagcaagagacatggattcacttattcggcaaacatttactgggcatgccacatgccagataccgggctaagtatctggcatgtgttacagaaacaaaagacctaaatcttgtcaccaagaaacatgttacatgattttaataagttccctgatagaagagcatggggtgctctggggaaatattggagggtcatccattccacattaaaagagcaagttgtcaaatgtggtc

SEQ ID NO: 376055 - DNA, 1320 bp, Homo sapiens
aaggatccttaattttattaatccccccccccggagtcgtgtctcagcctggagagtgcgcgcaccgccgcccgggcagccgctggctccagctcacgaaacagccccgggcgccgcgccgctctgagtccagcctcctactgagaacagtccctcccttgtgcgggtcgcacggctagccgcaggttcggccacgtcaaatccattttctaaaaaagcagggagcagagctctctcttcgccgccgacgcagaaaggagctggggaggaaaaagctgctgccttttgcgctggagattcgtgggcaaggcttctcattttcccaggctgcttcccctcccgggtgaggagcgtcctgagactaaggaaagagcctggaaaatggagcagacctggacgagagattattttgcagaggatgatggggagatggtacccagaacgagtcacacagcagcttttcttagtgacactaaagatcgaggccctccagtgcagtcacagatctggagaagtggtgaaaaggtcccgtttgtgcagacatattccttgagagcatttgagaaaccccctcaggtacagacccaggctcttcgagactttgagaagcacctcaatgacctgaagaaggagaacttcagcctcaagctgcgcatctacttcctggaggagcgcatgcaacagaagtatgaggccagccgggaggacatctacaagcggaacactgagctgaaggttgaagtggagagcttgaaacgagaactccaggacaagaaacagcatctggataaaacatgggctgatgtggagaatctcaacagtcagaatgaagctgagctccgacgccagtttgaggagcgacagcaggagacggagcatgtttatgagctcttggagaataagatgcagcttctgcaggaggaatccaggctagcaaagaatgaagctgcgcggatggcagctctggtggaagcagagaaggagtgtaacctggagctctcagagaaactgaagggagtcaccaaaaactgggaagatgtaccaggagaccaggtcaagcccgaccaatacactgaggccctggcccagagggacaagagaattgaagaactgaatcagagcctggctgcccaggagaggcttgtagaacagctatctcgggagaaacaacaactgctacatctgttggaggagccaactagcatggaagtgcagcccatgactgaagagttgctgaaacaacaaaagctgaattcacatgagaccactataactcagcagtctgtatctgattcccacttggcagaactccaggaaaaa

SEQ ID NO: 376056 - DNA, 1711 bp, Homo sapiens
agcgggaaaaaaaacttatctgaggttggaaataaagagaaggtgacattggagcggatagaaaggaagaaacggcgtgggatctgggaatgaggcagtgggtggagagagaatggggagacgacagaggatgaagggcagctgagtgtgtctgcgggagaaggaccaaagcaatctgggcggagcaggtggcagaggcagccgcggaggaggcccagggaactgacggggatgctcagccaggcccagaggatgcgccctggcagtcccggaagacaccaggaaaacaagcaggaaccgtagctaggactggggtggccaggcccaggaaatccatgaagggcacagacagcgggtcctgctgccgccgccgatgcgactttggctgctgctgtcgcgcgtcccgccgggctcactacacgccttaccggtccggggacgcgacgcgaacccctcagtccccacggcagaccccgagccgggaaagacggcgcccggagccagccgggagctgggcagcagcggccgaggaggaagaagcagctgcggcggccacaccctggatgagagattattttgcagaggatgatggggagatggtacccagaacgagtcacacagcagcttttcttagtgacactaaagatcgaggccctccagtgcagtcacagatctggagaagtggtgaaaaggtcccgtttgtgcagacatattccttgagagcatttgagaaaccccctcaggtacagacccaggctcttcgagactttgagaagcacctcaatgacctgaagaaggagaacttcagcctcaagctgcgcatctacttcctggaggagcgcatgcaacagaagtatgaggccagccgggaggacatctacaagcggaacactgagctgaaggttgaagtggagagcttgaaacgagaactccaggacaagaaacagcatctggataaaacatgggctgatgtggagaatctcaacagtcagaatgaagctgagctccgacgccagtttgaggagcgacagcaggagacggagcatgtttatgagctcttggagaataagatgcagcttctgcaggaggaatccaggctagcaaagaatgaagctgcgcggatggcagctctggtggaagcagagaaggagtgtaacctggagctctcagagaaactgaagggagtcaccaaaaactgggaagatgtaccaggagaccaggtcaagcccgaccaatacactgaggccctggcccagagggacaagtaggtgccttcggtgctctttttgtcgcttgtcttttgcccattctcaaggcatacagcagctgtcctgttccctttcaaggactgacagtaggagcttcactatttctaagactttatgggcccacaaccgaagacattcttttcagggttgaattttcagtggtatccattatgaaaactcacttcatggattcagtgggcaaatagcggcaagcaagagacatggattcacttattcggcaaacatttactgggcatgccacatgccagataccgggctaagtatctggcatgtgttacagaaacaaaagacctaaatcttgtcaccaagaaacatgttacatgattttaataagttccctgatagaagagcatggggtgctctggggaaatattggagggtcatccattccacattaaaagagcaagttgtcaaatgtggtc

SEQ ID NO: 376057 - DNA, 984 bp, Homo sapiens
atgcctgtaatcccagcactttgggaggccaaggcgggcggatctcaagcacctcaatgacctgaagaaggagaacttcagcctcaagctgcgcatctacttcctggaggagcgcatgcaacagaagtatgaggccagccgggaggacatctacaagcggaacactgagctgaaggttgaagtggagagcttgaaacgagaactccaggacaagaaacagcatctggataaaacatgggctgatgtggagaatctcaacagtcagaatgaagctgagctccgacgccagtttgaggagcgacagcaggagacggagcatgtttatgagctcttggagaataagatgcagcttctgcaggaggaatccaggctagcaaagaatgaagctgcgcggatggcagctctggtggaagcagagaaggagtgtaacctggagctctcagagaaactgaagggagtcaccaaaaactgggaagatgtaccaggagaccaggtcaagcccgaccaatacactgaggccctggcccagagggacaagtaggtgccttcggtgctctttttgtcgcttgtcttttgcccattctcaaggcatacagcagctgtcctgttccctttcaaggactgacagtaggagcttcactatttctaagactttatgggcccacaaccgaagacattcttttcagggttgaattttcagtggtatccattatgaaaactcacttcatggattcagtgggcaaatagcggcaagcaagagacatggattcacttattcggcaaacatttactgggcatgccacatgccagataccgggctaagtatctggcatgtgttacagaaacaaaagacctaaatcttgtcaccaagaaacatgttacatgattttaataagttccctgatagaagagcatggggtgctctggggaaatattggagggtcatccattccacattaaaagagcaagttgtcaaatgtggtc

SEQ ID NO: 376058 - DNA, 1122 bp, Homo sapiens
gaacatctaacatgagatctaccctcttaacaattttttaagtgtacaatacagtattgctaactataggcatgaggatgtgcagcagatctctggaacgtttcactctttataactgaagctttataccccttgaatcgcagtttcccatttccctgtcttcatagcccctggcatccaccattctacactctttctatggggttgactattttaattacctgacacaagtggaatcatgcattatttgtctttctgtgactggtttatttcatgtagcataaagtcatcaaggttcatccatgtttttgcatatggcaaggtttcctttttaagtctgaataatattccattttctacatataccacatttactttatccctttttctgttagtggacatttaacttgttctcacagcttggctattgcaaataatgctgcaatgaatatctcataagtctcgtatatgtccatacaagatcatgaaaatggacatgtctctgggtattttgaattggtgggacaattttgcttaagggtaggcatagtgggtggctctacatttgagagttctaattcccattcctatatatatttcttttctttttatttatttatttttttgagatggggttctctgtcactcaggctggagtgcagtggcacaaacatggcttactgcagcctcaacctcctgggctcaagtgatcctcccatctcagcctcccaagaagctgggaccacaggcatgtgtcaccatgcctgactaattttttttaattttctgtaagcatggggtcttgctatgttgcctaggctggtctcaaactcctgggctcaagtgatcctcatgcctcagcctcccaaagtgctgggattacatgtgtaggccaccacacccagccttatatatgtatttctaattttgccttagccatgcccttaaaaactaattatactttcaactagtttttttttccaccttcagtctgtggtattgttcacattttgaaaacaatacctacagtaacctgtgaggtaggacatgatagtgttttattggaccccttttactttatgaattggaaaaactaaatttgcatgtagtttgtaaaaaaaa

SEQ ID NO: 376059 - DNA, 252 bp, Homo sapiens
aatatcaaaagaccagcaaaagaaaatatgatctgtgatatatacagagaaagcatttgataaaattgaaaatccattcttggtaaaaagctctcagcaaaactaataataaacagaaactttctcaacatgacaaagggattttacagaaaacctaaagctaaaataatagtgaataataatgaaatatttaatgtttaagattgggaaaaaaaggaaagaaaggatatctactctcaccacttattttca

SEQ ID NO: 376060 - DNA, 426 bp, Homo sapiens
tgtaaaatattgtagaataccaaatattttatttttatgtctgtgattcccttttggatagagagtcttctgggcttcagagtatggctcacatataatatatggcctgtatttccatctctctctttttgcatcagaatattctattggtttaaggaatcttgccatagcttgccataattttgtatatttgtgtcttgcaggcatgctgtgcctacaagcatgctttgtagtatattttctgatttgtaaatagtacagttttaactgaagtgtagatgttccagggaaatatttaaccaatacattgtcatgcagtttcataaagtgatgttgtcagtttatcatggagaaggcaaatattgttcagggctgtgagagaatgtgattgctactcagtaaacggagatgctatttaaatgaatc

SEQ ID NO: 376061 - DNA, 1040 bp, Homo sapiens
atgacatttccggtggcatctggggcaaacgacacaagtcagcatttagtttcttgctttaggaagcggaagactaatgaccgaagcttcaagactttgacatgtgtgaaaacatgaaatggtaagtcaatacaaagacagcatcttcctggaatttggttttgagcttgttttcatttcacctttctcagtaatctgggtgtagcttattttgactcttcctttgattaaacaattcagacccttggctcttattgttcttgctggtgtggtatgttcacggctgaaaagatggtcagaaggggaaaggaggaagtgagaagaaagaaacagggaaatggacagagtgttgctcagttacccaggctggagtgcaatggcatgatcttggctcactgcagcctccacctcctgggttcaagcggttctcgtgcctcagtctcccaagtagctgggattacaggctggagtgcgatggcatgatcttggctcacggcaaactccgcctccctggttcaagtgattctcctgcctcagcctcccgagtagccgggattacaggcatgtgccaccatgccccgttggccaggctggtctcgaacaccttacctcaggtgatcctcccacctttgggattacagcaggctgaggaattaccaaggaggcaggaggtggagcaaaacacaccaagcctggtgccaatcattgacaatattatggttagtacttactgagggctgactatggttgaaactgcctttgcaaaattatgactgagacggtgaaagagatctaacttaaccaacgctagctatcttgcctctaacctccaagctgtccttgttcattcctgggcataggctgaactaactttgggagaaatttagtttatagtttgaaacaaagatgataacagccctttgccaaagcagacctccttcttgtctggggactagatggcctttgtaggactaacatgagccacaagattagaaattatggataggagtcatgcagctggagtctccaagattctgacc

SEQ ID NO: 376062 - DNA, 1073 bp, Homo sapiens
atgacatttccggtggcatctggggcaaacgacacaagtcagcatttagtttcttgctttaggaagcggaagactaatgaccgaagcttcaagactttgacatgtgtgaaaacatgaaatggtaagtcaatacaaagacagcatcttcctggaatttggttttgagcttgttttcatttcacctttctcagtaatctgggtgtagcttattttgactcttcctttgattaaacaattcagacccttggctcttattgttcttgctggtgtggtatgttcacggctgaaaagatggtcagaaggggaaaggaggaagtgagaagaaagaaacagggaaatggtaagaagaactctacttttctaaataatatttaatagtagtaatcttgtgtttctgtgcaaggtgttacagtttacaaaccgcttttatttttatttatttatttgacagagtgttgctcagttacccaggctggagtgcaatggcatgatcttggctcactgcagcctccacctcctgggttcaagcggttctcgtgcctcagtctcccaagtagctgggattacaggctggagtgcgatggcatgatcttggctcacggcaaactccgcctccctggttcaagtgattctcctgcctcagcctcccgagtagccgggattacaggcatgtgccaccatgccccgttggccaggctggtctcgaacaccttacctcaggtgatcctcccacctttgggattacagcaggctgaggaattaccaaggaggcaggaggtggagcaaaacacaccaagcctggtgccaatcattgacaatattatgaccctgcatgtgatggatcagctgacaccatccagatcggtaaactggttcatctgatcttgtgccctccacccaggaactgactcagcgcaagaagacagcttcgactccttgtgatttcatccctaaccaatcagcactcctggctcactggcttcccccaacccaccaaattgtccttaaaaactctgctctccaaacgctgggggagactgatttgagtaataataaaaccctggtctcctgca

SEQ ID NO: 376063 - DNA, 967 bp, Homo sapiens
atgacatttccggtggcatctggggcaaacgacacaagtcagcatttagtttcttgctttaggaagcggaagactaatgaccgaagcttcaagactttgacatgtgtgaaaacatgaaatggtaagtcaatacaaagacagcatcttcctggaatttggttttgagcttgttttcatttcacctttctcagtaatctgggtgtagcttattttgactcttcctttgattaaacaattcagacccttggctcttattgttcttgctggtgtggtatgttcacggctgaaaagatggtcagaaggggaaaggaggaagtgagaagaaagaaacagggaaatggacagagtgttgctcagttacccaggctggagtgcaatggcatgatcttggctcactgcagcctccacctcctgggttcaagcggttctcgtgcctcagtctcccaagtagctgggattacaggctggagtgcgatggcatgatcttggctcacggcaaactccgcctccctggttcaagtgattctcctgcctcagcctcccgagtagccgggattacaggcatgtgccaccatgccccgttggccaggctggtctcgaacaccttacctcaggtgatcctcccacctttgggattacagcaggctgaggaattaccaaggaggcaggaggtggagcaaaacacaccaagcctggtgccaatcattgacaatattatgaccctgcatgtgatggatcagctgacaccatccagatcggtaaactggttcatctgatcttgtgccctccacccaggaactgactcagcgcaagaagacagcttcgactccttgtgatttcatccctaaccaatcagcactcctggctcactggcttcccccaacccaccaaattgtccttaaaaactctgctctccaaacgctgggggagactgatttgagtaataataaaaccctggtctcctgca

SEQ ID NO: 376064 - DNA, 954 bp, Homo sapiens
atgacatttccggtggcatctggggcaaacgacacaagtcagcatttagtttcttgctttaggaagcggaagactaatgaccgaagcttcaagactttgacatgtgtgaaaacatgaaatgacccttggctcttattgttcttgctggtgtggtatgttcacggctgaaaagatggtcagaaggggaaaggaggaagtgagaagaaagaaacagggaaatggtaagaagaactctacttttctaaataatatttaatagtagtaatcttgtgtttctgtgcaaggtgttacagtttacaaaccgcttttatttttatttatttatttgacagagtgttgctcagttacccaggctggagtgcaatggcatgatcttggctcactgcagcctccacctcctgggttcaagcggttctcgtgcctcagtctcccaagtagctgggattacaggctggagtgcgatggcatgatcttggctcacggcaaactccgcctccctggttcaagtgattctcctgcctcagcctcccgagtagccgggattacaggcatgtgccaccatgccccgttggccaggctggtctcgaacaccttacctcaggtgatcctcccacctttgggattacagcaggctgaggaattaccaaggaggcaggaggtggagcaaaacacaccaagcctggtgccaatcattgacaatattatgaccctgcatgtgatggatcagctgacaccatccagatcggtaaactggttcatctgatcttgtgccctccacccaggaactgactcagcgcaagaagacagcttcgactccttgtgatttcatccctaaccaatcagcactcctggctcactggcttcccccaacccaccaaattgtccttaaaaactctgctctccaaacgctgggggagactgatttgagtaataataaaaccctggtctcctgca

SEQ ID NO: 376065 - DNA, 1251 bp, Homo sapiens
atgacatttccggtggcatctggggcaaacgacacaagtcagcatttagtttcttgctttaggaagcggaagactaatgaccgaagcttcaagactttgacatgtgtgaaaacatgaaatggtaagtcaatacaaagacagcatcttcctggaatttggttttgagcttgttttcatttcacctttctcagtaatctgggtgtagcttattttgactcttcctttgattaaacaattcagacccttggctcttattgttcttgctggtgtggtatgttcacggctgaaaagatggtcagaaggggaaaggaggaagtgagaagaaagaaacagggaaatggtaagaagaactctacttttctaaataatatttaatagtagtaatcttgtgtttctgtgcaaggtgttacagtttacaaaccgcttttatttttatttatttatttgacagagtgttgctcagttacccaggctggagtgcaatggcatgatcttggctcactgcagcctccacctcctgggttcaagcggttctcgtgcctcagtctcccaagtagctgggattacaggctggagtgcgatggcatgatcttggctcacggcaaactccgcctccctggttcaagtgattctcctgcctcagcctcccgagtagccgggattacaggcatgtgccaccatgccccgttggccaggctggtctcgaacaccttacctcaggtgatcctcccacctttgggattacagcaggctgaggaattaccaaggaggcaggaggtggagcaaaacacaccaagcctggtgccaatcattgacaatattatgaccctgcatgtgatggatcagctgacaccatccagatcggtaaactggttcatctgatcttgtgccctccacccaggaactgactcagcgcaagaagacagcttcgactccttgtgatttcatccctaaccaatcagcactcctggctcactggcttcccccaacccaccaaattgtccttaaaaactctgctctccaaacgctgggggagactgatttgagtaataataaaaccctggtctcctgcaaaaaaaaattggccccattgccctaagcggggagcttttgccgtcctttcccttttcgaaggtttattattgaccctcgctcctgcctgctgcgcttgctcctctggtgacgcaaccgcatcagccaacttaaggggttacaacgtttcccctgatttgggggcaccgctgaaataca

SEQ ID NO: 376066 - DNA, 1256 bp, Homo sapiens
tcaggcagctggaaggtgtgcccctgggcctcacacagctctggggaggtggcacagggcttcctctttcatagagctaattaggttcttatctgtgctaccagatgagcccagctgccagctccttacttcatctcaaccaatccaacaggctattcaaaccaacactgatattattctagcaatatgtttatgtattttggacaaaagtttaaagtaatttagtcctccatctgtcaccttcaggctaaagtcctttattttcttggtgcattgaccatggggctccatctaggctctgaaaggatattccctcaaggccctgagctagagaccacagggtaactctacatgctgttctcctaataagattttggtaacatctgattgtttgctaaaatcccattcaaagctccttctacctgggcagagcctgccaagttgagttcagcttcagttggatgagtatgtcaaagtccctggccattcgaatagccatttacctaaggcaagagcaaatgctggctaaagcatctaatcaccatttatttatgttggtgatgttgggatttgagagcacagagtggaaggtagaaacagggtagtgtctgtaactaccgtcagatctacttcttcactttcatttttaacatacaaggtccttaaaaaaaccttggatttttttttgttgcgggggcggggtagagatgaggtttcgctatattgaccaggctggtcttgaactcctggcctcaagtgatccttctgcctcagtcccccaaagaaaacctagcagttgaaaaaatgatcaattcatataaagagaaactgaaaaaagacttttgccttgtccccagcaggctgaggaattaccaaggaggcaggaggtggagcaaaacacaccaagcctggtgccaatcattgacaatattatggttagtacttactgagggctgactatggttgaaactgcctttgcaaaattatgactgagacggtgaaagagatctaacttaaccaacgctagctatcttgcctctaacctccaagctgtccttgttcattcctgggcataggctgaactaactttgggagaaatttagtttatagtttgaaacaaagatgataacagccctttgccaaagcagacctccttcttgtctggggactagatggcctttgtaggactaacatgagccacaagattagaaattatggataggagtcatgcagctggagtctccaagattctgacc

SEQ ID NO: 376067 - DNA, 642 bp, Homo sapiens
atgacatttccggtggcatctggggcaaacgacacaagtcagcatttagtttcttgctttaggaagcggaagactaatgaccgaagcttcaagactttgacatgtgtgaaaacatgaaatggtaagtcaatacaaagacagcatcttcctggaatttggttttgagcttgttttcatttcacctttctcagtaatctgggtgtagcttattttgactcttcctttgattaaacaattcagacccttggctcttattgttcttgctggtgtggtatgttcacggctgaaaagatggtcagaaggggaaaggaggaagtgagaagaaagaaacagggaaatggtaagaagaactctacttttctaaataatatttaatagtagtaatcttgtgtttctgtgcaaggtgttacagtttacaaaccgcttttatttttatttatttattttttttgagacggagttttggtcttgttgcactccagtcagggtgacaagagcaagactccatctttaaaaaaaaaaaaagggtgggggagatggtcttctgattgattagataagtgtaggcatttgttttcttttgtctggaataatatgatttcggggagaggaatatcactttccctacaaataccaagatga

SEQ ID NO: 376068 - DNA, 594 bp, Homo sapiens
atgacatttccggtggcatctggggcaaacgacacaagtcagcatttagtttcttgctttaggaagcggaagactaatgaccgaagcttcaagactttgacatgtgtgaaaacatgaaatgacccttggctcttattgttcttgctggtgtggtatgttcacggctgaaaagatggtcagaaggggaaaggaggaagtgagaagaaagaaacagggaaatggacagagtgttgctcagttacccaggctggagtgcaatggcatgatcttggctcactgcagcctccacctcctgggttcaagcggttctcgtgcctcagtctcccaagtagctgggattacagcaggctgaggaattaccaaggaggcaggaggtggagcaaaacacaccaagcctggtgccaatcattgacaatattatggaactgactcagcgcaagaagacagcttcgactccttgtgatttcatccctaaccaatcagcactcctggctcactggcttcccccaacccaccaaattgtccttaaaaactctgctctccaaacgctgggggagactgatttgagtaataataaaaccctggtctcctgca

SEQ ID NO: 376069 - DNA, 547 bp, Homo sapiens
atgacatttccggtggcatctggggcaaacgacacaagtcagcatttagtttcttgctttaggaagcggaagactaatgaccgaagcttcaagactttgacatgtgtgaaaacatgaaatgacccttggctcttattgttcttgctggtgtggtatgttcacggctgaaaagatggtcagaaggggaaaggaggaagtgagaagaaagaaacagggaaatgcaggctgaggaattaccaaggaggcaggaggtggagcaaaacacaccaagcctggtgccaatcattgacaatattatgaccctgcatgtgatggatcagctgacaccatccagatcggtaaactggttcatctgatcttgtgccctccacccaggaactgactcagcgcaagaagacagcttcgactccttgtgatttcatccctaaccaatcagcactcctggctcactggcttcccccaacccaccaaattgtccttaaaaactctgctctccaaacgctgggggagactgatttgagtaataataaaaccctggtctcctgca

SEQ ID NO: 376070 - DNA, 493 bp, Homo sapiens
atgacatttccggtggcatctggggcaaacgacacaagtcagcatttagtttcttgctttaggaagcggaagactaatgaccgaagcttcaagactttgacatgtgtgaaaacatgaaatgacccttggctcttattgttcttgctggtgtggtatgttcacggctgaaaagatggtcagaaggggaaaggaggaagtgagaagaaagaaacagggaaatgcaggctgaggaattaccaaggaggcaggaggtggagcaaaacacaccaagcctggtgccaatcattgacaatattatggaactgactcagcgcaagaagacagcttcgactccttgtgatttcatccctaaccaatcagcactcctggctcactggcttcccccaacccaccaaattgtccttaaaaactctgctctccaaacgctgggggagactgatttgagtaataataaaaccctggtctcctgcaacaaaaaaaaaagtcgtatcga

SEQ ID NO: 376071 - DNA, 1061 bp, Homo sapiens
atgacatttccggtggcatctggggcaaacgacacaagtcagcatttagtttcttgctttaggaagcggaagactaatgaccgaagcttcaagactttgacatgtgtgaaaacatgaaatggtaagtcaatacaaagacagcatcttcctggaatttggttttgagcttgttttcatttcacctttctcagtaatctgggtgtagcttattttgactcttcctttgattaaacaattcagacccttggctcttattgttcttgctggtgtggtatgttcacggctgaaaagatggtcagaaggggaaaggaggaagtgagaagaaagaaacagggaaatggtaagaagaactctacttttctaaataatatttaatagtagtaatcttgtgtttctgtgcaaggtgttacagtttacaaaccgcttttatttttatttatttatttgacagagtgttgctcagttacccaggctggagtgcaatggcatgatcttggctcactgcagcctccacctcctgggttcaagcggttctcgtgcctcagtctcccaagtagctgggattacagacgaaatcttgctctgttgcccaggctggagtgcgatggcatgatcttggctcacggcaaactccgcctccctggttcaagtgattctcctgcctcagcctcccgagtagccgggattacaggcatgtgccaccatgccccgttggccaggctggtctcgaacaccttacctcaggtgatcctcccacctttgggattacagcaggctgaggaattaccaaggaggcaggaggtggagcaaaacacaccaagcctggtgccaatcattgacaatattatggaactgactcagcgcaagaagacagcttcgactccttgtgatttcatccctaaccaatcagcactcctggctcactggcttcccccaacccaccaaattgtccttaaaaactctgctctccaaacgctgggggagactgatttgagtaataataaaaccctggtctcctgcaaaaacaaaaacaatggcctccttcgcctcaccgcggaacc

SEQ ID NO: 376072 - DNA, 685 bp, Homo sapiens
gaaccaatgagattgcgtgtataacatctgctggctcactgagtgacacaaaggaagtgctccacgagtgttgattactctctgagtactgctttttctgatctagcaatctggttctctggggttgggaaagtcagaataagatatttcagataccaccagagttaccattagcattttggtatgttttgtttctctccatctgtatttttaatcatagttgtaattatgattatatatatgtaaatatatatgtctgcgtatgtgtgttttgtgtatccgtatacacacacctatacaaatgatgttttcacattatgtcataagcatttctctgctactgtatgattttcatactcactatttgtagtcactacaaagtgttaggttggagaagttttgctgttggagcctgagggtaagaaaatgttagtctcttcaaaatagaatcagtgagtactagaataggtagtgattttgaaatgtcaggaagagattaattattattctttttaaagtatattctctttttgtaaccttagtcatttattcctgaatttggggagaacccaccagaagcctggcggtccactgtggatggggcagtaaacaggctggcaggtgtctccggaagcttacgttctgagtttagtgggtagaggtaaagaaagaagattaaaaaaaa

SEQ ID NO: 376073 - DNA, 309 bp, Homo sapiens
acctgccctcccgctctggtatttctgttctcagtgaatggggtcatcatccacccaggcatccatgtcagaaactcggcagccctcctggaatcctccgtctccctccctgctctccccattccttccgaatctctaagtcctacagattccactgtgttcacacactcataactgtttcttccatcccaactccagagcttctgtgttaatgtgctgcttcttcatttctccaccagattcttccaacagcctcctcactattctccctacatacatagagtcctggccccccagtccattcttctc

SEQ ID NO: 376074 - DNA, 476 bp, Homo sapiens
atatatatatatatacacacattaggaaagatggactaactacaacccaagtagagaaagtatgaacaaggcctgctggacagttatacaaccttgcactcaacaactgttctcttcaatcacatggaacgtgtgcaaaaactgcccatatactgggccataaagcaaatttcaaaggactgaaattatgccaagtatattgtctgactccaaggcaattatactagaaaaaaatgactagaaaaatccccatatgggctgggcacagtagctgatgcctgtaatcccaacactctggaaggccaagataggcagaccaattgaggccaggctggtctcgaactcctgacctcgtgatccaccggcctcagcctcccaaagcgctgggattacaggcgtgagccaccgtgcccagcggagaccctgtcttaaaaaagccaggcactccagcctgggcaacaagagtgaaactgtct

SEQ ID NO: 376075 - DNA, 1528 bp, Homo sapiens
ctggcatctggagggaccaccgttgccgcgtcttcggcttccacgatctgcgttcgggctacgcggccacggcggcagccactgcgactcccactgtgcctggctctgtccatattagttcccaggcggccgtcgccgttccagcagcggcagcggcagcggcagcggcggacatgttgtgaggcggcggcgcgggtgtctgaaggatggtttggccgaggcggcggcaacggctgctggcggcggcggcagcggcagcggggcctcgggctctatagagccgagcccgctgggtacccgcccggtaccgcggcgaggccagtgcccctggatcttgcctctgctccgacgccgttggggaccagttaggcgacagcgcccgcccctctgaggagacacgaaggtggttccccagccgctcaaatttccggaccaccgcgctttcccctcctcagcctgggctgtgctctctctagaatcctcgggcccccactttcttcccaaactcatcctaaatctctcacacacgcgagtgttcccagccctcaagccagctgctcctccgttcattttctgcaccctcttcgcaaagcaccccccgggatcactctccgagggcgactttttgagaaatctcggtggagtagtggaccagagctggggagtttttaaaagccggggcgcgagaaaacaggaaggtactatggcttcctcgtctggcaacgatgatgatctcactatccccagagctgctatcaataaaatgatcaaagagactcttcctaatgtccgggtggccaacgatgctcgagagctggtggtgaactgctgcactgaattcattcaccttatatcttctgaagccaatgagatttgtaacaaatcggaaaagaagaccatctcaccagagcatgtcatacaagcactagaaagtttgggatttggctcttacatcagtgaagtaaaagaagtcttgcaagagtgtaaaacagtagcattaaaaagaagaaaggccagttctcgtttggaaaaccttggcattcctgaagaagagttattgagacagcaacaagaattatttgcaaaagctagacagcaacaagcagaattggcccaacaggaatggcttcaaatgcagcaagctgcccaacaagcccagcttgctgctgcctcagccagtgcatctaatcaggcgggatcttctcaggatgaagaagatgatgatgatatctgaaattcaccagctgagtttctatttcttctataaatgtttttccctgcacaacaaaaacagtgaaagaaatgcttatctgtaattttgtatgcatcttggtggacttgtcattggtattctagggatgtctgctattaagtttcatctattgtgtgctatacatgtaaaaactgtctctttgaactattgaaaatttaaggttcagtataatatcaattttgaatttttaatggtgtttatgaaattttagatagcagcgagtccttcgtttgatcaataaacagtgttacagat

SEQ ID NO: 376076 - DNA, 3197 bp, Homo sapiens
ctggcatctggagggaccaccgttgccgcgtcttcggcttccacgatctgcgttcgggctacgcggccacggcggcagccactgcgactcccactgtgcctggctctgtccatattagttcccaggcggccgtcgccgttccagcagcggcagcggcagcggcagcggcggacatgttgtgaggcggcggcgcgggtgtctgaaggatggtttggccgaggcggcggcaacggctgctggcggcggcggcagcggcagcggggcctcgggctctatagagccgagcccgctgggtacccgcccggtaccgcggcgaggccagtgcccctggatcttgcctctgctccgacgccgttggggaccagttaggcgacagcgcccgcccctctgaggagacacgaaggtggttccccagccgctcaaatttccggaccaccgcgctttcccctcctcagcctgggctgtgctctctctagaatcctcgggcccccactttcttcccaaactcatcctaaatctctcacacacgcgagtgttcccagccctcaagccagctgctcctccgttcattttctgcaccctcttcgcaaagcaccccccgggatcactctccgagggcgactttttgagaaatctcggtggagtagtggaccagagctggggagtttttaaaagccggggcgcgagaaaacaggaaggtactatggcttcctcgtctggcaacgatgatgatctcactatccccagagctgctatcaataaaatgatcaaagagactcttcctaatgtccgggtggccaacgatgctcgagagctggtggtgaactgctgcactgaattcattcaccttatatcttctgaagccaatgagatttgtaacaaatcggaaaagaagaccatctcaccagagcatgtcatacaagcactagaaagtttgggatttggctcttacatcagtgaagtaaaagaagtcttgcaagagtgtaaaacagtagcattaaaaagaagaaaggccagttctcgtttggaaaaccttggcattcctgaagaagagttattgagacagcaacaagaattatttgcaaaagctagacagcaacaagcagaattggcccaacaggaatggcttcaaatgcagcaagctgcccaacaagcccagcttgctgctgcctcagccagtgcatctaatcaggcgggatcttctcaggatgaagaagatgatgatgatatctgaaattcaccagctgagtttctatttcttctataaatgtttttccctgcacaacaaaaacagtgaaagaaatgcttatctgtaattttgtatgcatcttggtggacttgtcattggtattctagggatgtctgctattaagtttcatctattgtgtgctatacatgtaaaaactgtctctttgaactattgaaaatttaaggttcagtataatatcaattttgaatttttaatggtgtttatgaaattttagatagcagcgagtccttcgtttgatcaataaacagtgttacagataacttcaagtttataaaaatacagtgaaatttctacaaagctctaaatctgcatttgcatttcctctgcccttttaactaaactaaaacttgtgaattttaaattattaaggggggggggtgctgtgtgaatcagtagacattggattgggttggtgaaagagttcagttctgtagtatctgaatttgtcttttaaaatgagtacatatataggcaataaatatatatgctcagatcaatatacttgtttagaaaaacttcaagacattcaaaaactaggaaggagtatgtttaatagtatttgtataaatttggtggttatgtttttttattttgtttctgttttgtgtagaggtaaaaactatagttttattacagcataattcattttgagctccactatgacatttcaaagactgcccagtttggaagtctgtcatgatttttactctttcactccaattcagtaattgttgatagtattacttacctagtccatccatactcatattattcaaatatataggtggtacttttgaaacaattacattggttctcttggtttaactgaggtttatgaatattcaaacctttgctgggggaaagaaatgaaagttaatgagcatgcttgctatgagagagggatttttaatttaacttgtagttatagtttacttattgtttttagaattacttttacattttcccaactagatggcctagagtccaacattaccttttgagatgacattattgtctccataattgagtgatagctttaaaaaaaagattagttttgcttaagaagttatgttacaactgatcagccctatatgaattaactgatcagccctatatgaaacataagttgtgttataacttatcagccgtatatggaacataaatagtttctacctgcttgttagagaagctttaatttggttctaataaatacagtatggtagtgattataggaatccaggatgttgaagaaatggcataatgtctatattttggaaacagaaaggaaaagtcacttaagatagtattaagtaattaaattcctatgtcagttgccaaatcttttaaacttatgtattcaccaagcccaaaaatagattgtggctcccaggattccaattttaattggagagctaagtaagtaaagttttataactgttaggtttcttaatgatcatattttgcagttttagtaaaagggaaatattgttatacatttattaaatatacttcccccatgaagtgaaaaggttaattttgctgaatgttttaagttgaagttacttcatggatgtcatacccatgaagtgcatttggatgagatagaagaaattgttttttaaaaagtttaagtaccaaaggtagtctagtctagaacgataagttaatacgtgttggcttttctaatttgtactgtaacatccttatactttctattttaagtatatctgtttcttaagtaaacaacttagatattttccacacctttttttttttttctgatgcagagttcaggttaatattttactgcatctgataatgtattatacgtttgaagcctagtgacttttcattttgacattcttgtgatttcatatgctgtattcttcaagcaataaaattgtgatgtgtctcatcactggttttt

SEQ ID NO: 376077 - DNA, 3110 bp, Homo sapiens
ctggcatctggagggaccaccgttgccgcgtcttcggcttccacgatctgcgttcgggctacgcggccacggcggcagccactgcgactcccactgtgcctggctctgtccatattagttcccaggcggccgtcgccgttccagcagcggcagcggcagcggcagcggcagcggggcctcgggctctatagagccgagcccgctgggtacccgcccggtaccgcggcgaggccagtgcccctggatcttgcctctgctccgacgccgttggggaccagttaggcgacagcgcccgcccctctgaggagacacgaaggtggttccccagccgctcaaatttccggaccaccgcgctttcccctcctcagcctgggctgtgctctctctagaatcctcgggcccccactttcttcccaaactcatcctaaatctctcacacacgcgagtgttcccagccctcaagccagctgctcctccgttcattttctgcaccctcttcgcaaagcaccccccgggatcactctccgagggcgactttttgagaaatctcggtggagtagtggaccagagctggggagtttttaaaagccggggcgcgagaaaacaggaaggtactatggcttcctcgtctggcaacgatgatgatctcactatccccagagctgctatcaataaaatgatcaaagagactcttcctaatgtccgggtggccaacgatgctcgagagctggtggtgaactgctgcactgaattcattcaccttatatcttctgaagccaatgagatttgtaacaaatcggaaaagaagaccatctcaccagagcatgtcatacaagcactagaaagtttgggatttggctcttacatcagtgaagtaaaagaagtcttgcaagagtgtaaaacagtagcattaaaaagaagaaaggccagttctcgtttggaaaaccttggcattcctgaagaagagttattgagacagcaacaagaattatttgcaaaagctagacagcaacaagcagaattggcccaacaggaatggcttcaaatgcagcaagctgcccaacaagcccagcttgctgctgcctcagccagtgcatctaatcaggcgggatcttctcaggatgaagaagatgatgatgatatctgaaattcaccagctgagtttctatttcttctataaatgtttttccctgcacaacaaaaacagtgaaagaaatgcttatctgtaattttgtatgcatcttggtggacttgtcattggtattctagggatgtctgctattaagtttcatctattgtgtgctatacatgtaaaaactgtctctttgaactattgaaaatttaaggttcagtataatatcaattttgaatttttaatggtgtttatgaaattttagatagcagcgagtccttcgtttgatcaataaacagtgttacagataacttcaagtttataaaaatacagtgaaatttctacaaagctctaaatctgcatttgcatttcctctgcccttttaactaaactaaaacttgtgaattttaaattattaaggggggggggtgctgtgtgaatcagtagacattggattgggttggtgaaagagttcagttctgtagtatctgaatttgtcttttaaaatgagtacatatataggcaataaatatatatgctcagatcaatatacttgtttagaaaaacttcaagacattcaaaaactaggaaggagtatgtttaatagtatttgtataaatttggtggttatgtttttttattttgtttctgttttgtgtagaggtaaaaactatagttttattacagcataattcattttgagctccactatgacatttcaaagactgcccagtttggaagtctgtcatgatttttactctttcactccaattcagtaattgttgatagtattacttacctagtccatccatactcatattattcaaatatataggtggtacttttgaaacaattacattggttctcttggtttaactgaggtttatgaatattcaaacctttgctgggggaaagaaatgaaagttaatgagcatgcttgctatgagagagggatttttaatttaacttgtagttatagtttacttattgtttttagaattacttttacattttcccaactagatggcctagagtccaacattaccttttgagatgacattattgtctccataattgagtgatagctttaaaaaaaagattagttttgcttaagaagttatgttacaactgatcagccctatatgaattaactgatcagccctatatgaaacataagttgtgttataacttatcagccgtatatggaacataaatagtttctacctgcttgttagagaagctttaatttggttctaataaatacagtatggtagtgattataggaatccaggatgttgaagaaatggcataatgtctatattttggaaacagaaaggaaaagtcacttaagatagtattaagtaattaaattcctatgtcagttgccaaatcttttaaacttatgtattcaccaagcccaaaaatagattgtggctcccaggattccaattttaattggagagctaagtaagtaaagttttataactgttaggtttcttaatgatcatattttgcagttttagtaaaagggaaatattgttatacatttattaaatatacttcccccatgaagtgaaaaggttaattttgctgaatgttttaagttgaagttacttcatggatgtcatacccatgaagtgcatttggatgagatagaagaaattgttttttaaaaagtttaagtaccaaaggtagtctagtctagaacgataagttaatacgtgttggcttttctaatttgtactgtaacatccttatactttctattttaagtatatctgtttcttaagtaaacaacttagatattttccacacctttttttttttttctgatgcagagttcaggttaatattttactgcatctgataatgtattatacgtttgaagcctagtgacttttcattttgacattcttgtgatttcatatgctgtattcttcaagcaataaaattgtgatgtgtctcatcactggttttt

SEQ ID NO: 376078 - DNA, 3262 bp, Homo sapiens
  misc_feature (164)..(164): n is a, c, g, or t
ctggcatctggagggaccaccgttgccgcgtcttcggcttccacgatctgcgttcgggctacgcggccacggcggcagccactgcgactcccactgtgcctggctctgtccatattagttcccaggcggccgtcgccgttccatgcatgctgtgctgctgtgcnatgctgtgcatgctgtgctgtgacattgtttgttgatgtgctgtgctgtgctgctgtgtgtgtcttgaagtgattgtgttttgtgtcctgagtgctgtgctgtgcaaactgtgccttgctttggctgtgctgtgctgtgccagctgtgcatggcggcagcggggcctcgggctctatagagccgagcccgctgggtacccgcccggtaccgcggcgaggccagtgcccctggatcttgcctctgctccgacgccgttggggaccagttaggcgacagcgcccgcccctctgaggagacacgaaggtggttccccagccgctcaaatttccggaccaccgcgctttcccctcctcagcctgggctgtgctctctctagaatcctcgggcccccactttcttcccaaactcatcctaaatctctcacacacgcgagtgttcccagccctcaagccagctgctcctccgttcattttctgcaccctcttcgcaaagcaccccccgggatcactctccgagggcgactttttgagaaatctcggtggagtagtggaccagagctggggagtttttaaaagccggggcgcgagaaaacaggaaggtactatggcttcctcgtctggcaacgatgatgatctcactatccccagagctgctatcaataaaatgatcaaagagactcttcctaatgtccgggtggccaacgatgctcgagagctggtggtgaactgctgcactgaattcattcaccttatatcttctgaagccaatgagatttgtaacaaatcggaaaagaagaccatctcaccagagcatgtcatacaagcactagaaagtttgggatttggctcttacatcagtgaagtaaaagaagtcttgcaagagtgtaaaacagtagcattaaaaagaagaaaggccagttctcgtttggaaaaccttggcattcctgaagaagagttattgagacagcaacaagaattatttgcaaaagctagacagcaacaagcagaattggcccaacaggaatggcttcaaatgcagcaagctgcccaacaagcccagcttgctgctgcctcagccagtgcatctaatcaggcgggatcttctcaggatgaagaagatgatgatgatatctgaaattcaccagctgagtttctatttcttctataaatgtttttccctgcacaacaaaaacagtgaaagaaatgcttatctgtaattttgtatgcatcttggtggacttgtcattggtattctagggatgtctgctattaagtttcatctattgtgtgctatacatgtaaaaactgtctctttgaactattgaaaatttaaggttcagtataatatcaattttgaatttttaatggtgtttatgaaattttagatagcagcgagtccttcgtttgatcaataaacagtgttacagataacttcaagtttataaaaatacagtgaaatttctacaaagctctaaatctgcatttgcatttcctctgcccttttaactaaactaaaacttgtgaattttaaattattaaggggggggggtgctgtgtgaatcagtagacattggattgggttggtgaaagagttcagttctgtagtatctgaatttgtcttttaaaatgagtacatatataggcaataaatatatatgctcagatcaatatacttgtttagaaaaacttcaagacattcaaaaactaggaaggagtatgtttaatagtatttgtataaatttggtggttatgtttttttattttgtttctgttttgtgtagaggtaaaaactatagttttattacagcataattcattttgagctccactatgacatttcaaagactgcccagtttggaagtctgtcatgatttttactctttcactccaattcagtaattgttgatagtattacttacctagtccatccatactcatattattcaaatatataggtggtacttttgaaacaattacattggttctcttggtttaactgaggtttatgaatattcaaacctttgctgggggaaagaaatgaaagttaatgagcatgcttgctatgagagagggatttttaatttaacttgtagttatagtttacttattgtttttagaattacttttacattttcccaactagatggcctagagtccaacattaccttttgagatgacattattgtctccataattgagtgatagctttaaaaaaaagattagttttgcttaagaagttatgttacaactgatcagccctatatgaattaactgatcagccctatatgaaacataagttgtgttataacttatcagccgtatatggaacataaatagtttctacctgcttgttagagaagctttaatttggttctaataaatacagtatggtagtgattataggaatccaggatgttgaagaaatggcataatgtctatattttggaaacagaaaggaaaagtcacttaagatagtattaagtaattaaattcctatgtcagttgccaaatcttttaaacttatgtattcaccaagcccaaaaatagattgtggctcccaggattccaattttaattggagagctaagtaagtaaagttttataactgttaggtttcttaatgatcatattttgcagttttagtaaaagggaaatattgttatacatttattaaatatacttcccccatgaagtgaaaaggttaattttgctgaatgttttaagttgaagttacttcatggatgtcatacccatgaagtgcatttggatgagatagaagaaattgttttttaaaaagtttaagtaccaaaggtagtctagtctagaacgataagttaatacgtgttggcttttctaatttgtactgtaacatccttatactttctattttaagtatatctgtttcttaagtaaacaacttagatattttccacacctttttttttttttctgatgcagagttcaggttaatattttactgcatctgataatgtattatacgtttgaagcctagtgacttttcattttgacattcttgtgatttcatatgctgtattcttcaagcaataaaattgtgatgtgtctcatcactggttttt

SEQ ID NO: 376079 - DNA, 2911 bp, Homo sapiens
  misc_feature (44)..(44): n is a, c, g, or t
  misc_feature (57)..(57): n is a, c, g, or t
  misc_feature (153)..(153): n is a, c, g, or t
aacctatcataggcactaaagaggaaaagcctttgaagcaggcnttagtacatgcantgttataattcatatgaatatgaggtacaaaagaagaggtgttgatgttttaaaaacattaatggctatttattgatattgcagaccacctagagnatgctaaattgaacatttagtgacagaagattttctcctggatactttaaatacataaaaacttggcagagtttttatgaaatataaattttattgtattcatttacatattaaaaaatagactcagaggcggaaaaacttccttgaaattgtttgtcatttgttctacagttacttactgaagtcattactatttaccaagcatcatgctaggtgctaggcttacaagagtgaacaaggagacagggttcctgtcattatagagcttaatctactggggaagattgagtgggaaagattgacttaaataaaacagtaagttcagaaagttaggaagtgttggagtctatatttaaacttaggtattttgacccaaaagcctgtactgtttctaacataccatgctgatgctctagcctccattttatatgcttaaacttattatggggcttttaaatagaatatgtattatccttgccagggcaaaatataaagaaataattgactgcctgctatatctgtcttcacctttctatccctattatctgtttttttattcctcttttttgtctcccttgtttcttaccctgacttatgtatgaagatctctagtatttctttactattgtgaggatgaccagcggagaggctagacagcaacaagcagaattggcccaacaggaatggcttcaaatgcagcaagctgcccaacaagcccagcttgctgctgcctcagccagtgcatctaatcaggcgggatcttctcaggatgaagaagatgatgatgatatctgaaattcaccagctgagtttctatttcttctataaatgtttttccctgcacaacaaaaacagtgaaagaaatgcttatctgtaattttgtatgcatcttggtggacttgtcattggtattctagggatgtctgctattaagtttcatctattgtgtgctatacatgtaaaaactgtctctttgaactattgaaaatttaaggttcagtataatatcaattttgaatttttaatggtgtttatgaaattttagatagcagcgagtccttcgtttgatcaataaacagtgttacagataacttcaagtttataaaaatacagtgaaatttctacaaagctctaaatctgcatttgcatttcctctgcccttttaactaaactaaaacttgtgaattttaaattattaaggggggggggtgctgtgtgaatcagtagacattggattgggttggtgaaagagttcagttctgtagtatctgaatttgtcttttaaaatgagtacatatataggcaataaatatatatgctcagatcaatatacttgtttagaaaaacttcaagacattcaaaaactaggaaggagtatgtttaatagtatttgtataaatttggtggttatgtttttttattttgtttctgttttgtgtagaggtaaaaactatagttttattacagcataattcattttgagctccactatgacatttcaaagactgcccagtttggaagtctgtcatgatttttactctttcactccaattcagtaattgttgatagtattacttacctagtccatccatactcatattattcaaatatataggtggtacttttgaaacaattacattggttctcttggtttaactgaggtttatgaatattcaaacctttgctgggggaaagaaatgaaagttaatgagcatgcttgctatgagagagggatttttaatttaacttgtagttatagtttacttattgtttttagaattacttttacattttcccaactagatggcctagagtccaacattaccttttgagatgacattattgtctccataattgagtgatagctttaaaaaaaagattagttttgcttaagaagttatgttacaactgatcagccctatatgaattaactgatcagccctatatgaaacataagttgtgttataacttatcagccgtatatggaacataaatagtttctacctgcttgttagagaagctttaatttggttctaataaatacagtatggtagtgattataggaatccaggatgttgaagaaatggcataatgtctatattttggaaacagaaaggaaaagtcacttaagatagtattaagtaattaaattcctatgtcagttgccaaatcttttaaacttatgtattcaccaagcccaaaaatagattgtggctcccaggattccaattttaattggagagctaagtaagtaaagttttataactgttaggtttcttaatgatcatattttgcagttttagtaaaagggaaatattgttatacatttattaaatatacttcccccatgaagtgaaaaggttaattttgctgaatgttttaagttgaagttacttcatggatgtcatacccatgaagtgcatttggatgagatagaagaaattgttttttaaaaagtttaagtaccaaaggtagtctagtctagaacgataagttaatacgtgttggcttttctaatttgtactgtaacatccttatactttctattttaagtatatctgtttcttaagtaaacaacttagatattttccacacctttttttttttttctgatgcagagttcaggttaatattttactgcatctgataatgtattatacgtttgaagcctagtgacttttcattttgacattcttgtgatttcatatgctgtattcttcaagcaataaaattgtgatgtgtctcatcactggttttt

SEQ ID NO: 376080 - DNA, 2086 bp, Homo sapiens
ctggcatctggagggaccaccgttgccgcgtcttcggcttccacgatctgcgttcgggctacgcggccacggcggcagccactgcgactcccactgtgcctggctctgtccatattagttcccaggcggccgtcgccgttccagcagcggcagcggcagcggcagcggcggacatgttgtgaggcggcggcgcgggtgtctgaaggatggtttggccgaggcggcggcaacggctgctggcggcggcggcagcggcagcggggcctcgggctctatagagccgagcccgctgggtacccgcccggtaccgcggcgaggccagtgcccctggatcttgcctctgctccgacgccgttggggaccagttaggcgacagcgcccgcccctctgaggagacacgaaggtggttccccagccgctcaaatttccggaccaccgcgctttcccctcctcagcctgggctgtgctctctctagaatcctcgggcccccactttcttcccaaactcatcctaaatctctcacacacgcgagtgttcccagccctcaagccagctgctcctccgttcattttctgcaccctcttcgcaaagcaccccccgggatcactctccgagggcgactttttgagaaatctcggtggagtagtggaccagagctggggagtttttaaaagccggggcgcgagaaaacaggaaggtactatggcttcctcgtctggcaacgatgatgatctcactatccccagagctgctatcaataaaatgatcaaagagactcttcctaatgtccgggtggccaacgatgctcgagagctggtggtgaactgctgcactgaattcattcaccttatatcttctgaagccaatgagatttgtaacaaatcggaaaagaagaccatctcaccagagcatgtcatacaagcactagaaagtttgggatttggctcttacatcagtgaagtaaaagaagtcttgcaagagtgtaaaacagtagcattaaaaagaagaaaggccagttctcgtttggaaaaccttggcattcctgaagaagagttattgagacagcaacaagaattatttgcaaaagctagacagcaacaagcagaattggcccaacaggaatggcttcaaatgcagcaagctgcccaacaagcccagcttgctgctgcctcagccagtgcatctaatcaggcgggatcttctcaggatgaagaagatgatgatgatatctgaaattcaccagctgagtttctatttcttctataaatgtttttccctgcacaacaaaaacagtgaaagaaatgcttatctgtaattttgtatgcatcttggtggacttgtcattggtattctagggatgtctgctattaagtttcatctattgtgtgctatacatgtaaaaactgtctctttgaactattgaaaatttaaggttcagtataatatcaattttgaatttttaatggtgtttatgaaattttagatagcagcgagtccttcgtttgatcaataaacagtgttacagataacttcaagtttataaaaatacagtgaaatttctacaaaaaaaaaaaaaaaaaaaaaaaaaaaaaaaaaaaaaaaaaaaaaaaaaaaaaaaaaaaaaaaaaaaaaaaaaaaaaaaaaaaaaaaaaaaaaaaaaaggggggggcggcgagcaacacacctccccacgggggggcccaacacacacgacccgcacactcttctatgacaaaaagggcggccacacagagggtgcgcaacatcaaacgccacggcgcggcgcccggcacacacaccgaccgcaggcgggaggaaaacaccagacggcagcgcgaattcgtgaaagacacaaccacccccaccatctcctgggcgcaaggcgcgaacccacaccacggcggcgacggcaccacaacaagagagaccggaagctacacagtcacaccgccgccaggccgccagcacaaacaagtcagcaccagtccgctcgagcgcggggcgccacccacagcgcacagctccccgcgccgcaaaaaaaccggccgagccgggaatactacagcagaacacatcccaccgggg

SEQ ID NO: 376081 - DNA, 423 bp, Homo sapiens
gcttcgaccttgttttcatgagggagagattggaacactcgcaggtgtacgaagtcctcgtcgccgacgtgcaccttgatgaagtagtttgtccccgcgaccacctggcccttgaccttatctaactaccagaccaacaaagccaagcatgatgagctgacctatttctgatcctgactttggacaaggcccttcagccagaagactgacaaagtcatcctccgtctaccagagcgtgcacttgtgatcctaaaataagcttcatctccgggctgtgccccttggggtggaaggggcaggattctgcagctgcttttgcatttctcttcctaaatttcattgtgttgatttctttccttcccaataggtgatcttaattactttcagaatattttcaaaatagatatatttttaaaatcctta

SEQ ID NO: 376082 - DNA, 821 bp, Homo sapiens
  misc_feature (704)..(704): n is a, c, g, or t
  misc_feature (710)..(710): n is a, c, g, or t
cccgcgcgtcacgtgaccccagcgcctacttgggctgaggagccgccgcgtcccctcgccgagtcccctcgccagattccctccgtcgccgccaagatgatgtgcggggcgccctccgccacgcagccggccaccgccgagacccagcacatcgccgaccaggtgaggtcccagcttgaagagaaagaaaacaagaagttccctgtgtttaaggccgtgtcattcaagagccaggtggtcgcggggacaaactacttcatcaaggtgcacgtcggcgacgaggacttcgtacacctgcgagtgttccaatctctccctcatgaaaacaagcccttgaccttatctaactaccagaccaacaaagccaagcatgatgagctgacctatttctgatcctgactttggacaaggcccttcagccagaagactgacaaagtcatcctccgtctaccagagcgtgcacttgtgatcctaaaataagcttcatctccgggctgtgccccttggggtggaaggggcaggattctgcagctgcttttgcatttctcttcctaaatttcattgtgttgatttctttccttcccaataggtgatcttaattactttcagaatattttcaaaatagatatatttttaaaatccttaaaaaaaaaaaaagaaaacaaaaaaaaaacccgggggcctttattcgggggggggaaaanagggtntggaaagggcctgggcaaaaaagggtcggaacacaatatttggtaaaaggggagtattgcgggcccaataggggcgaataaaatgagaaagcgggtaacggtttagatgaa

SEQ ID NO: 376083 - DNA, 738 bp, Homo sapiens
tgacctcaagtgatccgcccacctcagcctcccaaagttctgggattacatccttgagccaccgtacccagctggaactgtttttttctactttattattaggctgacagtttaaatgtcccttcagttgtaagagacaattgtgtgaagagccagtgtcagaatcgtgtgtgtgctcacatgcgtgcaagttactctagcaggagggaatccaagaagccactgagacatcctcattctgtcccttctgtctaggtgaggtcccagcttgaagagaaagaaaacaagaagttccctgtgtttaaggccgtgtcattcaagagccaggtggtcgcggggacaaactacttcatcaaggtgcacgtcggcgacgaggacttcgtacacctgcgagtgttccaatctctccctcatgaaaacaagcccttgaccttatctaactaccagaccaacaaagccaagcatgatgagctgacctatttctgatcctgactttggacaaggcccttcagccagaagactgacaaagtcatcctccgtctaccagagcgtgcacttgtgatcctaaaataagcttcatctccgggctgtgccccttggggtggaaggggcaggattctgcagctgcttttgcatttctcttcctaaatttcattgtgttgatttctttccttcccaataggtgatcttaattactttcagaatattttcaaaatagatatatttttaaaatcctta

SEQ ID NO: 376084 - DNA, 767 bp, Homo sapiens
cccgcgcgtcacgtgaccccagcgcctacttgggctgaggagccgccgcgtcccctcgccgagtcccctcgccagattccctccgtcgccgccaagatgatgtgcggggcgccctccgccacgcagccggccaccgccgagacccagcacatcgccgaccaggtgaggtcccagcttgaagagaaagaaaacaagaagttccctgtgtttaaggccgtgtcattcaagagccaggtggtcgcggggacaaactacttcatcaaggtgcacgtcggcgacgaggacttcgtacacctgcgagtgttccaatctctccctcatgaaaacaagcccttgaccttatctaactaccagaccaacaaagccaagcatgatgagctgacctatttctgatcctgactttggacaaggcccttcagccagaagactgacaaagtcatcctccgtctaccagagcgtgcacttgtgatcctaaaataagcttcatctccgggctgtgccccttggggtggaaggggcaggattctgcagctgcttttgcatttctcttcctaaatttcattgtgttgatttctttccttcccaataggtgatcttaattactttcagaatattttcaaaatagatatatttttaaaatccttaaagaaaaaaaaaaaaaaacttggggggggggcgccgtccccaattcggccttatatggagtcgattaacaattcactggccgccgtttaacaacacatgactgggaaaaccctgcggtccct

SEQ ID NO: 376085 - DNA, 971 bp, Homo sapiens
cccgcgcgtcacgtgaccccagcgcctacttgggctgaggagccgccgcgtcccctcgccgagtcccctcgccagattccctccgtcgccgccaagatgatgtgcggggcgccctccgccacgcagccggccaccgccgagacccagcacatcgccgaccaggtgaggtcccagcttgaagagaaagaaaacaagaagttccctgtgtttaaggccgtgtcattcaagagccaggtggtcgcggggacaaactacttcatcaaggtagagtgtgggcctcaggagggcctgccccgaacgggtgctggtaggaaaccgcctgtgcaggcccgggctgtgtggtcttaggtgctggggcgccctgtggctgccccctgagataagcatcctactgtgtgtgtccatcggcctttcaggaggactagggcttctggggagctaagaaccccaaggaaacaagtgtgggatgtgaggcatcccctgcacatgcaggagaagacaagattgtcttcagctggctgctaatgacctggaggggcgcagcaaggtgacttgggatcagaggcttcgctcactccgctctcttcccagtgcacgtcggcgacgaggacttcgtacacctgcgagtgttccaatctctccctcatgaaaacaagcccttgaccttatctaactaccagaccaacaaagccaagcatgatgagctgacctatttctgatcctgactttggacaaggcccttcagccagaagactgacaaagtcatcctccgtctaccagagcgtgcacttgtgatcctaaaataagcttcatctccgggctgtgccccttggggtggaaggggcaggattctgcagctgcttttgcatttctcttcctaaatttcattgtgttgatttctttccttcccaataggtgatcttaattactttcagaatattttcaaaatagatatatttttaaaatcctta

SEQ ID NO: 376086 - DNA, 1064 bp, Homo sapiens
tgacctcaagtgatccgcccacctcagcctcccaaagttctgggattacatccttgagccaccgtacccagctggaactgtttttttctactttattattaggctgacagtttaaatgtcccttcagttgtaagagacaattgtgtgaagagccagtgtcagaatcgtgtgtgtgctcacatgcgtgcaagttactctagcaggagggaatccaagaagccactgagacatcctcattctgtcccttctgtctaggtgaggtcccagcttgaagagaaagaaaacaagaagttccctgtgtttaaggccgtgtcattcaagagccaggtggtcgcggggacaaactacttcatcaaggtagagtgtgggcctcaggagggcctgccccgaacgggtgctggtaggaaaccgcctgtgcaggcccgggctgtgtggtcttaggtgctggggcgccctgtggctgccccctgagataagcatcctactgtgtgtgtccatcggcctttcaggaggactagggcttctggggagctaagaaccccaaggaaacaagtgtgggatgtgaggcatcccctgcacatgcaggagaagacaagattgtcttcagctggctgctaatgacctggaggggcgcagcaaggtgacttgggatcagaggcttcgctcactccgctctcttcccagtgcacgtcggcgacgaggacttcgtacacctgcgagtgttccaatctctccctcatgaaaacaagcccttgaccttatctaactaccagaccaacaaagccaagcatgatgagctgacctatttctgatcctgactttggacaaggcccttcagccagaagactgacaaagtcatcctccgtctaccagagcgtgcacttgtgatcctaaaataagcttcatctccgggctgtgccccttggggtggaaggggcaggattctgcagctgcttttgcatttctcttcctaaatttcattgtgttgatttctttccttcccaataggtgatcttaattactttcagaatattttcaaaatagatatatttttaaaatcctta

SEQ ID NO: 376087 - DNA, 578 bp, Homo sapiens
cccgcgcgtcacgtgaccccagcgcctacttgggctgaggagccgccgcgtcccctcgccgagtcccctcgccagattccctccgtcgccgccaagatgatgtgcggggcgccctccgccacgcagccggccaccgccgagacccagcacatcgccgaccaggtgaggtcccagcttgaagagaaagaaaacaagaagtgcacgtcggcgacgaggacttcgtacacctgcgagtgttccaatctctccctcatgaaaacaagcccttgaccttatctaactaccagaccaacaaagccaagcatgatgagctgacctatttctgatcctgactttggacaaggcccttcagccagaagactgacaaagtcatcctccgtctaccagagcgtgcacttgtgatcctaaaataagcttcatctccgggctgtgccccttggggtggaaggggcaggattctgcagctgcttttgcatttctcttcctaaatttcattgtgttgatttctttccttcccaataggtgatcttaattactttcagaatattttcaaaatagatatatttttaaaatcctta

SEQ ID NO: 376088 - DNA, 1168 bp, Homo sapiens
  misc_feature (986)..(986): n is a, c, g, or t
  misc_feature (993)..(993): n is a, c, g, or t
  misc_feature (996)..(996): n is a, c, g, or t
  misc_feature (998)..(998): n is a, c, g, or t
  misc_feature (1001)..(1001): n is a, c, g, or t
  misc_feature (1045)..(1045): n is a, c, g, or t
  misc_feature (1052)..(1052): n is a, c, g, or t
  misc_feature (1069)..(1069): n is a, c, g, or t
  misc_feature (1087)..(1088): n is a, c, g, or t
  misc_feature (1091)..(1091): n is a, c, g, or t
  misc_feature (1109)..(1109): n is a, c, g, or t
cccgcgcgtcacgtgaccccagcgcctacttgggctgaggagccgccgcgtcccctcgccgagtcccctcgccagattccctccgtcgccgccaagatgatgtgcggggcgccctccgccacgcagccggccaccgccgagacccagcacatcgccgaccaggtgaggtcccagcttgaagagaaagaaaacaagaagttccctgtgtttaaggccgtgtcattcaagagccaggtggtcgcggggacaaactacttcatcaaggtagagtgtgggcctcaggagggcctgccccgaacgggtgctggtaggaaaccgcctgtgcaggcccgggctgtgtggtcttaggtgctggggcgccctgtggctgccccctgagataagcatcctactgtgtgtgtccatcggcctttcaggaggactagggcttctggggagctaagaaccccaaggaaacaagtgtgggatgtgaggcatcccctgcacatgcaggagaagacaagattgtcttcagctggctgctaatgacctggaggggcgcagcaaggtgacttgggatcagaggcttcgctcactccgctctcttcccagtgcacgtcggcgacgaggacttcgtacacctgcgagtgttccaatctctccctcatgaaaacaagcccttgaccttatctaactaccagaccaacaaagccaagcatgatgagctgacctatttctgatcctgactttggacaaggcccttcagccagaagactgacaaagtcatcctccgtctaccagagcgtgcacttgtgatcctaaaataagcttcatctccgggctgtgccccttggggtggaaggggcaggattctgcagctgcttttgcatttctcttcctaaatttcattgtgttgatttctttccttcccaataggtgatcttaattactttcagaatattttcaaaatagatatatttttaaaatccttaaaaaaaaaaaaaaantaagccnggngnggnggtgcacaattgtagccccaaagtgctgggataacgggcttganccaccangccgggccgaaaagggntttttatgctatgtaaanngtntccattttcccccctttncatggtagaaaatcaccaaatactttaaaagtctgtagagtttatatgactcagctttt

SEQ ID NO: 376089 - DNA, 361 bp, Homo sapiens
gaaagaaatcaatacaatgaaatttaggaagagaaatgcaaaagcagcttcatagtcccccaactaccagaccaacaaagccaagcatgatgagctgacctatttctgatcctgactttggacaaggcccttcagccagaagactgacaaagtcatcctccgtctaccagagcgtgcacttgtgatcctaaaataagcttcatctccgggctgtgccccttggggtggaaggggcaggattctgcagctgcttttgcatttctcttcctaaatttcattgtgttgatttctttccttcccaataggtgatcttaattactttcagaatattttcaaaatagatatatttttaaaatcctta

SEQ ID NO: 376090 - DNA, 645 bp, Homo sapiens
cccgcgcgtcacgtgaccccagcgcctacttgggctgaggagccgccgcgtcccctcgccgagtcccctcgccagattccctccgtcgccgccaagatgatgtgcggggcgccctccgccacgcagccggccaccgccgagacccagcacatcgccgaccaggtgaggtcccagcttgaagagaaagaaaacaagaagttccctgtgtttaaggccgtgtcattcaagagccaggtggtcgcggggacaaactacttcatcaaggtgcacgtcggcgacgaggacttcgtacacctgcgagtgttccaatctctccctcatgaaaacaagcccttgaccttatctaactaccagaccaacaaagccaagcatgatgagctgacctatttctgatcctgactttggacaaggcccttcagccagaagactgacaaagtcatcctccgtctaccagagcgtgcacttgtgatcctaaaataagcttcatctccgggctgtgccccttggggtggaaggggcaggattctgcagctgcttttgcatttctcttcctaaatttcattgtgttgatttctttccttcccaataggtgatcttaattactttcagaatattttcaaaatagatatatttttaaaatcctta

SEQ ID NO: 376091 - DNA, 1380 bp, Homo sapiens
cccgcgcgtcacgtgaccccagcgcctacttgggctgaggagccgccgcgtcccctcgccgagtcccctcgccagattccctccgtcgccgccaagatgatgtgcggggcgccctccgccacgcagccggccaccgccgagacccagcacatcgccgaccaggtgaggtcccagcttgaagagaaagaaaacaagaagttccctgtgtttaaggccgtgtcattcaagagccaggtggtcgcggggacaaactacttcatcaaggtgcacgtcggcgacgaggacttcgtacacctgcgagtgttccaatctctccctcatgaaaacaagcccttgaccttatctaactaccagaccaacaaagccaagcatgatgagctgacctatttctgatcctgactttggacaaggcccttcagccagaagactgacaaagtcatcctccgtctaccagagcgtgcacttgtgatcctaaaataagcttcatctccgggctgtgccccttggggtggaaggggcaggattctgcagctgcttttgcatttctcttcctaaatttcattgtgttgatttctttccttcccaataggtgatcttaattactttcagaatattttcaaaatagatatatttttaaaatccttaacagattgcctcctttgttttagacttttttcttcgtctgaaccaccccgggcaggtccttcccctcgggggcatggagggcggagagactgcctggctcacacagcaagcaggtggtggacccaggattcacacctgcccactccggcccgcgttcctaaccaccactctttacatgttggtgctttgactcttaggtcctggccccaagcttcagtttctcccataaaataaaagagtgtgagtaaatccaattccagagcataactggctccagatctcagatacattcacgcactttatgctctggtacggagaggcagccacacagtgtcgtgcacgtgcagaatagcctgcagcctcactgagtgccctgtggtgcgggaggcttcccatggagccacgtgggcttctaaagggaggtatcttaggagagcgtggctgtttttaaaaacaccttctagttttcaacagggattacttcccattcatggaattggtccggtgccttcccaactgtgattctatgttaaataggacagaagagggagcatcatacatgataagagctaagactgggggtgaaagtctctgtgcaccggggtcatgatgtgaacgtgttcctgagggtgtcctgagctgcgctttgcctccgaggcgtccggcagcgtatgccagaactgcagctgcagggttcaggctgtccagatcgtgggggatctgtgaagactaagg

SEQ ID NO: 376092 - DNA, 856 bp, Homo sapiens
cccgcgcgtcacgtgaccccagcgcctacttgggctgaggagccgccgcgtcccctcgccgagtcccctcgccagattccctccgtcgccgccaagatgatgtgcggggcgccctccgccacgcagccggccaccgccgagacccagcacatcgccgaccaggtgaggtcccagcttgaagagaaagaaaacaagaagttccctgtgtttaaggccgtgtcattcaagagccaggtggtcgcggggacaaactacttcatcaaggtgcacgtcggcgacgaggacttcgtacacctgcgagtgttccaatctctccctcatgaaaacaagcccttgaccttatctaactaccagaccaacaaagccaagcatgatgagctgacctatttctgatcctgactttggacaaggcccttcagccagaagactgacaaagtcatcctccgtctaccagagcgtgcacttgtgatcctaaaataagcttcatctccgggctgtgccccttggggtggaaggggcaggattctgcagctgcttttgcatttctcttcctaaatttcattgtgttgatttctttccttcccaataggtgatcttaattactttcagaatattttcaaaatagatatatttttaaaatccttaaaaaaaaaaaaagaaaacaaaaaaaaaacctggggggctcaaggcgcgggggggggaaaagggggtaggaatggcgctggggcaaaggggtccgggacccagttttctgggtgccaaggggggaaatgggggggccccctattgggagcgaataattcgaaaagcggtaccgtagttttcccctcccaacagggtaacaaaatacaaaaga

SEQ ID NO: 376093 - DNA, 842 bp, Homo sapiens
  misc_feature (660)..(660): n is a, c, g, or t
  misc_feature (667)..(667): n is a, c, g, or t
  misc_feature (670)..(670): n is a, c, g, or t
  misc_feature (672)..(672): n is a, c, g, or t
  misc_feature (675)..(675): n is a, c, g, or t
  misc_feature (719)..(719): n is a, c, g, or t
  misc_feature (726)..(726): n is a, c, g, or t
  misc_feature (743)..(743): n is a, c, g, or t
  misc_feature (761)..(762): n is a, c, g, or t
  misc_feature (765)..(765): n is a, c, g, or t
  misc_feature (783)..(783): n is a, c, g, or t
cccgcgcgtcacgtgaccccagcgcctacttgggctgaggagccgccgcgtcccctcgccgagtcccctcgccagattccctccgtcgccgccaagatgatgtgcggggcgccctccgccacgcagccggccaccgccgagacccagcacatcgccgaccaggtgaggtcccagcttgaagagaaagaaaacaagaagttccctgtgtttaaggccgtgtcattcaagagccaggtggtcgcggggacaaactacttcatcaaggtgcacgtcggcgacgaggacttcgtacacctgcgagtgttccaatctctccctcatgaaaacaagcccttgaccttatctaactaccagaccaacaaagccaagcatgatgagctgacctatttctgatcctgactttggacaaggcccttcagccagaagactgacaaagtcatcctccgtctaccagagcgtgcacttgtgatcctaaaataagcttcatctccgggctgtgccccttggggtggaaggggcaggattctgcagctgcttttgcatttctcttcctaaatttcattgtgttgatttctttccttcccaataggtgatcttaattactttcagaatattttcaaaatagatatatttttaaaatccttaaaaaaaaaaaaaaantaagccnggngnggnggtgcacaattgtagccccaaagtgctgggataacgggcttganccaccangccgggccgaaaagggntttttatgctatgtaaanngtntccattttcccccctttncatggtagaaaatcaccaaatactttaaaagtctgtagagtttatatgactcagctttt

SEQ ID NO: 376094 - DNA, 812 bp, Homo sapiens
cccgcgcgtcacgtgaccccagcgcctacttgggctgaggagccgccgcgtcccctcgccgagtcccctcgccagattccctccgtcgccgccaagatgatgtgcggggcgccctccgccacgcagccggccaccgccgagacccagcacatcgccgaccaggtgaggtcccagcttgaagagaaagaaaacaagaagttccctgtgtttaaggccgtgtcattcaagagccaggtggtcgcggggacaaactacttcatcaaggtagagtgtgggcctcaggagggcctgccccgaacgggtgctggtaggaaaccgcctgtgcaggcccgggctgtgtggtcttaggtgctggggcgccctgtggctgccccctgagataagcatcctactgtgtgtgtccatcggcctttcaggaggactagggcttctggggagctaagaaccccaaggaaacaagtgtgggatgtgaggcatcccctgcacatgcaggagaagacaagattgtcttcagctggctgctaatgacctggaggggcgcagcaaggtgacttgggatcagaggcttcgctcactccgctctcttcccaaagactgacaaagtcatcctccgtctaccagagcgtgcacttgtgatcctaaaataagcttcatctccgggctgtgccccttggggtggaaggggcaggattctgcagctgcttttgcatttctcttcctaaatttcattgtgttgatttctttccttcccaataggtgatcttaattactttcagaatattttcaaaatagatatatttttaaaatcctta

SEQ ID NO: 376095 - DNA, 3010 bp, Homo sapiens
gcgggcagcctcgagttcggattccacttctcagccttctggggtcactgaaaccctcagaactccgaggacaagtcggacacgccttcgcctcagccatcttcgccagcgcaataagtctctgtgtcttcacactcctggtagagggaaaactaaaacctccgggagccagcgtccggcggtgcctgcaatctaaccgggatttggggttccgagccacttttcccacaagccaccgcggtcatggagctttaggcttaaactacatttcccagagggcaacgggaacacccaatctatggcttcccttccgttttcgcgtggttcttttgcaagtttcaggaattagtgacattcagggatgtggccatagacttctctcggcaggagtgggaatacctggaccctaatcagagggacttatacagggatgtgatgttggagaactatagaaacctggtatcactggagatgaggtctcgctctgttgcccgggttggtctcaaactcctggtctcaagtgatcctcccacctcggccttccaaaatgctgggattataggcgtgagccaccatgcctagccaatagtagtattattatgtccagtttatttgccaaattggaataatgagttgaagtcacatggccaaagtcacaaggaggacattccatttctaaaccagttgtggttgatttactggagcgaggaaaagagccctggatgattttgagggaagaaacacagttcacagatttggatttacagtgtgagataatcagctacatagaagtacccacttatgaaacagatatatcctctacacaacttcagagcatatataagagagagaaactctatgaatgtaagaaatgtcagaagaaatttagtagtggttatcaacttattctacatcacaggtttcatgtcattgagagaccctatgaatgcaaagagtgtgggaagaactttcgtagtggctatcaacttactctacatcaaagatttcatactggtgagaaaccctatgaatgtacagaatgtgggaagaactttagaagtggttatcagctgactgtgcatcagagatttcatactggtgagaaaacctatgaatgtaggcagtgtgggaaggcctttatatatgcctcacacattgttcaacatgagagaattcacactggtgggaagccgtatgaatgtcaggagtgtgggagggcctttagtcaaggtggacatcttagaattcatcagagagttcatactggcgaaaaaccatataaatgtaaggaatgtgggaagacttttagtaggcgctcaaatcttgttgaacatgggcagtttcatactgatgagaagccatacatatgtgagaaatgtggaaaggcctttagaagaggtcaccagcttactgtacatcagagagttcacactggtaaaaagccatatgagtgtaaagaatgtgggaagggctataccactgcctcatactttcttctacatcagagaattcataaaggtggaaaaccctatgaatgtaaggagtgtaagaaaacctttactttgtatagaaatcttactcggcatcagaatattcatactggtgagaaactttttgaatgcaagcaatgtgggaagacctatactactggttcaaaactctttcaacatcagaaaactcatactggcgagaaaccctatgaatgcaaggaatgcggaaaggcctttagcttgtatggctaccttaaacaacatcagaaaattcatactggcatgaaacactttgaatgtaaggagtgtaaaaaaacctttactttgtatagaaatcttactcgacatcagaatattcacactggtaagaaactttttgaatgtcaggaatgtgggaaggcctatagtactggctcaaaccttattcaacatcggaaaactcatactggtgagaaaccctataaatgtaaggaatgtggcaagacctttagcttgcatggatatcttaatcaacatcagaaaattcatactggtgtgaaaccctatgaatgtaaggtatgtagaaaaacctttactttctatagaaatcttactctacatcaaagtattcatactgatgagaaaccttttgaatgtaaggaatgtgggaagacctttagacgtagttcacaccttactgcacatcagagcattcatgctgataaaaaaccctatgaatgtaaagaatgtggaaaggcctttaaaatgtatggctaccttacccaacatcagaaaattcatactggtggaaaaccttatgaatgtaaagaatgtgggaaggccttcagtcgtgcttcaaaccttgttcaacatgagagaattcatactggtgagaaaccctatgtgtgtaagcagtgtgggaaaaccttcagatatggttcagcccttaaagcccatcagagaattcataggagcataaaagtgtaagaccgtaaagagtacgagcgcgccattcatcatcagacagcccacactggtgagaaatgatggaatgttagtcttataggtatggctttagcaattgagagagttcaaaatgcagatcttgccacattagaaagcattcaatgtcagtcctgttttaatggaatatctgactattcaatggtaaattaagaaaaaaaaaaaaaaaacaggaatcccagtttcttcatgcctacaacatccatggcatggatttttttttaaaaaaacttaataattaaggctgggcgcggtggtttgcctgtaatcccagcaccttgagaggccaaggtgggcggatcacgaggtcaggagatagagaccatcctggctaacacgatgaaaccccgtctctactaaaaatacaaaaaattagctgggcgtggtggcaggcgcctgcaatcccagctactcgggaggctgaggcaggagaatagcgtgaacccgggaggcagaccttgcagtgagcagagatcgcgccactgcactccagcctgggcaacagagtgagactccgt

SEQ ID NO: 376096 - DNA, 2764 bp, Homo sapiens
tattttatccattcctcagcaggtctgaattattgtggtaaccttcaacatgcagaaacatttgtctgtggcaataggatcctttaggaataggatcctttaggaataggatcctgtggcaataggatcctttaggaatatgtagacacgttgctttagtctgctaccagtcattagccacatatactatatcactccttttctctaatgtgctcttgtaatctcctatctttccttctttaaaatgtttttaaaattttgtaatgcatgggtttgcagtttttcaggaattagtgacattcagggatgtggccatagacttctctcggcaggagtgggaatacctggaccctaatcagagggacttatacagggatgtgatgttggagaactatagaaacctggtatcactgggaggacattccatttctaaaccagttgtggttgatttactggagcgaggaaaagagccctggatgattttgagggaagaaacacagttcacagatttggatttacagtgtgagataatcagctacatagaagtacccacttatgaaacagatatatcctctacacaacttcagagcatatataagagagagaaactctatgaatgtaagaaatgtcagaagaaatttagtagtggttatcaacttattctacatcacaggtttcatgtcattgagagaccctatgaatgcaaagagtgtgggaagaactttcgtagtggctatcaacttactctacatcaaagatttcatactggtgagaaaccctatgaatgtacagaatgtgggaagaactttagaagtggttatcagctgactgtgcatcagagatttcatactggtgagaaaacctatgaatgtaggcagtgtgggaaggcctttatatatgcctcacacattgttcaacatgagagaattcacactggtgggaagccgtatgaatgtcaggagtgtgggagggcctttagtcaaggtggacatcttagaattcatcagagagttcatactggcgaaaaaccatataaatgtaaggaatgtgggaagacttttagtaggcgctcaaatcttgttgaacatgggcagtttcatactgatgagaagccatacatatgtgagaaatgtggaaaggcctttagaagaggtcaccagcttactgtacatcagagagttcacactggtaaaaagccatatgagtgtaaagaatgtgggaagggctataccactgcctcatactttcttctacatcagagaattcataaaggtggaaaaccctatgaatgtaaggagtgtaagaaaacctttactttgtatagaaatcttactcggcatcagaatattcatactggtgagaaactttttgaatgcaagcaatgtgggaagacctatactactggttcaaaactctttcaacatcagaaaactcatactggcgagaaaccctatgaatgcaaggaatgcggaaaggcctttagcttgtatggctaccttaaacaacatcagaaaattcatactggcatgaaacactttgaatgtaaggagtgtaaaaaaacctttactttgtatagaaatcttactcgacatcagaatattcacactggtaagaaactttttgaatgtcaggaatgtgggaaggcctatagtactggctcaaaccttattcaacatcggaaaactcatactggtgagaaaccctataaatgtaaggaatgtggcaagacctttagcttgcatggatatcttaatcaacatcagaaaattcatactggtgtgaaaccctatgaatgtaaggtatgtagaaaaacctttactttctatagaaatcttactctacatcaaagtattcatactgatgagaaaccttttgaatgtaaggaatgtgggaagacctttagacgtagttcacaccttactgcacatcagagcattcatgctgataaaaaaccctatgaatgtaaagaatgtggaaaggcctttaaaatgtatggctaccttacccaacatcagaaaattcatactggtggaaaaccttatgaatgtaaagaatgtgggaaggccttcagtcgtgcttcaaaccttgttcaacatgagagaattcatactggtgagaaaccctatgtgtgtaagcagtgtgggaaaaccttcagatatggttcagcccttaaagcccatcagagaattcataggagcataaaagtgtaagaccgtaaagagtacgagcgcgccattcatcatcagacagcccacactggtgagaaatgatggaatgttagtcttataggtatggctttagcaattgagagagttcaaaatgcagatcttgccacattagaaagcattcaatgtcagtcctgttttaatggaatatctgactattcaatggtaaattaagaaaaaaaaaaaaaaaacaggaatcccagtttcttcatgcctacaacatccatggcatggatttttttttaaaaaaacttaataattaaggctgggcgcggtggtttgcctgtaatcccagcaccttgagaggccaaggtgggcggatcacgaggtcaggagatagagaccatcctggctaacacgatgaaaccccgtctctactaaaaatacaaaaaattagctgggcgtggtggcaggcgcctgcaatcccagctactcgggaggctgaggcaggagaatagcgtgaacccgggaggcagaccttgcagtgagcagagatcgcgccactgcactccagcctgggcaacagagtgagactccgt

SEQ ID NO: 376097 - DNA, 1061 bp, Homo sapiens
gcgggcagcctcgagttcggattccacttctcagccttctggggtcactgaaaccctcagaactccgaggacaagtcggacacgccttcgcctcagccatcttcgccagcgcaataagtctctgtgtcttcacactcctggtagagggaaaactaaaacctccgggagccagcgtccggcggtgcctgcaatctaaccgggatttggggttccgagccacttttcccacaagccaccgcggtcatggagctttaggcttaaactacatttcccagagggcaacgggaacacccaatctatggcttcccttccgttttcgcgtggttcttttgcaagtttcaggaattagtgacattcagggatgtggccatagacttctctcggcaggagtgggaatacctggaccctaatcagagggacttatacagggatgtgatgttggagaactatagaaacctggtatcactggagatgaggtctcgctctgttgcccgggttggtctcaaactcctggtctcaagtgatcctcccacctcggccttccaaaatgctgggattataggcgtgagccaccatgcctagccaatagtagtattattatgtccagtttatttgccaaattggaataatgagttgaagtcacatggccaaagtcacaaggaggacattccatttctaaaccagttgtggttgatttactggagcgaggaaaagagccctggatgattttgagggaagaaacacagttcacagatttggatttacagtgtgagataatcagctacatagaagtacccacttatgaaacagatatatcctctacacaacttcagagcatatataagagagagaaactctatgaatagatgaagtctccctatgttgcctgagctggtctcaaactcttgatcctcctaccttgacctcccaaagtgctgggattatagcacgagcctgggccagttacacagttctgtaggtattattttgtacttttcacagtaaccacgtgcagccatgttgctttctgctgttgcataacaagatcccttccccctagt

SEQ ID NO: 376098 - DNA, 2910 bp, Homo sapiens
gcgggcagcctcgagttcggattccacttctcagccttctggggtcactgaaaccctcagaactccgaggacaagtcggacacgccttcgcctcagccatcttcgccagcgcaataagtctctgtgtcttcacactcctggtagagggaaaactaaaacctccgggagccagcgtccggcggtgcctgcaatctaaccgggatttggggttccgagccacttttcccacaagccaccgcggtcatggagctttaggcttaaactacatttcccagagggcaacgggaacacccaatctatggcttcccttccgttttcgcgtggttcttttgcaagctctggattctctggagtttgaatgtttccagtattggaaccccaccaagtaggactgatcaggtcttacaattctaaaaccatgacctgttttcaggaattagtgacattcagggatgtggccatagacttctctcggcaggagtgggaatacctggaccctaatcagagggacttatacagggatgtgatgttggagaactatagaaacctggtatcactgggaggacattccatttctaaaccagttgtggttgatttactggagcgaggaaaagagccctggatgattttgagggaagaaacacagttcacagatttggatttacagtgtgagataatcagctacatagaagtacccacttatgaaacagatatatcctctacacaacttcagagcatatataagagagagaaactctatgaatgtaagaaatgtcagaagaaatttagtagtggttatcaacttattctacatcacaggtttcatgtcattgagagaccctatgaatgcaaagagtgtgggaagaactttcgtagtggctatcaacttactctacatcaaagatttcatactggtgagaaaccctatgaatgtacagaatgtgggaagaactttagaagtggttatcagctgactgtgcatcagagatttcatactggtgagaaaacctatgaatgtaggcagtgtgggaaggcctttatatatgcctcacacattgttcaacatgagagaattcacactggtgggaagccgtatgaatgtcaggagtgtgggagggcctttagtcaaggtggacatcttagaattcatcagagagttcatactggcgaaaaaccatataaatgtaaggaatgtgggaagacttttagtaggcgctcaaatcttgttgaacatgggcagtttcatactgatgagaagccatacatatgtgagaaatgtggaaaggcctttagaagaggtcaccagcttactgtacatcagagagttcacactggtaaaaagccatatgagtgtaaagaatgtgggaagggctataccactgcctcatactttcttctacatcagagaattcataaaggtggaaaaccctatgaatgtaaggagtgtaagaaaacctttactttgtatagaaatcttactcggcatcagaatattcatactggtgagaaactttttgaatgcaagcaatgtgggaagacctatactactggttcaaaactctttcaacatcagaaaactcatactggcgagaaaccctatgaatgcaaggaatgcggaaaggcctttagcttgtatggctaccttaaacaacatcagaaaattcatactggcatgaaacactttgaatgtaaggagtgtaaaaaaacctttactttgtatagaaatcttactcgacatcagaatattcacactggtaagaaactttttgaatgtcaggaatgtgggaaggcctatagtactggctcaaaccttattcaacatcggaaaactcatactggtgagaaaccctataaatgtaaggaatgtggcaagacctttagcttgcatggatatcttaatcaacatcagaaaattcatactggtgtgaaaccctatgaatgtaaggtatgtagaaaaacctttactttctatagaaatcttactctacatcaaagtattcatactgatgagaaaccttttgaatgtaaggaatgtgggaagacctttagacgtagttcacaccttactgcacatcagagcattcatgctgataaaaaaccctatgaatgtaaagaatgtggaaaggcctttaaaatgtatggctaccttacccaacatcagaaaattcatactggtggaaaaccttatgaatgtaaagaatgtgggaaggccttcagtcgtgcttcaaaccttgttcaacatgagagaattcatactggtgagaaaccctatgtgtgtaagcagtgtgggaaaaccttcagatatggttcagcccttaaagcccatcagagaattcataggagcataaaagtgtaagaccgtaaagagtacgagcgcgccattcatcatcagacagcccacactggtgagaaatgatggaatgttagtcttataggtatggctttagcaattgagagagttcaaaatgcagatcttgccacattagaaagcattcaatgtcagtcctgttttaatggaatatctgactattcaatggtaaattaagaaaaaaaaaaaaaaaacaggaatcccagtttcttcatgcctacaacatccatggcatggatttttttttaaaaaaacttaataattaaggctgggcgcggtggtttgcctgtaatcccagcaccttgagaggccaaggtgggcggatcacgaggtcaggagatagagaccatcctggctaacacgatgaaaccccgtctctactaaaaatacaaaaaattagctgggcgtggtggcaggcgcctgcaatcccagctactcgggaggctgaggcaggagaatagcgtgaacccgggaggcagaccttgcagtgagcagagatcgcgccactgcactccagcctgggcaacagagtgagactccgt

SEQ ID NO: 376099 - DNA, 2359 bp, Homo sapiens
ccaggctggagtgcagtggcttgatctcggctcactgcaacctctacctcccgcgttcaagtgattctcctgcctcagcctcccgagtagctgggattacagatttggatttacagtgtgagataatcagctacatagaagtacccacttatgaaacagatatatcctctacacaacttcagagcatatataagagagagaaactctatgaatgtaagaaatgtcagaagaaatttagtagtggttatcaacttattctacatcacaggtttcatgtcattgagagaccctatgaatgcaaagagtgtgggaagaactttcgtagtggctatcaacttactctacatcaaagatttcatactggtgagaaaccctatgaatgtacagaatgtgggaagaactttagaagtggttatcagctgactgtgcatcagagatttcatactggtgagaaaacctatgaatgtaggcagtgtgggaaggcctttatatatgcctcacacattgttcaacatgagagaattcacactggtgggaagccgtatgaatgtcaggagtgtgggagggcctttagtcaaggtggacatcttagaattcatcagagagttcatactggcgaaaaaccatataaatgtaaggaatgtgggaagacttttagtaggcgctcaaatcttgttgaacatgggcagtttcatactgatgagaagccatacatatgtgagaaatgtggaaaggcctttagaagaggtcaccagcttactgtacatcagagagttcacactggtaaaaagccatatgagtgtaaagaatgtgggaagggctataccactgcctcatactttcttctacatcagagaattcataaaggtggaaaaccctatgaatgtaaggagtgtaagaaaacctttactttgtatagaaatcttactcggcatcagaatattcatactggtgagaaactttttgaatgcaagcaatgtgggaagacctatactactggttcaaaactctttcaacatcagaaaactcatactggcgagaaaccctatgaatgcaaggaatgcggaaaggcctttagcttgtatggctaccttaaacaacatcagaaaattcatactggcatgaaacactttgaatgtaaggagtgtaaaaaaacctttactttgtatagaaatcttactcgacatcagaatattcacactggtaagaaactttttgaatgtcaggaatgtgggaaggcctatagtactggctcaaaccttattcaacatcggaaaactcatactggtgagaaaccctataaatgtaaggaatgtggcaagacctttagcttgcatggatatcttaatcaacatcagaaaattcatactggtgtgaaaccctatgaatgtaaggtatgtagaaaaacctttactttctatagaaatcttactctacatcaaagtattcatactgatgagaaaccttttgaatgtaaggaatgtgggaagacctttagacgtagttcacaccttactgcacatcagagcattcatgctgataaaaaaccctatgaatgtaaagaatgtggaaaggcctttaaaatgtatggctaccttacccaacatcagaaaattcatactggtggaaaaccttatgaatgtaaagaatgtgggaaggccttcagtcgtgcttcaaaccttgttcaacatgagagaattcatactggtgagaaaccctatgtgtgtaagcagtgtgggaaaaccttcagatatggttcagcccttaaagcccatcagagaattcataggagcataaaagtgtaagaccgtaaagagtacgagcgcgccattcatcatcagacagcccacactggtgagaaatgatggaatgttagtcttataggtatggctttagcaattgagagagttcaaaatgcagatcttgccacattagaaagcattcaatgtcagtcctgttttaatggaatatctgactattcaatggtaaattaagaaaaaaaaaaaaaaaacaggaatcccagtttcttcatgcctacaacatccatggcatggatttttttttaaaaaaacttaataattaaggctgggcgcggtggtttgcctgtaatcccagcaccttgagaggccaaggtgggcggatcacgaggtcaggagatagagaccatcctggctaacacgatgaaaccccgtctctactaaaaatacaaaaaattagctgggcgtggtggcaggcgcctgcaatcccagctactcgggaggctgaggcaggagaatagcgtgaacccgggaggcagaccttgcagtgagcagagatcgcgccactgcactccagcctgggcaacagagtgagactccgt

SEQ ID NO: 376100 - DNA, 2381 bp, Homo sapiens
cacacctggctaatttttgtatttttagtagagatggggtttcaccatgttggccaggctggtctcgaactcctgacctcaggtgatccgcccacctcggcctccgaaagtgctgggattacagatttggatttacagtgtgagataatcagctacatagaagtacccacttatgaaacagatatatcctctacacaacttcagagcatatataagagagagaaactctatgaatgtaagaaatgtcagaagaaatttagtagtggttatcaacttattctacatcacaggtttcatgtcattgagagaccctatgaatgcaaagagtgtgggaagaactttcgtagtggctatcaacttactctacatcaaagatttcatactggtgagaaaccctatgaatgtacagaatgtgggaagaactttagaagtggttatcagctgactgtgcatcagagatttcatactggtgagaaaacctatgaatgtaggcagtgtgggaaggcctttatatatgcctcacacattgttcaacatgagagaattcacactggtgggaagccgtatgaatgtcaggagtgtgggagggcctttagtcaaggtggacatcttagaattcatcagagagttcatactggcgaaaaaccatataaatgtaaggaatgtgggaagacttttagtaggcgctcaaatcttgttgaacatgggcagtttcatactgatgagaagccatacatatgtgagaaatgtggaaaggcctttagaagaggtcaccagcttactgtacatcagagagttcacactggtaaaaagccatatgagtgtaaagaatgtgggaagggctataccactgcctcatactttcttctacatcagagaattcataaaggtggaaaaccctatgaatgtaaggagtgtaagaaaacctttactttgtatagaaatcttactcggcatcagaatattcatactggtgagaaactttttgaatgcaagcaatgtgggaagacctatactactggttcaaaactctttcaacatcagaaaactcatactggcgagaaaccctatgaatgcaaggaatgcggaaaggcctttagcttgtatggctaccttaaacaacatcagaaaattcatactggcatgaaacactttgaatgtaaggagtgtaaaaaaacctttactttgtatagaaatcttactcgacatcagaatattcacactggtaagaaactttttgaatgtcaggaatgtgggaaggcctatagtactggctcaaaccttattcaacatcggaaaactcatactggtgagaaaccctataaatgtaaggaatgtggcaagacctttagcttgcatggatatcttaatcaacatcagaaaattcatactggtgtgaaaccctatgaatgtaaggtatgtagaaaaacctttactttctatagaaatcttactctacatcaaagtattcatactgatgagaaaccttttgaatgtaaggaatgtgggaagacctttagacgtagttcacaccttactgcacatcagagcattcatgctgataaaaaaccctatgaatgtaaagaatgtggaaaggcctttaaaatgtatggctaccttacccaacatcagaaaattcatactggtggaaaaccttatgaatgtaaagaatgtgggaaggccttcagtcgtgcttcaaaccttgttcaacatgagagaattcatactggtgagaaaccctatgtgtgtaagcagtgtgggaaaaccttcagatatggttcagcccttaaagcccatcagagaattcataggagcataaaagtgtaagaccgtaaagagtacgagcgcgccattcatcatcagacagcccacactggtgagaaatgatggaatgttagtcttataggtatggctttagcaattgagagagttcaaaatgcagatcttgccacattagaaagcattcaatgtcagtcctgttttaatggaatatctgactattcaatggtaaattaagaaaaaaaaaaaaaaaacaggaatcccagtttcttcatgcctacaacatccatggcatggatttttttttaaaaaaacttaataattaaggctgggcgcggtggtttgcctgtaatcccagcaccttgagaggccaaggtgggcggatcacgaggtcaggagatagagaccatcctggctaacacgatgaaaccccgtctctactaaaaatacaaaaaattagctgggcgtggtggcaggcgcctgcaatcccagctactcgggaggctgaggcaggagaatagcgtgaacccgggaggcagaccttgcagtgagcagagatcgcgccactgcactccagcctgggcaacagagtgagactccgt

SEQ ID NO: 376101 - DNA, 2124 bp, Homo sapiens
aggtcacttccggggtccgtcccggttcccggccgttgccacgacgacgaagctgccggccaatggctggcggatgggcccaaggttcccggcgtgcagcgcggctgcctgagggcggcaggctcatggcgccggcgtcgcggttgctcgcgctctgggcgctggcggctgtggctctacccggctccggggcggagggcgacggcgggtggcgcccgggcgggccgggggccgtggcggaggaggagcgctgcacggtggagcgtcgggccgacctcacctacgcggagttcgtgcagcagtacgccttcgtcaggcccgtcatcctgcagggactcacggacaactcgaggttccgggccctgtgctcccgcgacaggttgctggcttcgtttggggacagagtggtccggctgagcaccgccaacacctactcctaccacaaagtggacttgcccttccaggagtatgtggagcagctgctgcacccccaggaccccacctccctgggcaatgacaccctgtacttcttcggggacaacaacttcaccgagtgggcctctctctttcggcactactccccacccccatttggcctgctgggaaccgctccagcttacagctttggaatcgcaggagctggctcgggggtgcccttccactggcatggacccgggtactcagaagtgatctacggtcgtaagcgctggttcctttacccacctgagaagacgccagagttccaccccaacaagaccacgctggcctggctccgggacacatacccagccctgccaccgtctgcacggcccctggagtgtaccatccgggctggtgaggtgctgtacttccccgaccgctggtggcatgctacgctcaaccttgacaccagcgtcttcatctccaccttcctcggctagccaaaacagctggcaggactgccggtcacacaccagcacgtcccacctcgtgctcacggattttattacacagatagtggcggcaatggcctcagcccagcccaccctcacctgcttttccagcccacaaagggggacgatcacggcccagcaaaagcgatgctgagaggggaaacagtccagagtccaacagcagaacttgggggaagcggtcggggtggccaggaacataaactatgtataggggccgggggcttctgcccagggctcccctggaccaggacgccaggtagggcagggaacctcagtagtcctccacccagccattctcagagatgaatgcgtcaataacctccttcatagccaagttggggatgagctgttcctgggtcagggggctccgggtcacggggtcaaaatgacccacacgctgcagtgacaagaagggcagagggcagtcatggggcccaggaccatgccactggccctgctcccccagccgcagcctcacctgcaggtgctcctcgatgtccttgcggtcgtaggtgatgccactgggcgtgatgcacggctcccgcatcagctcaaagctgatcttgccacacaggtagtcggggatgtctcgcttctgtggcacaggggcacacggtcagaggctgaaaaggggcactgcacgagcacctgccagccatcggcagcaagcgacacacactcaccttcctcttctcatccacctgagaaaaaagctcgtccatgtccgccatgtacttgtcctgtgaagagttgagtgctgtgcttgggggagacaccccacctccctcctccatggggcacagacccaacacaaggcggggatgctcccacgccacgtgcacacacacagacccacatgtgggtggggggcaccctcacgtgcttggcctcaatgcaggcctgctgggcccggacgtggctgtcgtcctcatcaccctcgtggtttcgctggcactcttccagctccctgggggttgaccaggagccggtcagagatggacctggccagatgtctgaccacaccccaatctcagagctaacatccacacttccccacatttcctgcttgccagtaaagccttcgataaacaaaaaaaacacaaaagggggggctaattcccgcagggccaagtaaggaaccgtttttgaagggcccaagaggataaaaagg

SEQ ID NO: 376102 - DNA, 1953 bp, Homo sapiens
aggtcacttccggggtccgtcccggttcccggccgttgccacgacgacgaagctgccggccaatggctggcggatgggcccaaggttcccggcgtgcagcgcggctgcctgagggcggcaggctcatggcgccggcgtcgcggttgctcgcgctctgggcgctggcggctgtggctctacccggctccggggcggagggcgacggcgggtggtacgccttcgtcaggcccgtcatcctgcagggactcacggacaactcgaggttccgggccctgtgctcccgcgacaggttgctggcttcgtttggggacagagtggtccggctgagcaccgccaacacctactcctaccacaaagtggacttgcccttccaggagtatgtggagcagctgctgcacccccaggaccccacctccctgggcaatgacaccctgtacttcttcggggacaacaacttcaccgagtgggcctctctctttcggcactactccccacccccatttggcctgctgggaaccgctccagcttacagctttggaatcgcaggagctggctcgggggtgcccttccactggcatggacccgggtactcagaagtgatctacggtcgtaagcgctggttcctttacccacctgagaagacgccagagttccaccccaacaagaccacgctggcctggctccgggacacatacccagccctgccaccgtctgcacggcccctggagtgtaccatccgggctggtgaggtgctgtacttccccgaccgctggtggcatgctacgctcaaccttgacaccagcgtcttcatctccaccttcctcggctagccaaaacagctggcaggactgccggtcacacaccagcacgtcccacctcgtgctcacggattttattacacagatagtggcggcaatggcctcagcccagcccaccctcacctgcttttccagcccacaaagggggacgatcacggcccagcaaaagcgatgctgagaggggaaacagtccagagtccaacagcagaacttgggggaagcggtcggggtggccaggaacataaactatgtataggggccgggggcttctgcccagggctcccctggaccaggacgccaggtagggcagggaacctcagtagtcctccacccagccattctcagagatgaatgcgtcaataacctccttcatagccaagttggggatgagctgttcctgggtcagggggctccgggtcacggggtcaaaatgacccacacgctgcagtgacaagaagggcagagggcagtcatggggcccaggaccatgccactggccctgctcccccagccgcagcctcacctgcaggtgctcctcgatgtccttgcggtcgtaggtgatgccactgggcgtgatgcacggctcccgcatcagctcaaagctgatcttgccacacaggtagtcggggatgtctcgcttctgtggcacaggggcacacggtcagaggctgaaaaggggcactgcacgagcacctgccagccatcggcagcaagcgacacacactcaccttcctcttctcatccacctgagaaaaaagctcgtccatgtccgccatgtacttgtcctgtgaagagttgagtgctgtgcttgggggagacaccccacctccctcctccatggggcacagacccaacacaaggcggggatgctcccacgccacgtgcacacacacagacccacatgtgggtggggggcaccctcacgtgcttggcctcaatgcaggcctgctgggcccggacgtggctgtcgtcctcatcaccctcgtggtttcgctggcactcttccagctccctgggggttgaccaggagccggtcagagatggacctggccagatgtctgaccacaccccaatctcagagctaacatccacacttccccacatttcctgcttgccagtaaagccttcgataaac

SEQ ID NO: 376103 - DNA, 2121 bp, Homo sapiens
aggtcacttccggggtccgtcccggttcccggccgttgccacgacgacgaagctgccggccaatggctggcggatgggcccaaggttcccggcgtgcagcgcggctgcctgagggcggcaggctcatggcgccggcgtcgcggttgctcgcgctctgggcgctggcggctgtggctctacccggctccggggcggagggcgacggcgggtggtgagcggcccgggaggggccgggcggtggggtcacgtgcggcgggcggggcgcgggctgacccagctgtgcccgcaggcgcccgggcgggccgggggccgtggcggaggaggagcgctgcacggtggagcgtcgggccgacctcacctacgcggagttcgtgcagcagtacgccttcgtcaggcccgtcatcctgcagggactcacggacaactcgaggttccgggccctgtgctcccgcgacaggttgctggcttcgtttggggacagagtggtccggctgagcaccgccaacacctactcctaccacaaagtggacttgcccttccaggagtatgtggagcagctgctgcacccccaggaccccacctccctgggcaatgacaccctgtacttcttcggggacaacaacttcaccgagtgggcctctctctttcggcactactccccacccccatttggcctgctgggaaccgctccagcttacagctttggaatcgcaggagctggctcgggggtgcccttccactggcatggacccgggtactcagaagtgatctacggtcgtaagcgctggttcctttacccacctgagaagacgccagagttccaccccaacaagaccacgctggcctggctccgggacacatacccagccctgccaccgtctgcacggcccctggagtgtaccatccgggctggtgaggtgctgtacttccccgaccgctggtggcatgctacgctcaaccttgacaccagcgtcttcatctccaccttcctcggctagccaaaacagctggcaggactgccggtcacacaccagcacgtcccacctcgtgctcacggattttattacacagatagtggcggcaatggcctcagcccagcccaccctcacctgcttttccagcccacaaagggggacgatcacggcccagcaaaagcgatgctgagaggggaaacagtccagagtccaacagcagaacttgggggaagcggtcggggtggccaggaacataaactatgtataggggccgggggcttctgcccagggctcccctggaccaggacgccaggtagggcagggaacctcagtagtcctccacccagccattctcagagatgaatgcgtcaataacctccttcatagccaagttggggatgagctgttcctgggtcagggggctccgggtcacggggtcaaaatgacccacacgctgcagtgacaagaagggcagagggcagtcatggggcccaggaccatgccactggccctgctcccccagccgcagcctcacctgcaggtgctcctcgatgtccttgcggtcgtaggtgatgccactgggcgtgatgcacggctcccgcatcagctcaaagctgatcttgccacacaggtagtcggggatgtctcgcttctgtggcacaggggcacacggtcagaggctgaaaaggggcactgcacgagcacctgccagccatcggcagcaagcgacacacactcaccttcctcttctcatccacctgagaaaaaagctcgtccatgtccgccatgtacttgtcctgtgaagagttgagtgctgtgcttgggggagacaccccacctccctcctccatggggcacagacccaacacaaggcggggatgctcccacgccacgtgcacacacacagacccacatgtgggtggggggcaccctcacgtgcttggcctcaatgcaggcctgctgggcccggacgtggctgtcgtcctcatcaccctcgtggtttcgctggcactcttccagctccctgggggttgaccaggagccggtcagagatggacctggccagatgtctgaccacaccccaatctcagagctaacatccacacttccccacatttcctgcttgccagtaaagccttcgataaac

SEQ ID NO: 376104 - DNA, 2151 bp, Homo sapiens
aggtcacttccggggtccgtcccggttcccggccgttgccacgacgacgaagctgccggccaatggctggcggatgggcccaaggttcccggcgtgcagcgcggctgcctgagggcggcaggctcatggcgccggcgtcgcggttgctcgcgctctgggcgctggcggctgtggctctacccggctccggggcggagggcgacggcgggtggcgcccgggcgggccgggggccgtggcggaggaggagcgctgcacggtggagcgtcgggccgacctcacctacgcggagttcgtgcagcagtacgtgctgcccctgatcgcggaggtcgcgtcctgttcaccggcccgtctgccccgaccgcccaaggccgccttcccctgacctcgcgcgcacgcgtggggctggggcggcgaggctggcggtccggcctggccgcgactctgcccttctttccagaggttccgggccctgtgctcccgcgacaggttgctggcttcgtttggggacagagtggtccggctgagcaccgccaacacctactcctaccacaaagtggacttgcccttccaggagtatgtggagcagctgctgcacccccaggaccccacctccctgggcaatgacaccctgtacttcttcggggacaacaacttcaccgagtgggcctctctctttcggcactactccccacccccatttggcctgctgggaaccgctccagcttacagctttggaatcgcaggagctggctcgggggtgcccttccactggcatggacccgggtactcagaagtgatctacggtcgtaagcgctggttcctttacccacctgagaagacgccagagttccaccccaacaagaccacgctggcctggctccgggacacatacccagccctgccaccgtctgcacggcccctggagtgtaccatccgggctggtgaggtgctgtacttccccgaccgctggtggcatgctacgctcaaccttgacaccagcgtcttcatctccaccttcctcggctagccaaaacagctggcaggactgccggtcacacaccagcacgtcccacctcgtgctcacggattttattacacagatagtggcggcaatggcctcagcccagcccaccctcacctgcttttccagcccacaaagggggacgatcacggcccagcaaaagcgatgctgagaggggaaacagtccagagtccaacagcagaacttgggggaagcggtcggggtggccaggaacataaactatgtataggggccgggggcttctgcccagggctcccctggaccaggacgccaggtagggcagggaacctcagtagtcctccacccagccattctcagagatgaatgcgtcaataacctccttcatagccaagttggggatgagctgttcctgggtcagggggctccgggtcacggggtcaaaatgacccacacgctgcagtgacaagaagggcagagggcagtcatggggcccaggaccatgccactggccctgctcccccagccgcagcctcacctgcaggtgctcctcgatgtccttgcggtcgtaggtgatgccactgggcgtgatgcacggctcccgcatcagctcaaagctgatcttgccacacaggtagtcggggatgtctcgcttctgtggcacaggggcacacggtcagaggctgaaaaggggcactgcacgagcacctgccagccatcggcagcaagcgacacacactcaccttcctcttctcatccacctgagaaaaaagctcgtccatgtccgccatgtacttgtcctgtgaagagttgagtgctgtgcttgggggagacaccccacctccctcctccatggggcacagacccaacacaaggcggggatgctcccacgccacgtgcacacacacagacccacatgtgggtggggggcaccctcacgtgcttggcctcaatgcaggcctgctgggcccggacgtggctgtcgtcctcatcaccctcgtggtttcgctggcactcttccagctccctgggggttgaccaggagccggtcagagatggacctggccagatgtctgaccacaccccaatctcagagctaacatccacacttccccacatttcctgcttgccagtaaagccttcgataaac

SEQ ID NO: 376105 - DNA, 2367 bp, Homo sapiens
aggtcacttccggggtccgtcccggttcccggccgttgccacgacgacgaagctgccggccaatggctggcggatgggcccaaggttcccggcgtgcagcgcggctgcctgagggcggcaggctcatggcgccggcgtcgcggttgctcgcgctctgggcgctggcggctgtggctctacccggctccggggcggagggcgacggcgggtggcgcccgggcgggccgggggccgtggcggaggaggagcgctgcacggtggagcgtcgggccgacctcacctacgcggagttcgtgcagcagtacgtgctgcccctgatcgcggaggtcgcgtcctgttcaccggcccgtctgccccgaccgcccaaggccgccttcccctgacctcgcgcgcacgcgtggggctggggcggcgaggctggcggtccggcctggccgcgactctgcccttctttccaggtacgccttcgtcaggcccgtcatcctgcagggactcacggacaactcggtgagcgcgtgcccgtccgtccccggccactctcgcccgtgctgggcccggccactaagtcccctccccgcccccgcagaggttccgggccctgtgctcccgcgacaggttgctggcttcgtttggggacagagtggtccggctgagcaccgccaacacctactcctaccacaaagtggacttgcccttccaggagtatgtggagcagctgctgcacccccaggaccccacctccctgggcaatggtgaggcagccctaggcggcggtagggggtggggacgcttggagtctccaggtgccaggatccctgtccccgccgtctctgttggcagacaccctgtacttcttcggggacaacaacttcaccgagtgggcctctctctttcggcactactccccacccccatttggcctgctgggaaccgctccagcttacagctttggaatcgcaggagctggctcgggggtgcccttccactggcatggacccgggtactcagaagtgatctacggtcgtaagcgctggttcctttacccacctgagaagacgccagagttccaccccaacaagaccacgctggcctggctccgggacacatacccagccctgccaccgtctgcacggcccctggagtgtaccatccgggctggtgaggtgctgtacttccccgaccgctggtggcatgctacgctcaaccttgacaccagcgtcttcatctccaccttcctcggctagccaaaacagctggcaggactgccggtcacacaccagcacgtcccacctcgtgctcacggattttattacacagatagtggcggcaatggcctcagcccagcccaccctcacctgcttttccagcccacaaagggggacgatcacggcccagcaaaagcgatgctgagaggggaaacagtccagagtccaacagcagaacttgggggaagcggtcggggtggccaggaacataaactatgtataggggccgggggcttctgcccagggctcccctggaccaggacgccaggtagggcagggaacctcagtagtcctccacccagccattctcagagatgaatgcgtcaataacctccttcatagccaagttggggatgagctgttcctgggtcagggggctccgggtcacggggtcaaaatgacccacacgctgcagtgacaagaagggcagagggcagtcatggggcccaggaccatgccactggccctgctcccccagccgcagcctcacctgcaggtgctcctcgatgtccttgcggtcgtaggtgatgccactgggcgtgatgcacggctcccgcatcagctcaaagctgatcttgccacacaggtagtcggggatgtctcgcttctgtggcacaggggcacacggtcagaggctgaaaaggggcactgcacgagcacctgccagccatcggcagcaagcgacacacactcaccttcctcttctcatccacctgagaaaaaagctcgtccatgtccgccatgtacttgtcctgtgaagagttgagtgctgtgcttgggggagacaccccacctccctcctccatggggcacagacccaacacaaggcggggatgctcccacgccacgtgcacacacacagacccacatgtgggtggggggcaccctcacgtgcttggcctcaatgcaggcctgctgggcccggacgtggctgtcgtcctcatcaccctcgtggtttcgctggcactcttccagctccctgggggttgaccaggagccggtcagagatggacctggccagatgtctgaccacaccccaatctcagagctaacatccacacttccccacatttcctgcttgccagtaaagccttcgataaac

SEQ ID NO: 376106 - DNA, 2366 bp, Homo sapiens
aggtcacttccggggtccgtcccggttcccggccgttgccacgacgacgaagctgccggccaatggctggcggatgggcccaaggttcccggcgtgcagcgcggctgcctgagggcggcaggctcatggcgccggcgtcgcggttgctcgcgctctgggcgctggcggctgtggctctacccggctccggggcggagggcgacggcgggtggtgagcggcccgggaggggccgggcggtggggtcacgtgcggcgggcggggcgcgggctgacccagctgtgcccgcaggcgcccgggcgggccgggggccgtggcggaggaggagcgctgcacggtggagcgtcgggccgacctcacctacgcggagttcgtgcagcagtacgtgctgcccctgatcgcggaggtcgcgtcctgttcaccggcccgtctgccccgaccgcccaaggccgccttcccctgacctcgcgcgcacgcgtggggctggggcggcgaggctggcggtccggcctggccgcgactctgcccttctttccaggtacgccttcgtcaggcccgtcatcctgcagggactcacggacaactcgaggttccgggccctgtgctcccgcgacaggttgctggcttcgtttggggacagagtggtccggctgagcaccgccaacacctactcctaccacaaagtggacttgcccttccaggagtatgtggagcagctgctgcacccccaggaccccacctccctgggcaatggtgaggcagccctaggcggcggtagggggtggggacgcttggagtctccaggtgccaggatccctgtccccgccgtctctgttggcagacaccctgtacttcttcggggacaacaacttcaccgagtgggcctctctctttcggcactactccccacccccatttggcctgctgggaaccgctccagcttacagctttggaatcgcaggagctggctcgggggtgcccttccactggcatggacccgggtactcagaagtgatctacggtcgtaagcgctggttcctttacccacctgagaagacgccagagttccaccccaacaagaccacgctggcctggctccgggacacatacccagccctgccaccgtctgcacggcccctggagtgtaccatccgggctggtgaggtgctgtacttccccgaccgctggtggcatgctacgctcaaccttgacaccagcgtcttcatctccaccttcctcggctagccaaaacagctggcaggactgccggtcacacaccagcacgtcccacctcgtgctcacggattttattacacagatagtggcggcaatggcctcagcccagcccaccctcacctgcttttccagcccacaaagggggacgatcacggcccagcaaaagcgatgctgagaggggaaacagtccagagtccaacagcagaacttgggggaagcggtcggggtggccaggaacataaactatgtataggggccgggggcttctgcccagggctcccctggaccaggacgccaggtagggcagggaacctcagtagtcctccacccagccattctcagagatgaatgcgtcaataacctccttcatagccaagttggggatgagctgttcctgggtcagggggctccgggtcacggggtcaaaatgacccacacgctgcagtgacaagaagggcagagggcagtcatggggcccaggaccatgccactggccctgctcccccagccgcagcctcacctgcaggtgctcctcgatgtccttgcggtcgtaggtgatgccactgggcgtgatgcacggctcccgcatcagctcaaagctgatcttgccacacaggtagtcggggatgtctcgcttctgtggcacaggggcacacggtcagaggctgaaaaggggcactgcacgagcacctgccagccatcggcagcaagcgacacacactcaccttcctcttctcatccacctgagaaaaaagctcgtccatgtccgccatgtacttgtcctgtgaagagttgagtgctgtgcttgggggagacaccccacctccctcctccatggggcacagacccaacacaaggcggggatgctcccacgccacgtgcacacacacagacccacatgtgggtggggggcaccctcacgtgcttggcctcaatgcaggcctgctgggcccggacgtggctgtcgtcctcatcaccctcgtggtttcgctggcactcttccagctccctgggggttgaccaggagccggtcagagatggacctggccagatgtctgaccacaccccaatctcagagctaacatccacacttccccacatttcctgcttgccagtaaagccttcgataaac

SEQ ID NO: 376107 - DNA, 2123 bp, Homo sapiens
aggtcacttccggggtccgtcccggttcccggccgttgccacgacgacgaagctgccggccaatggctggcggatgggcccaaggttcccggcgtgcagcgcggctgcctgagggcggcaggctcatggcgccggcgtcgcggttgctcgcgctctgggcgctggcggctgtggctctacccggctccggggcggagggcgacggcgggtggcgcccgggcgggccgggggccgtggcggaggaggagcgctgcacggtggagcgtcgggccgacctcacctacgcggagttcgtgcagcagtacgccttcgtcaggcccgtcatcctgcagggactcacggacaactcgaggttccgggccctgtgctcccgcgacaggttgctggcttcgtttggggacagagtggtccggctgagcaccgccaacacctactcctaccacaaagtggacttgcccttccaggagtatgtggagcagctgctgcacccccaggaccccacctccctgggcaatgacaccctgtacttcttcggggacaacaacttcaccgagtgggcctctctctttcggcactactccccacccccatttggcctgctgggaaccgctccagcttacagctttggaatcgcaggagctggctcgggggtgcccttccactggcatggacccgggtactcagaagtgatctacggtcgtaagcgctggttcctttacccacctgagaagacgccagagttccaccccaacaagaccacgctggcctggctccgggacacatacccagccctgccaccgtctgcacggcccctggagtgtaccatccgggctggtgagaggtcagtggctggcaggagagggccaggccaggctagaggcccgcagctaatctctgctgcacccccttcctccaccaggtgctgtacttccccgaccgctggtggcatgctacgctcaaccttgacaccagcgtcttcatctccaccttcctcggctagccaaaacagctggcaggactgccggtcacacaccagcacgtcccacctcgtgctcacggattttattacacagatagtggcggcaatggcctcagcccagcccaccctcacctgcttttccagcccacaaagggggacgatcacggcccagcaaaagcgatgctgagaggggaaacagtccagagtccaacagcagaacttgggggaagcggtcggggtggccaggaacataaactatgtataggggccgggggcttctgcccagggctcccctggaccaggacgccaggtagggcagggaacctcagtagtcctccacccagccattctcagagatgaatgcgtcaataacctccttcatagccaagttggggatgagctgttcctgggtcagggggctccgggtcacggggtcaaaatgacccacacgctgcagtgacaagaagggcagagggcagtcatggggcccaggaccatgccactggccctgctcccccagccgcagcctcacctgcaggtgctcctcgatgtccttgcggtcgtaggtgatgccactgggcgtgatgcacggctcccgcatcagctcaaagctgatcttgccacacaggtagtcggggatgtctcgcttctgtggcacaggggcacacggtcagaggctgaaaaggggcactgcacgagcacctgccagccatcggcagcaagcgacacacactcaccttcctcttctcatccacctgagaaaaaagctcgtccatgtccgccatgtacttgtcctgtgaagagttgagtgctgtgcttgggggagacaccccacctccctcctccatggggcacagacccaacacaaggcggggatgctcccacgccacgtgcacacacacagacccacatgtgggtggggggcaccctcacgtgcttggcctcaatgcaggcctgctgggcccggacgtggctgtcgtcctcatcaccctcgtggtttcgctggcactcttccagctccctgggggttgaccaggagccggtcagagatggacctggccagatgtctgaccacaccccaatctcagagctaacatccacacttccccacatttcctgcttgccagtaaagccttcgataaac

SEQ ID NO: 376108 - DNA, 2287 bp, Homo sapiens
aggtcacttccggggtccgtcccggttcccggccgttgccacgacgacgaagctgccggccaatggctggcggatgggcccaaggttcccggcgtgcagcgcggctgcctgagggcggcaggctcatggcgccggcgtcgcggttgctcgcgctctgggcgctggcggctgtggctctacccggctccggggcggagggcgacggcgggtggcgcccgggcgggccgggggccgtggcggaggaggagcgctgcacggtggagcgtcgggccgacctcacctacgcggagttcgtgcagcagtacgccttcgtcaggcccgtcatcctgcagggactcacggacaactcggtgagcgcgtgcccgtccgtccccggccactctcgcccgtgctgggcccggccactaagtcccctccccgcccccgcagaggttccgggccctgtgctcccgcgacaggttgctggcttcgtttggggacagagtggtccggctgagcaccgccaacacctactcctaccacaaaggtacgcggcctcacccctggggcccgcccatttgccaacaccggggcggctggaccagacggtcctgacccgtctctttcctgcagtggacttgcccttccaggagtatgtggagcagctgctgcacccccaggaccccacctccctgggcaatgacaccctgtacttcttcggggacaacaacttcaccgagtgggcctctctctttcggcactactccccacccccatttggcctgctgggaaccgctccagcttacagctttggaatcgcaggagctggctcgggggtgcccttccactggcatggacccgggtactcagaagtgatctacggtcgtaaggtcagcacggggtgggggttgaggcttgggactcgctgaccaaaacgggcaagggtgacactgctgctcatgcccccagcgctggttcctttacccacctgagaagacgccagagttccaccccaacaagaccacgctggcctggctccgggacacatacccagccctgccaccgtctgcacggcccctggagtgtaccatccgggctggtgaggtgctgtacttccccgaccgctggtggcatgctacgctcaaccttgacaccagcgtcttcatctccaccttcctcggctagccaaaacagctggcaggactgccggtcacacaccagcacgtcccacctcgtgctcacggattttattacacagatagtggcggcaatggcctcagcccagcccaccctcacctgcttttccagcccacaaagggggacgatcacggcccagcaaaagcgatgctgagaggggaaacagtccagagtccaacagcagaacttgggggaagcggtcggggtggccaggaacataaactatgtataggggccgggggcttctgcccagggctcccctggaccaggacgccaggtagggcagggaacctcagtagtcctccacccagccattctcagagatgaatgcgtcaataacctccttcatagccaagttggggatgagctgttcctgggtcagggggctccgggtcacggggtcaaaatgacccacacgctgcagtgacaagaagggcagagggcagtcatggggcccaggaccatgccactggccctgctcccccagccgcagcctcacctgcaggtgctcctcgatgtccttgcggtcgtaggtgatgccactgggcgtgatgcacggctcccgcatcagctcaaagctgatcttgccacacaggtagtcggggatgtctcgcttctgtggcacaggggcacacggtcagaggctgaaaaggggcactgcacgagcacctgccagccatcggcagcaagcgacacacactcaccttcctcttctcatccacctgagaaaaaagctcgtccatgtccgccatgtacttgtcctgtgaagagttgagtgctgtgcttgggggagacaccccacctccctcctccatggggcacagacccaacacaaggcggggatgctcccacgccacgtgcacacacacagacccacatgtgggtggggggcaccctcacgtgcttggcctcaatgcaggcctgctgggcccggacgtggctgtcgtcctcatcaccctcgtggtttcgctggcactcttccagctccctgggggttgaccaggagccggtcagagatggacctggccagatgtctgaccacaccccaatctcagagctaacatccacacttccccacatttcctgcttgccagtaaagccttcgataaac

SEQ ID NO: 376109 - DNA, 2112 bp, Homo sapiens
aggtcacttccggggtccgtcccggttcccggccgttgccacgacgacgaagctgccggccaatggctggcggatgggcccaaggttcccggcgtgcagcgcggctgcctgagggcggcaggctcatggcgccggcgtcgcggttgctcgcgctctgggcgctggcggctgtggctctacccggctccggggcggagggcgacggcgggtggtacgccttcgtcaggcccgtcatcctgcagggactcacggacaactcggtgagcgcgtgcccgtccgtccccggccactctcgcccgtgctgggcccggccactaagtcccctccccgcccccgcagaggttccgggccctgtgctcccgcgacaggttgctggcttcgtttggggacagagtggtccggctgagcaccgccaacacctactcctaccacaaagtggacttgcccttccaggagtatgtggagcagctgctgcacccccaggaccccacctccctgggcaatgacaccctgtacttcttcggggacaacaacttcaccgagtgggcctctctctttcggcactactccccacccccatttggcctgctgggaaccgctccagcttacagctttggaatcgcaggagctggctcgggggtgcccttccactggcatggacccgggtactcagaagtgatctacggtcgtaagcgctggttcctttacccacctgagaagacgccagagttccaccccaacaagaccacgctggcctggctccgggacacatacccagccctgccaccgtctgcacggcccctggagtgtaccatccgggctggtgagaggtcagtggctggcaggagagggccaggccaggctagaggcccgcagctaatctctgctgcacccccttcctccaccaggtgctgtacttccccgaccgctggtggcatgctacgctcaaccttgacaccagcgtcttcatctccaccttcctcggctagccaaaacagctggcaggactgccggtcacacaccagcacgtcccacctcgtgctcacggattttattacacagatagtggcggcaatggcctcagcccagcccaccctcacctgcttttccagcccacaaagggggacgatcacggcccagcaaaagcgatgctgagaggggaaacagtccagagtccaacagcagaacttgggggaagcggtcggggtggccaggaacataaactatgtataggggccgggggcttctgcccagggctcccctggaccaggacgccaggtagggcagggaacctcagtagtcctccacccagccattctcagagatgaatgcgtcaataacctccttcatagccaagttggggatgagctgttcctgggtcagggggctccgggtcacggggtcaaaatgacccacacgctgcagtgacaagaagggcagagggcagtcatggggcccaggaccatgccactggccctgctcccccagccgcagcctcacctgcaggtgctcctcgatgtccttgcggtcgtaggtgatgccactgggcgtgatgcacggctcccgcatcagctcaaagctgatcttgccacacaggtagtcggggatgtctcgcttctgtggcacaggggcacacggtcagaggctgaaaaggggcactgcacgagcacctgccagccatcggcagcaagcgacacacactcaccttcctcttctcatccacctgagaaaaaagctcgtccatgtccgccatgtacttgtcctgtgaagagttgagtgctgtgcttgggggagacaccccacctccctcctccatggggcacagacccaacacaaggcggggatgctcccacgccacgtgcacacacacagacccacatgtgggtggggggcaccctcacgtgcttggcctcaatgcaggcctgctgggcccggacgtggctgtcgtcctcatcaccctcgtggtttcgctggcactcttccagctccctgggggttgaccaggagccggtcagagatggacctggccagatgtctgaccacaccccaatctcagagctaacatccacacttccccacatttcctgcttgccagtaaagccttcgataaac

SEQ ID NO: 376110 - DNA, 2043 bp, Homo sapiens
aggtcacttccggggtccgtcccggttcccggccgttgccacgacgacgaagctgccggccaatggctggcggatgggcccaaggttcccggcgtgcagcgcggctgcctgagggcggcaggctcatggcgccggcgtcgcggttgctcgcgctctgggcgctggcggctgtggctctacccggctccggggcggagggcgacggcgggtggcgcccgggcgggccgggggccgtggcggaggaggagcgctgcacggtggagcgtcgggccgacctcacctacgcggagttcgtgcagcagtacgccttcgtcaggcccgtcatcctgcagggactcacggacaactcgaggttccgggccctgtgctcccgcgacaggttgctggcttcgtttggggacagagtggtccggctgagcaccgccaacacctactcctaccacaaagtggacttgcccttccaggagtatgtggagcagctgctgcacccccaggaccccacctccctgggcaatgacaccctgtacttcttcggggacaacaacttcaccgagtgggcctctctctttcggcactactccccacccccatttggcctgctgggaaccgctccagcttacagctttggaatcgcaggagctggctcgggggtgcccttccactggcatggacccgggtactcagaagtgatctacggtcgtaagcgctggttcctttacccacctgagaagacgccagagttccaccccaacaagaccacgctggcctggctccgggacacatacccagccctgccaccgtctgcacggcccctggagtgtaccatccgggctggtgaggtgctgtacttccccgaccgctggtggcatgctacgctcaaccttgacaccagcgtcttcatctccaccttcctcggctagccaaaacagctggcaggactgccggtcacacaccagcacgtcccacctcgtgctcacggattttattacacagatagtggcggcaatggcctcagcccagcccaccctcacctgcttttccagcccacaaagggggacgatcacggcccagcaaaagcgatgctgagaggggaaacagtccagagtccaacagcagaacttgggggaagcggtcggggtggccaggaacataaactatgtataggggccgggggcttctgcccagggctcccctggaccaggacgccaggtagggcagggaacctcagtagtcctccacccagccattctcagagatgaatgcgtcaataacctccttcatagccaagttggggatgagctgttcctgggtcagggggctccgggtcacggggtcaaaatgacccacacgctgcagtgacaagaagggcagagggcagtcatggggcccaggaccatgccactggccctgctcccccagccgcagcctcacctgcaggtgctcctcgatgtccttgcggtcgtaggtgatgccactgggcgtgatgcacggctcccgcatcagctcaaagctgatcttgccacacaggtagtcggggatgtctcgcttctgtggcacaggggcacacggtcagaggctgaaaaggggcactgcacgagcacctgccagccatcggcagcaagcgacacacactcaccttcctcttctcatccacctgagaaaaaagctcgtccatgtccgccatgtacttgtcctgtgaagagttgagtgctgtgcttgggggagacaccccacctccctcctccatggggcacagacccaacacaaggcggggatgctcccacgccacgtgcacacacacagacccacatgtgggtggggggcaccctcacgtgcttggcctcaatgcaggcctgctgggcccggacgtggctgtcgtcctcatcaccctcgtggtttcgctggcactcttccagctccctgggggttgaccaggagccggtcagagatggacctggccagatgtctgaccacaccccaatctcagagctaacatccacacttccccacatttcctgcttgccagtaaagccttcgataaac

SEQ ID NO: 376111 - DNA, 2071 bp, Homo sapiens
aggtcacttccggggtccgtcccggttcccggccgttgccacgacgacgaagctgccggccaatggctggcggatgggcccaaggttcccggcgtgcagcgcggctgcctgagggcggcaggctcatggcgccggcgtcgcggttgctcgcgctctgggcgctggcggctgtggctctacccggctccggggcggagggcgacggcgggtggcgcccgggcgggccgggggccgtggcggaggaggagcgctgcacggtggagcgtcgggccgacctcacctacgcggagttcgtgcagcagtacgccttcgtcaggcccgtcatcctgcagggactcacggacaactcgaggttccgggccctgtgctcccgcgacaggttgctggcttcgtttggggacagagtggtccggctgagcaccgccaacacctactcctaccacaaagtggacttgcccttccaggagtatgtggagcagctgctgcacccccaggaccccacctccctgggcaatgacaccctgtacttcttcggggacaacaacttcaccgagtgggcctctctctttcggcactactccccacccccatttggcctgctgggaaccgctccagcttacagctttggaatcgcaggagctggctcgggggtgcccttccactggcatggacccgggtactcagaagtgatctacggtcgtaagcgctggttcctttacccacctgagaagacgccagagttccaccccaacaagaccacgctggcctggctccgggacacatacccagccctgccaccgtctgcacggcccctggagtgtaccatccgggctggtgaggtgctgtacttccccgaccgctggtggcatgctacgctcaaccttgacaccagcgtcttcatctccaccttcctcggctagccaaaacagctggcaggactgccggtcacacaccagcacgtcccacctcgtgctcacggattttattacacagatagtggcggcaatggcctcagcccagcccaccctcacctgcttttccagcccacaaagggggacgatcacggcccagcaaaagcgatgctgagaggggaaacagtccagagtccaacagcagaacttgggggaagcggtcggggtggccaggaacataaactatgtataggggccgggggcttctgcccagggctcccctggaccaggacgccaggtagggcagggaacctcagtagtcctccacccagccattctcagagatgaatgcgtcaataacctccttcatagccaagttggggatgagctgttcctgggtcagggggctccgggtcacggggtcaaaatgacccacacgctgcagtgacaagaagggcagagggcagtcatggggcccaggaccatgccactggccctgctcccccagccgcagcctcacctgcaggtgctcctcgatgtccttgcggtcgtaggtgatgccactgggcgtgatgcacggctcccgcatcagctcaaagctgatcttgccacacaggtagtcggggatgtctcgcttctgtggcacaggggcacacggtcagaggctgaaaaggggcactgcacgagcacctgccagccatcggcagcaagcgacacacactcaccttcctcttctcatccacctgagaaaaaagctcgtccatgtccgccatgtacttgtcctgtgaagagttgagtgctgtgcttgggggagacaccccacctccctcctccatggggcacagacccaacacaaggcggggatgctcccacgccacgtgcacacacacagacccacatgtgggtggggggcaccctcacgtgcttggcctcaatgcaggcctgctgggcccggacgtggctgtcgtcctcatcaccctcgtggtttcgctggcactcttccagctccctgggggttgaccaggagccggtcagagatggacctggccagatgtctgaccacaccccaatctcagagctaacatccacacttccccacatttcctgctgcagaagctggcgcgggggtcgtggtggcgtgtgggggtggagtggggggg

SEQ ID NO: 376112 - DNA, 2278 bp, Homo sapiens
aggtcacttccggggtccgtcccggttcccggccgttgccacgacgacgaagctgccggccaatggctggcggatgggcccaaggttcccggcgtgcagcgcggctgcctgagggcggcaggctcatggcgccggcgtcgcggttgctcgcgctctgggcgctggcggctgtggctctacccggctccggggcggagggcgacggcgggtggtgagcggcccgggaggggccgggcggtggggtcacgtgcggcgggcggggcgcgggctgacccagctgtgcccgcaggcgcccgggcgggccgggggccgtggcggaggaggagcgctgcacggtggagcgtcgggccgacctcacctacgcggagttcgtgcagcagtacgtgctgcccctgatcgcggaggtcgcgtcctgttcaccggcccgtctgccccgaccgcccaaggccgccttcccctgacctcgcgcgcacgcgtggggctggggcggcgaggctggcggtccggcctggccgcgactctgcccttctttccaggtacgccttcgtcaggcccgtcatcctgcagggactcacggacaactcgaggttccgggccctgtgctcccgcgacaggttgctggcttcgtttggggacagagtggtccggctgagcaccgccaacacctactcctaccacaaagtggacttgcccttccaggagtatgtggagcagctgctgcacccccaggaccccacctccctgggcaatgacaccctgtacttcttcggggacaacaacttcaccgagtgggcctctctctttcggcactactccccacccccatttggcctgctgggaaccgctccagcttacagctttggaatcgcaggagctggctcgggggtgcccttccactggcatggacccgggtactcagaagtgatctacggtcgtaagcgctggttcctttacccacctgagaagacgccagagttccaccccaacaagaccacgctggcctggctccgggacacatacccagccctgccaccgtctgcacggcccctggagtgtaccatccgggctggtgaggtgctgtacttccccgaccgctggtggcatgctacgctcaaccttgacaccagcgtcttcatctccaccttcctcggctagccaaaacagctggcaggactgccggtcacacaccagcacgtcccacctcgtgctcacggattttattacacagatagtggcggcaatggcctcagcccagcccaccctcacctgcttttccagcccacaaagggggacgatcacggcccagcaaaagcgatgctgagaggggaaacagtccagagtccaacagcagaacttgggggaagcggtcggggtggccaggaacataaactatgtataggggccgggggcttctgcccagggctcccctggaccaggacgccaggtagggcagggaacctcagtagtcctccacccagccattctcagagatgaatgcgtcaataacctccttcatagccaagttggggatgagctgttcctgggtcagggggctccgggtcacggggtcaaaatgacccacacgctgcagtgacaagaagggcagagggcagtcatggggcccaggaccatgccactggccctgctcccccagccgcagcctcacctgcaggtgctcctcgatgtccttgcggtcgtaggtgatgccactgggcgtgatgcacggctcccgcatcagctcaaagctgatcttgccacacaggtagtcggggatgtctcgcttctgtggcacaggggcacacggtcagaggctgaaaaggggcactgcacgagcacctgccagccatcggcagcaagcgacacacactcaccttcctcttctcatccacctgagaaaaaagctcgtccatgtccgccatgtacttgtcctgtgaagagttgagtgctgtgcttgggggagacaccccacctccctcctccatggggcacagacccaacacaaggcggggatgctcccacgccacgtgcacacacacagacccacatgtgggtggggggcaccctcacgtgcttggcctcaatgcaggcctgctgggcccggacgtggctgtcgtcctcatcaccctcgtggtttcgctggcactcttccagctccctgggggttgaccaggagccggtcagagatggacctggccagatgtctgaccacaccccaatctcagagctaacatccacacttccccacatttcctgcttgccagtaaagccttcgataaac

SEQ ID NO: 376113 - DNA, 2122 bp, Homo sapiens
aggtcacttccggggtccgtcccggttcccggccgttgccacgacgacgaagctgccggccaatggctggcggatgggcccaaggttcccggcgtgcagcgcggctgcctgagggcggcaggctcatggcgccggcgtcgcggttgctcgcgctctgggcgctggcggctgtggctctacccggctccggggcggagggcgacggcgggtggcgcccgggcgggccgggggccgtggcggaggaggagcgctgcacggtggagcgtcgggccgacctcacctacgcggagttcgtgcagcagtacgccttcgtcaggcccgtcatcctgcagggactcacggacaactcggtgagcgcgtgcccgtccgtccccggccactctcgcccgtgctgggcccggccactaagtcccctccccgcccccgcagaggttccgggccctgtgctcccgcgacaggttgctggcttcgtttggggacagagtggtccggctgagcaccgccaacacctactcctaccacaaagtggacttgcccttccaggagtatgtggagcagctgctgcacccccaggaccccacctccctgggcaatgacaccctgtacttcttcggggacaacaacttcaccgagtgggcctctctctttcggcactactccccacccccatttggcctgctgggaaccgctccagcttacagctttggaatcgcaggagctggctcgggggtgcccttccactggcatggacccgggtactcagaagtgatctacggtcgtaagcgctggttcctttacccacctgagaagacgccagagttccaccccaacaagaccacgctggcctggctccgggacacatacccagccctgccaccgtctgcacggcccctggagtgtaccatccgggctggtgaggtgctgtacttccccgaccgctggtggcatgctacgctcaaccttgacaccagcgtcttcatctccaccttcctcggctagccaaaacagctggcaggactgccggtcacacaccagcacgtcccacctcgtgctcacggattttattacacagatagtggcggcaatggcctcagcccagcccaccctcacctgcttttccagcccacaaagggggacgatcacggcccagcaaaagcgatgctgagaggggaaacagtccagagtccaacagcagaacttgggggaagcggtcggggtggccaggaacataaactatgtataggggccgggggcttctgcccagggctcccctggaccaggacgccaggtagggcagggaacctcagtagtcctccacccagccattctcagagatgaatgcgtcaataacctccttcatagccaagttggggatgagctgttcctgggtcagggggctccgggtcacggggtcaaaatgacccacacgctgcagtgacaagaagggcagagggcagtcatggggcccaggaccatgccactggccctgctcccccagccgcagcctcacctgcaggtgctcctcgatgtccttgcggtcgtaggtgatgccactgggcgtgatgcacggctcccgcatcagctcaaagctgatcttgccacacaggtagtcggggatgtctcgcttctgtggcacaggggcacacggtcagaggctgaaaaggggcactgcacgagcacctgccagccatcggcagcaagcgacacacactcaccttcctcttctcatccacctgagaaaaaagctcgtccatgtccgccatgtacttgtcctgtgaagagttgagtgctgtgcttgggggagacaccccacctccctcctccatggggcacagacccaacacaaggcggggatgctcccacgccacgtgcacacacacagacccacatgtgggtggggggcaccctcacgtgcttggcctcaatgcaggcctgctgggcccggacgtggctgtcgtcctcatcaccctcgtggtttcgctggcactcttccagctccctgggggttgaccaggagccggtcagagatggacctggccagatgtctgaccacaccccaatctcagagctaacatccacacttccccacatttcctgcttgccagtaaagccttcgataaac

SEQ ID NO: 376114 - DNA, 2131 bp, Homo sapiens
aggtcacttccggggtccgtcccggttcccggccgttgccacgacgacgaagctgccggccaatggctggcggatgggcccaaggttcccggcgtgcagcgcggctgcctgagggcggcaggctcatggcgccggcgtcgcggttgctcgcgctctgggcgctggcggctgtggctctacccggctccggggcggagggcgacggcgggtggcgcccgggcgggccgggggccgtggcggaggaggagcgctgcacggtggagcgtcgggccgacctcacctacgcggagttcgtgcagcagtacgccttcgtcaggcccgtcatcctgcagggactcacggacaactcgaggttccgggccctgtgctcccgcgacaggttgctggcttcgtttggggacagagtggtccggctgagcaccgccaacacctactcctaccacaaagtggacttgcccttccaggagtatgtggagcagctgctgcacccccaggaccccacctccctgggcaatggtgaggcagccctaggcggcggtagggggtggggacgcttggagtctccaggtgccaggatccctgtccccgccgtctctgttggcagacaccctgtacttcttcggggacaacaacttcaccgagtgggcctctctctttcggcactactccccacccccatttggcctgctgggaaccgctccagcttacagctttggaatcgcaggagctggctcgggggtgcccttccactggcatggacccgggtactcagaagtgatctacggtcgtaagcgctggttcctttacccacctgagaagacgccagagttccaccccaacaagaccacgctggcctggctccgggacacatacccagccctgccaccgtctgcacggcccctggagtgtaccatccgggctggtgaggtgctgtacttccccgaccgctggtggcatgctacgctcaaccttgacaccagcgtcttcatctccaccttcctcggctagccaaaacagctggcaggactgccggtcacacaccagcacgtcccacctcgtgctcacggattttattacacagatagtggcggcaatggcctcagcccagcccaccctcacctgcttttccagcccacaaagggggacgatcacggcccagcaaaagcgatgctgagaggggaaacagtccagagtccaacagcagaacttgggggaagcggtcggggtggccaggaacataaactatgtataggggccgggggcttctgcccagggctcccctggaccaggacgccaggtagggcagggaacctcagtagtcctccacccagccattctcagagatgaatgcgtcaataacctccttcatagccaagttggggatgagctgttcctgggtcagggggctccgggtcacggggtcaaaatgacccacacgctgcagtgacaagaagggcagagggcagtcatggggcccaggaccatgccactggccctgctcccccagccgcagcctcacctgcaggtgctcctcgatgtccttgcggtcgtaggtgatgccactgggcgtgatgcacggctcccgcatcagctcaaagctgatcttgccacacaggtagtcggggatgtctcgcttctgtggcacaggggcacacggtcagaggctgaaaaggggcactgcacgagcacctgccagccatcggcagcaagcgacacacactcaccttcctcttctcatccacctgagaaaaaagctcgtccatgtccgccatgtacttgtcctgtgaagagttgagtgctgtgcttgggggagacaccccacctccctcctccatggggcacagacccaacacaaggcggggatgctcccacgccacgtgcacacacacagacccacatgtgggtggggggcaccctcacgtgcttggcctcaatgcaggcctgctgggcccggacgtggctgtcgtcctcatcaccctcgtggtttcgctggcactcttccagctccctgggggttgaccaggagccggtcagagatggacctggccagatgtctgaccacaccccaatctcagagctaacatccacacttccccacatttcctgcttgccagtaaagccttcgataaac

SEQ ID NO: 376115 - DNA, 2210 bp, Homo sapiens
aggtcacttccggggtccgtcccggttcccggccgttgccacgacgacgaagctgccggccaatggctggcggatgggcccaaggttcccggcgtgcagcgcggctgcctgagggcggcaggctcatggcgccggcgtcgcggttgctcgcgctctgggcgctggcggctgtggctctacccggctccggggcggagggcgacggcgggtggcgcccgggcgggccgggggccgtggcggaggaggagcgctgcacggtggagcgtcgggccgacctcacctacgcggagttcgtgcagcagtacgccttcgtcaggcccgtcatcctgcagggactcacggacaactcggtgagcgcgtgcccgtccgtccccggccactctcgcccgtgctgggcccggccactaagtcccctccccgcccccgcagaggttccgggccctgtgctcccgcgacaggttgctggcttcgtttggggacagagtggtccggctgagcaccgccaacacctactcctaccacaaagtggacttgcccttccaggagtatgtggagcagctgctgcacccccaggaccccacctccctgggcaatggtgaggcagccctaggcggcggtagggggtggggacgcttggagtctccaggtgccaggatccctgtccccgccgtctctgttggcagacaccctgtacttcttcggggacaacaacttcaccgagtgggcctctctctttcggcactactccccacccccatttggcctgctgggaaccgctccagcttacagctttggaatcgcaggagctggctcgggggtgcccttccactggcatggacccgggtactcagaagtgatctacggtcgtaagcgctggttcctttacccacctgagaagacgccagagttccaccccaacaagaccacgctggcctggctccgggacacatacccagccctgccaccgtctgcacggcccctggagtgtaccatccgggctggtgaggtgctgtacttccccgaccgctggtggcatgctacgctcaaccttgacaccagcgtcttcatctccaccttcctcggctagccaaaacagctggcaggactgccggtcacacaccagcacgtcccacctcgtgctcacggattttattacacagatagtggcggcaatggcctcagcccagcccaccctcacctgcttttccagcccacaaagggggacgatcacggcccagcaaaagcgatgctgagaggggaaacagtccagagtccaacagcagaacttgggggaagcggtcggggtggccaggaacataaactatgtataggggccgggggcttctgcccagggctcccctggaccaggacgccaggtagggcagggaacctcagtagtcctccacccagccattctcagagatgaatgcgtcaataacctccttcatagccaagttggggatgagctgttcctgggtcagggggctccgggtcacggggtcaaaatgacccacacgctgcagtgacaagaagggcagagggcagtcatggggcccaggaccatgccactggccctgctcccccagccgcagcctcacctgcaggtgctcctcgatgtccttgcggtcgtaggtgatgccactgggcgtgatgcacggctcccgcatcagctcaaagctgatcttgccacacaggtagtcggggatgtctcgcttctgtggcacaggggcacacggtcagaggctgaaaaggggcactgcacgagcacctgccagccatcggcagcaagcgacacacactcaccttcctcttctcatccacctgagaaaaaagctcgtccatgtccgccatgtacttgtcctgtgaagagttgagtgctgtgcttgggggagacaccccacctccctcctccatggggcacagacccaacacaaggcggggatgctcccacgccacgtgcacacacacagacccacatgtgggtggggggcaccctcacgtgcttggcctcaatgcaggcctgctgggcccggacgtggctgtcgtcctcatcaccctcgtggtttcgctggcactcttccagctccctgggggttgaccaggagccggtcagagatggacctggccagatgtctgaccacaccccaatctcagagctaacatccacacttccccacatttcctgcttgccagtaaagccttcgataaac

SEQ ID NO: 376116 - DNA, 1908 bp, Homo sapiens
aggtcacttccggggtccgtcccggttcccggccgttgccacgacgacgaagctgccggccaatggctggcggatgggcccaaggttcccggcgtgcagcgcggctgcctgagggcggcaggctcatggcgccggcgtcgcggttgctcgcgctctgggcgctggcggctgtggctctacccggctccggggcggagggcgacggcgggtggcgcccgggcgggccgggggccgtggcggaggaggagcgctgcacggtggagcgtcgggccgacctcacctacgcggagttcgtgcagcagtacgccttcgtcaggcccgtcatcctgcagggactcacggacaactcgaggttccgggccctgtgctcccgcgacaggttgctggcttcgtttggggacagagtggtccggctgagcaccgccaacacctactcctaccacaaagtggacttgcccttccaggagtatgtggagcagctgctgcacccccaggaccccacctccctgggcaatgacaccctgtacttcttcggggacaacaacttcaccgagtgggcctctctctttcggcactactccccacccccatttggcctgctgggaaccgctccagcttacagctttggaatcgcaggagctggctcgggggtgcccttccactggcatggacccgggtactcagaagtgatctacggtcgtaaggtgctgtacttccccgaccgctggtggcatgctacgctcaaccttgacaccagcgtcttcatctccaccttcctcggctagccaaaacagctggcaggactgccggtcacacaccagcacgtcccacctcgtgctcacggattttattacacagatagtggcggcaatggcctcagcccagcccaccctcacctgcttttccagcccacaaagggggacgatcacggcccagcaaaagcgatgctgagaggggaaacagtccagagtccaacagcagaacttgggggaagcggtcggggtggccaggaacataaactatgtataggggccgggggcttctgcccagggctcccctggaccaggacgccaggtagggcagggaacctcagtagtcctccacccagccattctcagagatgaatgcgtcaataacctccttcatagccaagttggggatgagctgttcctgggtcagggggctccgggtcacggggtcaaaatgacccacacgctgcagtgacaagaagggcagagggcagtcatggggcccaggaccatgccactggccctgctcccccagccgcagcctcacctgcaggtgctcctcgatgtccttgcggtcgtaggtgatgccactgggcgtgatgcacggctcccgcatcagctcaaagctgatcttgccacacaggtagtcggggatgtctcgcttctgtggcacaggggcacacggtcagaggctgaaaaggggcactgcacgagcacctgccagccatcggcagcaagcgacacacactcaccttcctcttctcatccacctgagaaaaaagctcgtccatgtccgccatgtacttgtcctgtgaagagttgagtgctgtgcttgggggagacaccccacctccctcctccatggggcacagacccaacacaaggcggggatgctcccacgccacgtgcacacacacagacccacatgtgggtggggggcaccctcacgtgcttggcctcaatgcaggcctgctgggcccggacgtggctgtcgtcctcatcaccctcgtggtttcgctggcactcttccagctccctgggggttgaccaggagccggtcagagatggacctggccagatgtctgaccacaccccaatctcagagctaacatccacacttccccacatttcctgcttgccagtaaagccttcgataaac

SEQ ID NO: 376117 - DNA, 1879 bp, Homo sapiens
aggtcacttccggggtccgtcccggttcccggccgttgccacgacgacgaagctgccggccaatggctggcggatgggcccaaggttcccggcgtgcagcgcggctgcctgagggcggcaggctcatggcgccggcgtcgcggttgctcgcgctctgggcgctggcggctgtggctctacccggctccggggcggagggcgacggcgggtggcgcccgggcgggccgggggccgtggcggaggaggagcgctgcacggtggagcgtcgggccgacctcacctacgcggagttcgtgcagcagtacgccttcgtcaggcccgtcatcctgcagggactcacggacaactcgaggttccgggccctgtgctcccgcgacaggttgctggcttcgtttggggacagagtggtccggctgagcaccgccaacacctactcctaccacaaagtggacttgcccttccaggagtatgtggagcagctgctgcacccccaggaccccacctccctgggcaatgacaccctgtacttcttcggggacaacaacttcaccgagtgggcctctctctttcggcactactccccacccccatttggcctgctgggaaccgctccagcttacagctttggaatcgcaggagctggctcgggggtgcccttccactggcatggacccgggtactcagaagtgatctacggtcgtaagcgctggttcctttacccacctgagaagacgccagagttccaccccaacaagaccacgctggcctggctccgggacacatacccagccctgccaccgtctgcacggcccctggagtgtaccatccgggctggtgaggtgctgtacttccccgaccgctggtggcatgctacgctcaaccttgacaccagcgtcttcatctccaccttcctcggctagccaaaacagctggcaggactgccggtcacacaccagcacgtcccacctcgtgctcacggattttattacacagatagtggcggcaatggcctcagcccagcccaccctcacctgcttttccagcccacaaagggggacgatcacggcccagcaaaagcgatgctgagaggggaaacagtccagagtccaacagcagaacttgggggaagcggtcggggtggccaggaacataaactatgtataggggccgggggcttctgcccagggctcccctggaccaggacgccaggtagggcagggaacctcagtagtcctccacccagccattctcagagatgaatgcgtcaataacctccttcatagccaagttggggatgagctgttcctgggtcagggggctccgggtcacggggtcaaaatgacccacacgctgcagtgacaagaagggcagagggcagtcatggggcccaggaccatgccactggccctgctcccccagccgcagcctcacctgcaggtgctcctcgatgtccttgcggtcgtaggtgatgccactgggcgtgatgcacggctcccgcatcagctcaaagctgatcttgccacacaggtagtcggggatgtctcgcttctgtggcacaggggcacacggtcagaggctgaaaaggggcactgcacgagcacctgccagccatcggcagcaagcgacacacactcaccttcctcttctcatccacctgagaaaaaagctcgtccatgtccgccatgtacttgtcctgtgaagagttgagtgctgtgcttggggggaagactacccccaagcgtccccttcctcccatggggagcaacaagaaccccaagacaccaacgggcggggggaattgcgttcccacaaccgggctccaacggggttgggcccaagaccaagaccaaaccacaacacaggggataacacaccccaa

SEQ ID NO: 376118 - DNA, 450 bp, Homo sapiens
gagacggagttttactcttttggcccaggctggagtgcaagggcgcaatctcggctcaccgaaacctccacctctcgggttcaagcgattctcctgcctcagcctcccgagtagctgggattaccggcatgcaccaccatgcccggctaatttcgtatttttagtagacagggtttctccacgttggtcaggctggtctccaactcccaacctcaggtgatccgcccgcctcagcctcccaaagtgctgggattacaggtgtgagccaccgtgcccagcctatctttttattaacctctaatacctaaaacctactacaattccgggagcatagcaatcgctagatctggtctggaagatctctgagtaactaactagctttttaataaaatgctttgttttgtaccatgtcgaggtaccaggacttgactttatgagcctcttatgaat

SEQ ID NO: 376119 - DNA, 301 bp, Homo sapiens
agctattgtttctacctcaccctggcccaggaagacagatctactgaggaaagccctgaacactctgcggcttctctgagaaaccctatcgaaggggatgtggaatcccagagctactcttgctatcaactcgccgcatgaccttgggaaaatcatttcacctggttcagcaatgatttactgagctattgaaggccttactttccagatccagtggcaggacatgaaggggacagagcgaaaaccctcagcccacatttactactagtaagccatgaaataaacaagtcctgaccatcct

SEQ ID NO: 376120 - DNA, 1257 bp, Homo sapiens
agctattgtttctacctcaccctggcccaggaagacagatctactgaggaaagccctgaacactctgcggcttctctgagaaaccctatcgaaggggatgtggaatcccagagctactcttgctatcaactcgccgcatgaccttgggaaaatcatttcacctggttcagcaatgatttactgagctattgaaggccttactttccagatccagatccttgtgcatacaactgacttgtgtgggtgaggcttgcagaaaaaatcagctagaacagccttgggggtagtggcaaggtggccagagcaattgactgggagctgggaacaggaatgaagaggaagagctgataagaaacatgcccagagcagattttgatggctactgccaatgttacctggaataagaagacaactctttctggaaaaagggaaaacttgaagggctattgaaggccgctagaaagtacagaaggaactttggatgtgggagagaaagacaaggagaaacctgaaagcagcccagttatgacaatgaatgttctggaggctgggaagtggaagagcattgtgccagcacctggtgagggccttcttgccgtgttacacatgatggtttttactgatgccctgcacagagagaggtctgtaaagtggcaagcaggagtctgctacaatggaggaaaggattttgctgtatctcttgccaggcccaaggctgcagagggaattgcagattgaatgtaagtgacttggaaaaggaagaggagttgccagaaacagctaaaatgtcagtagaagacttgacagcttgagaatagaggaaaaaataaaagcgaagcagacaaaaagaaccttacctcccccacaatacaacattgggctgctgaacccacaaaaatctaaatccgtttagaatcatctatttaactcctcagagacatgcacaaactattctagagaggcttgtgcctacgaagattacttaagaatgtgttgacacatttggagggggttaatttaccagttatcatttactagaaaggctttttctataagaatatatgaaagagtttcctcggagcattcaaccgggcttctttgtagggtatgtgtactgcttggagctacggaagaccacgtcctagaagtgctgtgtccctgaggcacacctatgtgtgttatctctctggcatactttccaacaaggattcttttctagtctatacattctgattaatttgcagtcagaggcaatgc

SEQ ID NO: 376121 - DNA, 503 bp, Homo sapiens
agctgcaccacctggtggatgaggagaaggcccgctgcctggaggggatagggggtcacacccgtggcctggtggcctccctggacatgcagctggagcaggcccagggaacccgggagcggctggcccaagccgagtgtgtgctggaacagttcggcaatgaggaccaccacaagttcatccggaagttccactccatggcctccagagcagagatgccgcaggcccggcccttagaaggcgcattcagccccatctccttcaagccaggcctccaccaggctgacatcaagctgaccgtgtggaaaaggctcttccggaaagttttgccagccccggagcctctcaagttggaccctgccactgcccacccactcctggagctctccaagggcaacacggtggtgcagtgcgggcttctggcccagcggcgagccagccagcctgagcgcttcgactacagcacctgcgtcctggccagccgcggcttctcctgcggccgc

SEQ ID NO: 376122 - DNA, 548 bp, Homo sapiens
gaccattttccaaccaacactgctggtccccaaacctgcactctagaagcaccactatagagcgtttccccttctaggaaggagatgggtcctccctgaaggggctgtgcaggggaggggatgatgggcattgatgggcattgtgactgcagtcctgcactgtggatctggctgggcaaacatagataggatggaggggtggggtgggccacgtgatacctcactctcttgtactgtgaactgtcacctgcagagcagagatgccgcaggcccggcccttagaaggcgcattcagccccatctccttcaagccaggcctccaccaggctgacatcaagctgaccgtgtggaaaaggctcttccggaaagttttgccagccccggagcctctcaagttggaccctgccactgcccacccactcctggagctctccaagggcaacacggtggtgcagtgcgggcttctggcccagcggcgagccagccagcctgagcgcttcgactacagcacctgcgtcctggccagccgcggcttctcctgcggccgc

SEQ ID NO: 376123 - DNA, 407 bp, Homo sapiens
atcagtctgtgattgatcttccttatgtaaaacttcattcattcattcattcattcattcattcattcattcattcagggagcagccctgtactggccccttctagaccctggggctagagagatgaggaagacacagcccctctccttggggagttcagggcctccatcagcttctgtgggccgggtctgctgccctccacgtggcctcacagaccctctgtgatctccctcccagccccggagcctctcaagttggaccctgccactgcccacccactcctggagctctccaagggcaacacggtggtgcagtgcgggcttctggcccagcggcgagccagccagcctgagcgcttcgactacagcacctgcgtcctggccagccgcggcttctcctgcggccgc

SEQ ID NO: 376124 - DNA, 662 bp, Homo sapiens
agctgcaccacctggtggatgaggagaaggcccgctgcctggaggggatagggggtcacacccgtggcctggtggcctccctggacatgcagctggagcaggcccagggaacccgggagcggctggcccaagccgagtgtgtgctggaacagttcggcaatgaggaccaccacaagttcatccggaagttccactccatggcctccagagcagagatgccgcaggcccggcccttagaaggcgcattcagccccatctccttcaagccaggcctccaccaggctgacatcaagctgaccgtgtggaaaaggctcttccggaaagttttgccagggagcagccctgtactggccccttctagaccctggggctagagagatgaggaagacacagcccctctccttggggagttcagggcctccatcagcttctgtgggccgggtctgctgccctccacgtggcctcacagaccctctgtgatctccctcccagccccggagcctctcaagttggaccctgccactgcccacccactcctggagctctccaagggcaacacggtggtgcagtgcgggcttctggcccagcggcgagccagccagcctgagcgcttcgactacagcacctgcgtcctggccagccgcggcttctcctgcggccgc

SEQ ID NO: 376125 - DNA, 494 bp, Homo sapiens
cacaccctggcatccacctttcctcctcttccaagataccagcctggcagctgcgattcagccacctcgtggggtatggtgctagatattactcttacctcatgtccagagcggtcgcctccatggtttggaaggagtgttttctacaggatcctttcaacagggctgccggggagcgctatcgcagggagatgctggcccacggtggaggcagggagcccatgctcatggttgaaggtatgcttcagaagtgtccttctgttgatgacttcgtaagtgccctcgtttccgacttggatctggacttcgaaactttcctcatggattctgaataaaagaaacactctacacctcttaaatcaaggtcatgtagataatgactttgttataaatgctacagctgtgagagcttgtttctgatttcattgttcgcttctgtaattctgaaaaactttaaactggtagaacttggaataaataatttgttttaatta

SEQ ID NO: 376126 - DNA, 468 bp, Homo sapiens
agaaaataggggccaaattgtcacatggtggcagcttttatgaatatggcatcagtgtggctttctttgagaattcaagacaagtgtgaatggaggctgtgcaagcaggagtctgtaacagaacctctcttccccagggctgccggggagcgctatcgcagggagatgctggcccacggtggaggcagggagcccatgctcatggttgaaggtatgcttcagaagtgtccttctgttgatgacttcgtaagtgccctcgtttccgacttggatctggacttcgaaactttcctcatggattctgaataaaagaaacactctacacctcttaaatcaaggtcatgtagataatgactttgttataaatgctacagctgtgagagcttgtttctgatttcattgttcgcttctgtaattctgaaaaactttaaactggtagaacttggaataaataatttgttttaatta

SEQ ID NO: 376127 - DNA, 661 bp, Homo sapiens
ttgtaaagtgtatagaacttgataacaaaacttgatatgtaattaaacttgttaaattgtgaatcatcccagtcaaagataactaaaaaaaaatcagtcttctaatatcagtctctaagggtatagtcatatatgcaaaaataatagcccttaggaaatatatttaggcctaaatctctaagctaaggatggatttgatagtaaaaatacattaaaattataaatagctccaaggcccacacactgcccatgactttataaaatgttcttgcattcaggttatacagccagagtcttaattcagaaagccagagtgttcctctagtgtgtggatttgattttgtgtctttgtgcttcctgttgcctcctggtgaacgcagttctgacctttcctttgtttgcaggtatgcttcagaagtgtccttctgttgatgacttcgtaagtgccctcgtttccgacttggatctggacttcgaaactttcctcatggattctgaataaaagaaacactctacacctcttaaatcaaggtcatgtagataatgactttgttataaatgctacagctgtgagagcttgtttctgatttcattgttcgcttctgtaattctgaaaaactttaaactggtagaacttggaataaataatttgttttaatta

SEQ ID NO: 376128 - DNA, 2741 bp, Homo sapiens
acccggaagcggggccgtcacgtggggcggcgtgggctgctgccttggaaacgcggagcgcgcgctcccagcgaaagcagcagggcagggatctgcgttggaggaagggactgctctggtgctagaatgctgtgcgtcggaaggctgggcggcttgggagccagagcagcagctctgccgccccgccgggcgggccggggaagcctcgaagccgggatccgggcccgaagggtcagcaccagctggtctcccgtgggcgccgccttcaatgtcaagccccagggcagccgcttggacctgttcggcgagcgccggggtctttttggagttcctgagctgagtgccccagaaggatttcatattgcacaagaaaaagccttgagaaagacagaattgcttgtggaccgtgcatgttccaccccacctgggccccagaccgtgctgatcttcgatgagctctcggattccttatgcagagtggccgacttggctgattttgtgaaaatcgctcaccctgagccagcattcagagaagctgcggaagaagcttgtagaagtattggcaccatggtagagaagttgaacacaaatgtggatttatatcaaagtttgcaaaaattactagctgataaaaaacttgtggattcccttgatccagaaacaaggcgagtggctgaactgtttatgtttgattttgaaattagtggaatccatctagacaaagaaaagcgtaaaagagcagtggacctcaatgttaaaatcttggatttgagtagtacatttcttatgggaaccaattttcccaacaagattgagaagcatctcttaccagaacacattcgtcgtaactttacatctgctggggatcatatcataattgatggtctccacgcagaatcaccagatgacttggtgcgagaagctgcttataaaatttttctttatcccaatgctggtcaattgaaatgtttagaagaattgctcagcagcagagatcttctggcaaagttggtggggtattccacgttttctcacagggctctccaaggaacgatagctaaaaatccagagactgtcatgcagttccttgaaaaactatctgacaaactttctgaaagaactctgaaagattttgagatgatacgagggatgaaaatgaaactgaatcctcaaaattccgaagtaatgccctgggaccccccttactacagtggtgtgattcgtgcagaaaggtataatattgagcccagcctatattgcccgtttttctctcttggagcatgcatggaaggcctgaatattttgcttaacagactgttggggatttcattatatgcagagcagcctgcaaaaggagaggtgtggagcgaagatgtccgaaaactggctgttgttcatgaatctgaaggattgttggggtacatttactgtgatttttttcagcgagcagacaaaccacatcaggattgccatttcactatccgtggaggcagactaaaggaagatggagactatcaactcccagttgtagttcttatgctgaatcttccccgttcctcaaggagttctccaactttgctaactcctggcatgatggaaaatcttttccatgaaatgggacatgccatgcattcaatgctaggacgtactcgttaccaacacgtcactgggaccaggtgccctactgattttgctgaggttccttctattctgatggagtactttgcaaatgattatcgagtagttaaccaatttgccagacattatcagactggacagccactgccaaaaaatatggtgtctcgtctttgtgaatctaaaaaggtttgtgctgcagctgatatgcaacttcaggtcttttatgccactctggatcaaatctaccatgggaagcatcccctgaggaattcaaccacagacattctcaaggaaacacaagagaaattctatggcctaccatatgttccaaatactgcctggcagctgcgattcagccacctcgtggggtatggtgctagatattactcttacctcatgtccagagcggtcgcctccatggtttggaaggagtgttttctacaggatcctttcaacagggctgccggggagcgctatcgcagggagatgctggcccacggtggaggcagggagcccatgctcatggttgaaggtatgcttcagaagtgtccttctgttgatgacttcgtaagtgccctcgtttccgacttggatctggacttcgaaactttcctcatggattctgaataaaagaaacactctacacctcttaaatcaaggtcatgtagataatgactttgttataaatgctacagctgtgagagcttgtttctgatttcattgttcgcttctgtaattctgaaaaactttaaactggtagaacttggaataaataatttgttttaattaaaaaaactaaaacacctcgttatgggtgatccagtctccctcgaagactcgtcgatgaattactgccaccccccaatcccgccgccgcccccccgcgaggagtcctgccgcatcttcccttgcggatgattaatatggaaccccccaactccccctcgtccccccactacttgtagggtgacgacgccgcaacccattcaaggaggccctcgggtaccccgaacccccgccgacccccaaacaacattcctccaaagaccctcccctgtacgcgccccccatttaccactttagcgaactcctaactcaccccg

SEQ ID NO: 376129 - DNA, 2349 bp, Homo sapiens
acccggaagcggggccgtcacgtggggcggcgtgggctgctgccttggaaacgcggagcgcgcgctcccagcgaaagcagcagggcagggatctgcgttggaggaagggactgctctggtgctagaatgctgtgcgtcggaaggctgggcggcttgggagccagagcagcagctctgccgccccgccgggcgggccggggaagcctcgaagccgggatccgggcccgaagggtcagcaccagctggtctcccgtgggcgccgccttcaatgtcaagccccagggcagccgcttggacctgttcggcgagcgccggggtctttttggagttcctgagctgagtgccccagaaggatttcatattgcacaagaaaaagccttgagaaagacagaattgcttgtggaccgtgcatgttccaccccacctgggccccagaccgtgctgatcttcgatgagctctcggattccttatgcagagtggccgacttggctgattttgtgaaaatcgctcaccctgagccagcattcagagaagctgcggaagaagcttgtagaagtattggcaccatggtagagaagttgaacacaaatgtggatttatatcaaagtttgcaaaaattactagctgataaaaaacttgtggattcccttgatccagaaacaaggcgagtggctgaactgtttatgtttgattttgaaattagtggaatccatctagacaaagaaaagcgtaaaagagcagtggacctcaatgttaaaatcttggatttgagtagtacatttcttatgggaaccaattttcccaacaagattgagaagcatctcttaccagaacacattcgtcgtaactttacatctgctggggatcatatcataattgatggtctccacgcagaatcaccagatgacttggtgcgagaagctgcttataaaatttttctttatcccaatgctggtcaattgaaatgtttagaagaattgctcagcagcagagatcttctggcaaagttggtggggtattccacgttttctcacagggctctccaaggaacgatagctaaaaatccagagactgtcatgcagttccttgaaaaactatctgacaaactttctgaaagaactctgaaagattttgagatgatacgagggatgaaaatgaaactgaatcctcaaaattccgaagtaatgccctgggaccccccttactacagtggtgtgattcgtgcagaaaggtataatattgagcccagcctatattgcccgtttttctctcttggagcatgcatggaaggcctgaatattttgcttaacagactgttggggatttcattatatgcagagcagcctgcaaaaggagaggtgtggagcgaagatgtccgaaaactggctgttgttcatgaatctgaaggattgttggggtacatttactgtgatttttttcagcgagcagacaaaccacatcaggattgccatttcactatccgtggaggcagactaaaggaagatggagactatcaactcccagttgtagttcttatgctgaatcttccccgttcctcaaggagttctccaactttgctaactcctggcatgatggaaaatcttttccatgaaatgggacatgccatgcattcaatgctaggacgtactcgttaccaacacgtcactgggaccaggtgccctactgattttgctgaggttccttctattctgatggagtactttgcaaatgattatcgagtagttaaccaatttgccagacattatcagactggacagccactgccaaaaaatatggtgtctcgtctttgtgaatctaaaaaggtttgtgctgcagctgatatgcaacttcaggtcttttatgccactctggatcaaatctaccatgggaagcatcccctgaggaattcaaccacagacattctcaaggaaacacaagagaaattctatggcctaccatatgttccaaatactgcctggcagctgcgattcagccacctcgtggggtatggtgctagatattactcttacctcatgtccagagcggtcgcctccatggtttggaaggagtgttttctacaggatcctttcaacagggctgccggggagcgctatcgcagggagatgctggcccacggtggaggcagggagcccatgctcatggttgaaggtatgcttcagaagtgtccttctgttgatgacttcgtaagtgccctcgtttccgacttggatctggacttcgaaactttcctcatggattctgaataaaagaaacactctacacctcttaaataagttaaccgcagatatactttgcatatgaccgctggtgcgggggggggttgtgtt

SEQ ID NO: 376130 - DNA, 1592 bp, Homo sapiens
acccggaagcggggccgtcacgtggggcggcgtgggctgctgccttggaaacgcggagcgcgcgctcccagcgaaagcagcagggcagggatctgcgttggaggaagggactgctctggtgctagaatgctgtgcgtcggaaggctgggcggcttgggagccagagcagcagctctgccgccccgccgggcgggccggggaagcctcgaagccgggatccgggcccgaagggtcagcaccagctggtctcccgtgggcgccgccttcaatgtcaagccccagggcagccgcttggacctgttcggcgagcgccggggtctttttggagttcctgagctgagtgccccagaaggatttcatattgcacaagaaaaagccttgagaaagacagaattgcttgtggaccgtgcatgttccaccccacctgggccccagaccgtgctgatcttcgatgagctctcggattccttatgcagagtggccgacttggctgattttgtgaaaatcgctcaccctgagccagcattcagagaagctgcggaagaagcttgtagaagtattggcaccatggtagagaagttgaacacaaatgtggatttatatcaaagtttgcaaaaattactagctgataaaaaacttgtggattcccttgatccagaaacaaggcgagtggctgaactgtttatgtttgattttgaaattagtggaatccatctagacaaagaaaagcgtaaaagagcagtggacctcaatgttaaaatcttggatttgagtagtacatttcttatgggaaccaattttcccaacaagattgagaagcatctcttaccagaacacattcgtcgtaactttacatctgctggggatcatatcataattgatggtctccacgcagaatcaccagatgacttggtgcgagaagctgcttataaaatttttctttatcccaatgctggtcaattgaaatgtttagaagaattgctcagcagcagagatcttctggcaaagttggtggggtattccacgttttctcacagggctctccaaggaacgatagctaaaaatccagagactgtcatgcagttccttgaaaaactatctgacaaactttctgaaagaactctgaaagattttgagatgatacgagggatgaaaatgaaactgaatcctcaaaattccgaagtaatgccctgggaccccccttactacagtggtgtgattcgtgcagaaaggtataatattgagcccagcctatattgcccgtttttctctcttggagcatgcatggaaggcctgaatattttgcttaacagactgttggggatttcattatatgtatgcttcagaagtgtccttctgttgatgacttcgtaagtgccctcgtttccgacttggatctggacttcgaaactttcctcatggattctgaataaaagaaacactctacacctcttaaatcaaggtcatgtagataatgactttgttataaatgctacagctgtgagagcttgtttctgatttcattgttcgcttctgtaattctgaaaaactttaaactggtagaacttggaataaataatttgttttaatta

SEQ ID NO: 376131 - DNA, 460 bp, Homo sapiens
ctgggagctgcattgtggtgttttcaaattcaagggttataatttgcttgggcgtatatcacgacattccaggatttgaaggaaaaataatttgctcctaaaattgtccagccagcacttcttcccagctcttgtgggtggttagtaaaggtattgtagaggataggcagtcaggacaaaaggccctcatgaggaggatttcctgtcctggacacagaattccaaaaccaaaatcattcaagagatggagcagaagaggatgcggggaaaagagaatctatctcgagataatgtggggtgtagaatgtaattaaaatgtctatatgtgtggctatggatgtttaatatacagattcttgtgttagggattttagagaatcagatggcctcatttaccaccaaatttaaatttttttttctaggctgttgttcatgaatctgaaggattgttggggtacat

SEQ ID NO: 376132 - DNA, 2427 bp, Homo sapiens
acccggaagcggggccgtcacgtggggcggcgtgggctgctgccttggaaacgcggagcgcgcgctcccagcgaaagcagcagggcagggatctgcgttggaggaagggactgctctggtgctagaatgctgtgcgtcggaaggctgggcggcttgggagccagagcagcagctctgccgccccgccgggcgggccggggaagcctcgaagccgggatccgggcccgaagggtcagcaccagctggtctcccgtgggcgccgccttcaatgtcaagccccagggcagccgcttggacctgttcggcgagcgccggggtctttttggagttcctgagctgagtgccccagaaggatttcatattgcacaagaaaaagccttgagaaagacagaattgcttgtggaccgtgcatgttccaccccacctgggccccagaccgtgctgatcttcgatgagctctcggattccttatgcagagtggccgacttggctgattttgtgaaaatcgctcaccctgagccagcattcagagaagctgcggaagaagcttgtagaagtattggcaccatggtagagaagttgaacacaaatgtggatttatatcaaagtttgcaaaaattactagctgataaaaaacttgtggattcccttgatccagaaacaaggcgagtggctgaactgtttatgtttgattttgaaattagtggaatccatctagacaaagaaaagcgtaaaagagcagtggacctcaatgttaaaatcttggatttgagtagtacatttcttatgggaaccaattttcccaacaagattgagaagcatctcttaccagaacacattcgtcgtaactttacatctgctggggatcatatcataattgatggtctccacgcagaatcaccagatgacttggtgcgagaagctgcttataaaatttttctttatcccaatgctggtcaattgaaatgtttagaagaattgctcagcagcagagatcttctggcaaagttggtggggtattccacgttttctcacagggctctccaaggaacgatagctaaaaatccagagactgtcatgcagttccttgaaaaactatctgacaaactttctgaaagaactctgaaagattttgagatgatacgagggatgaaaatgaaactgaatcctcaaaattccgaagtaatgccctgggaccccccttactacagtggtgtgattcgtgcagaaaggtataatattgagcccagcctatattgcccgtttttctctcttggagcatgcatggaaggcctgaatattttgcttaacagactgttggggatttcattatatgcagagcagcctgcaaaaggagaggtgtggagcgaagatgtccgaaaactggctgttgttcatgaatctgaaggattgttggggtacatttactgtgatttttttcagcgagcagacaaaccacatcaggattgccatttcactatccgtggaggcagactaaaggaagatggagactatcaactcccagttgtagttcttatgctgaatcttccccgttcctcaaggagttctccaactttgctaactcctggcatgatggaaaatcttttccatgaaatgggacatgccatgcattcaatgctaggacgtactcgttaccaacacgtcactgggaccaggtgccctactgattttgctgaggttccttctattctgatggagtactttgcaaatgattatcgagtagttaaccaatttgccagacattatcagactggacagccactgccaaaaaatatggtgtctcgtctttgtgaatctaaaaaggtttgtgctgcagctgatatgcaacttcaggtcttttatgccactctggatcaaatctaccatgggaagcatcccctgaggaattcaaccacagacattctcaaggaaacacaagagaaattctatggcctaccatatgttccaaatactgcctggcagctgcgattcagccacctcgtggggtatggtgctagatattactcttacctcatgtccagagcggtcgcctccatggtttggaaggagtgttttctacaggatcctttcaacagggctgccggggagcgctatcgcagggagatgctggcccacggtggaggcagggagcccatgctcatggttgaaggtatgcttcagaagtgtccttctgttgatgacttcgtaagtgccctcgtttccgacttggatctggacttcgaaactttcctcatggattctgaataaaagaaacactctacacctcttaaatcaaggtcatgtagataatgactttgttataaatgctacagctgtgagagcttgtttctgatttcattgttcgcttctgtaattctgaaaaactttaaactggtagaacttggaataaataatttgttttaatta

SEQ ID NO: 376133 - DNA, 2881 bp, Homo sapiens
acccggaagcggggccgtcacgtggggcggcgtgggctgctgccttggaaacgcggagcgcgcgctcccagcgaaagcagcagggcagggatctgcgttggaggaagggactgctctggtgctagaatgctgtgcgtcggaaggctgggcggcttgggagccagagcagcagctctgccgccccgccgggcgggccggggaagcctcgaagccgggatccgggcccgaagggtcagcaccagctggtctcccgtgggcgccgccttcaatgtcaagccccagggcagccgcttggacctgttcggcgagcgccgggtgagcggcgcaggaggagctcccctcagtccccgagctaagccgacccctgctccgcgcggccagcaacaatcagggcgagattgtttgggcctgggaggaggcgagcagcgaacccaccttttacagtggcgtcttgtgtgcgctctcgatgagggcaaggtcacctctgctttgaggggccgggtttagtggtctcctacccagagtgtcgggtccgggaactgcttctgcatgagccccttgctccacgtgaatctgaatagttcgttctggcagtggcggtgaattcgtcctgccaggacccgccctctgcatacactcaggcgcacccctgctaaagccctttagctccagcgctacagtcctgccttaagaggcctatccctgtgcgttcacaggcggcatcacatggtctttttgcaaggacacggctgcctgcagtcgagtaatgggtctttttggagttcctgagctgagtgccccagaaggatttcatattgcacaagaaaaagccttgagaaagacagaattgcttgtggaccgtgcatgttccaccccacctgggccccagaccgtgctgatcttcgatgagctctcggattccttatgcagagtggccgacttggctgattttgtgaaaatcgctcaccctgagccagcattcagagaagctgcggaagaagcttgtagaagtattggcaccatggtagagaagttgaacacaaatgtggatttatatcaaagtttgcaaaaattactagctgataaaaaacttgtggattcccttgatccagaaacaaggcgagtggctgaactgtttatgtttgattttgaaattagtggaatccatctagacaaagaaaagcgtaaaagagcagtggacctcaatgttaaaatcttggatttgagtagtacatttcttatgggaaccaattttcccaacaagattgagaagcatctcttaccagaacacattcgtcgtaactttacatctgctggggatcatatcataattgatggtctccacgcagaatcaccagatgacttggtgcgagaagctgcttataaaatttttctttatcccaatgctggtcaattgaaatgtttagaagaattgctcagcagcagagatcttctggcaaagttggtggggtattccacgttttctcacagggctctccaaggaacgatagctaaaaatccagagactgtcatgcagttccttgaaaaactatctgacaaactttctgaaagaactctgaaagattttgagatgatacgagggatgaaaatgaaactgaatcctcaaaattccgaagtaatgccctgggaccccccttactacagtggtgtgattcgtgcagaaaggtataatattgagcccagcctatattgcccgtttttctctcttggagcatgcatggaaggcctgaatattttgcttaacagactgttggggatttcattatatgcagagcagcctgcaaaaggagaggtgtggagcgaagatgtccgaaaactggctgttgttcatgaatctgaaggattgttggggtacatttactgtgatttttttcagcgagcagacaaaccacatcaggattgccatttcactatccgtggaggcagactaaaggaagatggagactatcaactcccagttgtagttcttatgctgaatcttccccgttcctcaaggagttctccaactttgctaactcctggcatgatggaaaatcttttccatgaaatgggacatgccatgcattcaatgctaggacgtactcgttaccaacacgtcactgggaccaggtgccctactgattttgctgaggttccttctattctgatggagtactttgcaaatgattatcgagtagttaaccaatttgccagacattatcagactggacagccactgccaaaaaatatggtgtctcgtctttgtgaatctaaaaaggtttgtgctgcagctgatatgcaacttcaggtcttttatgccactctggatcaaatctaccatgggaagcatcccctgaggaattcaaccacagacattctcaaggaaacacaagagaaattctatggcctaccatatgttccaaatactgcctggcagctgcgattcagccacctcgtggggtatggtgctagatattactcttacctcatgtccagagcggtcgcctccatggtttggaaggagtgttttctacaggatcctttcaacagggctgccggggagcgctatcgcagggagatgctggcccacggtggaggcagggagcccatgctcatggttgaaggtatgcttcagaagtgtccttctgttgatgacttcgtaagtgccctcgtttccgacttggatctggacttcgaaactttcctcatggattctgaataaaagaaacactctacacctcttaaatcaaggtcatgtagataatgactttgttataaatgctacagctgtgagagcttgtttctgatttcattgttcgcttctgtaattctgaaaaactttaaactggtagaacttggaataaataatttgttttaatta

SEQ ID NO: 376134 - DNA, 1023 bp, Homo sapiens
aaacatttatacaataactatcacttcaatcatccaaaataaaattcaagaagagtcttagattgccatttcactatccgtggaggcagactaaaggaagatggagactatcaactcccagttgtagttcttatgctgaatcttccccgttcctcaaggagttctccaactttgctaactcctggcatgatggaaaatcttttccatgaaatgggacatgccatgcattcaatgctaggacgtactcgttaccaacacgtcactgggaccaggtgccctactgattttgctgaggttccttctattctgatggagtactttgcaaatgattatcgagtagttaaccaatttgccagacattatcagactggacagccactgccaaaaaatatggtgtctcgtctttgtgaatctaaaaaggtttgtgctgcagctgatatgcaacttcaggtcttttatgccactctggatcaaatctaccatgggaagcatcccctgaggaattcaaccacagacattctcaaggaaacacaagagaaattctatggcctaccatatgttccaaatactgcctggcagctgcgattcagccacctcgtggggtatggtgctagatattactcttacctcatgtccagagcggtcgcctccatggtttggaaggagtgttttctacaggatcctttcaacagggctgccggggagcgctatcgcagggagatgctggcccacggtggaggcagggagcccatgctcatggttgaaggtatgcttcagaagtgtccttctgttgatgacttcgtaagtgccctcgtttccgacttggatctggacttcgaaactttcctcatggattctgaataaaagaaacactctacacctcttaaatcaaggtcatgtagataatgactttgttataaatgctacagctgtgagagcttgtttctgatttcattgttcgcttctgtaattctgaaaaactttaaactggtagaacttggaataaataatttgttttaatta

SEQ ID NO: 376135 - DNA, 1800 bp, Homo sapiens
acccggaagcggggccgtcacgtggggcggcgtgggctgctgccttggaaacgcggagcgcgcgctcccagcgaaagcagcagggcagggatctgcgttggaggaagggactgctctggtgctagaatgctgtgcgtcggaaggctgggcggcttgggagccagagcagcagctctgccgccccgccgggcgggccggggaagcctcgaagccgggatccgggcccgaagggtcagcaccagctggtctcccgtgggcgccgccttcaatgtcaagccccagggcagccgcttggacctgttcggcgagcgccggggtctttttggagttcctgagctgagtgccccagaaggatttcatattgcacaagaaaaagccttgagaaagacagaattgcttgtggaccgtgcatgttccaccccacctgggccccagaccgtgctgatcttcgatgagctctcggattccttatgcagagtggccgacttggctgattttgtgaaaatcgctcaccctgagccagcattcagagaagctgcggaagaagcttgtagaagtattggcaccatggtagagaagttgaacacaaatgtggatttatatcaaagtttgcaaaaattactagctgataaaaaacttgtggattcccttgatccagaaacaaggcgagtggctgaactgtttatgtttgattttgaaattagtggaatccatctagacaaagaaaagcgtaaaagagcagtggacctcaatgttaaaatcttggatttgagtagtacatttcttatgggaaccaattttcccaacaagattgagaagcatctcttaccagaacacattcgtcgtaactttacatctgctggggatcatatcataattgatggtctccacgcagaatcaccagatgacttggtgcgagaagctgcttataaaatttttctttatcccaatgctggtcaattgaaatgtttagaagaattgctcagcagcagagatcttctggcaaagttggtggggtattccacgttttctcacagggctctccaaggaacgatagctaaaaatccagagactgtcatgcagttccttgaaaaactatctgacaaactttctgaaagaactctgaaagattttgagatgatacgagggatgaaaatgaaactgaatcctcaaaattccgaagtaatgccctgggaccccccttactacagtggtgtgattcgtgcagaaaggtataatattgagcccagcctatattgcccgtttttctctcttggagcatgcatggaaggcctgaatattttgcttaacagactgttggggatttcattatatgcagagcagcctgcaaaaggagaggtgtggagcgaagatgtccgaaaactggctgttgttcatgaatctgaaggattgttggggtacatttactgtgatttttttcagcgagcagacaaaccacatcaggattgccatttcactatccgtggaggcagactaaaggaagatggagactatcaactcccagttgtagttcttatgctgaatcttccccgttcctcaaggagttctccaactttgctaactcctggcatgatggaaaatcttttccatgaaatgggacatgccatgcattcaatgctaggacgtactcgttaccaacacgtcactgggaccaggtgccctactgattttgctgaggttccttctattctgatggagtactttgcaaatgattatcgagtagttaaccaatttgccagacattatcagactggacaggtaggaacagtaatattgtcg

SEQ ID NO: 376136 - DNA, 888 bp, Homo sapiens
aggaagttctggaaggcagtggggtttgagattggacccagggtcaagatagaacatgaaggtgggatgaggacatgaacagaacatggccaagaaggatctgggggagcagccaggacgaggcggagctgatccgagaggacatccagggggctctgcacaattaccgctcgggccgcggggagcgcagggcggcggcgctcagggccacgcaggaggagttgcagcgcgaccgctcgcccgccgctgagaccccgcccctgcagcgccgcccgtcagtccgcgcagtgatcagcaccgtagagcggggcgcgggccgcggacgaccccaggcgaagcccattcccgaggcagaggaggcgcagaggcctgagccggtggggacctcgagcaacgctgactcggcctccccggacctgggtccccggggtcctgacctggcggttctgcaggcggagcgggaagtggacatcctgaaccacgtgttcgacgacgtagagagctttgtatcgaggctgcagaagtcggcggaggcggccagggtgctggagcaccgggaacgcggccgcaggagccggcgccgggcggctgggggtaaggggcaccctggcgtgggatctgaaccccctcccgatctcttccaaatgtccccgctctccccaggctctcccctcccgccacttgccagggctgacctcaccgccatcttaaccgggtgttcacctctctctgcctgcctggtgctggcccgcgtcccatcgccgcgcccgtctgctcccctcagagggcttgctgacgctgcgggccagccgccctcggaggcgagtacaccgacgtgctgcgaagatcaagtacgccttcagctctggccggtgaggacgcgcccgc

SEQ ID NO: 376137 - DNA, 959 bp, Homo sapiens
gagtcaagcacaccctagtcgagtcttgtctgtacctcccagacgagctgaccccttctccagaactctgcttcttttctctgttccctgtccaggccctcagtttcactctagagaggtgctatccctccgtatatcggatttctccctacctcgttgaacttgttcactccctttgagccttttgagcctgtgtgtctcgttctgcgccctggatttccccctccctggacccctcagtggacccagtcttggtgtccccgtcgccctccgcagggccacgcaggaggagttgcagcgcgaccgctcgcccgccgctgagaccccgcccctgcagcgccgcccgtcagtccgcgcagtgatcagcaccgtagagcggggcgcgggccgcggacgaccccaggcgaagcccattcccgaggcagaggaggcgcagaggcctgagccggtggggacctcgagcaacgctgactcggcctccccggacctgggtccccggggtcctgacctggcggttctgcaggcggagcgggaagtggacatcctgaaccacgtgttcgacgacgtagagagctttgtatcgaggctgcagaagtcggcggaggcggccagggtgctggagcaccgggaacgcggccgcaggagccggcgccgggcggctgggggtaaggggcaccctggcgtgggatctgaaccccctcccgatctcttccaaatgtccccgctctccccaggctctcccctcccgccacttgccagggctgacctcaccgccatcttaaccgggtgttcacctctctctgcctgcctggtgctggcccgcgtcccatcgccgcgcccgtctgctcccctcagagggcttgctgacgctgcgggccagccgccctcggaggcgagtacaccgacgtgctgcgaagatcaagtacgccttcagctctggccggtgaggacgcgcccgc

SEQ ID NO: 376138 - DNA, 959 bp, Homo sapiens
gagtcaagcacaccctagtcgagtcttgtctgtacctcccagacgagctgaccccttctccagaactctgcttcttttctctgttccctgtccaggccctcagtttcactctagagaggtgctatccctccgtatatcggatttctccctacctcgttgaacttgttcactccctttgagccttttgagcctgtgtgtctcgttctgcgccctggatttccccctccctggacccctcagtggacccagtcttggtgtccccgtcgccctccgcagaacaagcattcgcggacagaaagactcctgtagaaaaaaagcgtgttagcccctttgaggtttggggaatcatgtaaaggggacccagacctcacttttagttatttacaccaatgagttccttcagggaacccacccccaaaatgcgagcaaagcgcagaggcctgagccggtggggacctcgagcaacgctgactcggcctccccggacctgggtccccggggtcctgacctggcggttctgcaggcggagcgggaagtggacatcctgaaccacgtgttcgacgacgtagagagctttgtatcgaggctgcagaagtcggcggaggcggccagggtgctggagcaccgggaacgcggccgcaggagccggcgccgggcggctgggggtaaggggcaccctggcgtgggatctgaaccccctcccgatctcttccaaatgtccccgctctccccaggctctcccctcccgccacttgccagggctgacctcaccgccatcttaaccgggtgttcacctctctctgcctgcctggtgctggcccgcgtcccatcgccgcgcccgtctgctcccctcagagggcttgctgacgctgcgggccagccgccctcggaggcgagtacaccgacgtgctgcgaagatcaagtacgccttcagctctggccggtgaggacgcgcccgc

SEQ ID NO: 376139 - DNA, 1300 bp, Homo sapiens
taggattgacactggctgtcaaactcatccttcaaggtgattcctggcctgccctcctcctccaggcagcctgtcctcctcctccaggcagcctgtcctgaccctcagcagcctctcctggccttggcagagcccctcgtgtcctcccttgcagcacgcatgggaagaaaggccatcgtcctcgccattgctaacaccagccttgcgtttcctctttgccagcacctggtgacgttctgcctgggtgaggacgatggcgtgcataccgtggaggatgcctccaggaagttggccgtcatggatagccagggccgagtctgggcacaggagatgctgctgcgagtgtctcccgaccatgtcacgctgctcgacccggcctccaaggaggagctggagtcgtacccactgggcgccatcgtgcgctgtgacgcggtgatgccacccggcaggagccgctcgttgctgctgctcgtgtgccaggaacccgagcgcgcgcagcccgacgtgcacttcttccagggcctgcgcctcggggcggagctgatccgagaggacatccagggggctctgcacaattaccgctcgggccgcggggagcgcagggcggcggcgctcagggccacgcaggaggagttgcagcgcgaccgctcgcccgccgctgagaccccgcccctgcagcgccgcccgtcagtccgcgcagtgatcagcaccgtagagcggggcgcgggccgcggacgaccccaggcgaagcccattcccgaggcagaggaggcgcagaggcctgagccggtggggacctcgagcaacgctgactcggcctccccggacctgggtccccggggtcctgacctggcggttctgcaggcggagcgggaagtggacatcctgaaccacgtgttcgacgacgtagagagctttgtatcgaggctgcagaagtcggcggaggcggccagggtgctggagcaccgggaacgcggccgcaggagccggcgccgggcggctgggggtaaggggcaccctggcgtgggatctgaaccccctcccgatctcttccaaatgtccccgctctccccaggctctcccctcccgccacttgccagggctgacctcaccgccatcttaaccgggtgttcacctctctctgcctgcctggtgctggcccgcgtcccatcgccgcgcccgtctgctcccctcagagggcttgctgacgctgcgggccagccgccctcggaggcgagtacaccgacgtgctgcgaagatcaagtacgccttcagctctggccggtgaggacgcgcccgc

SEQ ID NO: 376140 - DNA, 1186 bp, Homo sapiens
tggaggaggtgtggttagtctcaggctgaaagtctgattattctgggggattctgagcccacctggcatcatcttgggcctcactgctttctccatggtccgtaccagcacctggtgacgttctgcctgggtgaggacgatggcgtgcataccgtggaggatgcctccaggaagttggccgtcatggatagccagggccgagtctgggcacaggagatgctgctgcgagtgtctcccgaccatgtcacgctgctcgacccggcctccaaggaggagctggagtcgtacccactgggcgccatcgtgcgctgtgacgcggtgatgccacccggcaggagccgctcgttgctgctgctcgtgtgccaggaacccgagcgcgcgcagcccgacgtgcacttcttccagggcctgcgcctcggggcggagctgatccgagaggacatccagggggctctgcacaattaccgctcgggccgcggggagcgcagggcggcggcgctcagggccacgcaggaggagttgcagcgcgaccgctcgcccgccgctgagaccccgcccctgcagcgccgcccgtcagtccgcgcagtgatcagcaccgtagagcggggcgcgggccgcggacgaccccaggcgaagcccattcccgaggcagaggaggcgcagaggcctgagccggtggggacctcgagcaacgctgactcggcctccccggacctgggtccccggggtcctgacctggcggttctgcaggcggagcgggaagtggacatcctgaaccacgtgttcgacgacgtagagagctttgtatcgaggctgcagaagtcggcggaggcggccagggtgctggagcaccgggaacgcggccgcaggagccggcgccgggcggctgggggtaaggggcaccctggcgtgggatctgaaccccctcccgatctcttccaaatgtccccgctctccccaggctctcccctcccgccacttgccagggctgacctcaccgccatcttaaccgggtgttcacctctctctgcctgcctggtgctggcccgcgtcccatcgccgcgcccgtctgctcccctcagagggcttgctgacgctgcgggccagccgccctcggaggcgagtacaccgacgtgctgcgaagatcaagtacgccttcagctctggccggtgaggacgcgcccgc

SEQ ID NO: 376141 - DNA, 1552 bp, Homo sapiens
ggaaaggacagcggagagcagggcagagctgagcaggcagggcacctccaggtgggcaggagctaccactcagcaccatgagcaccgccacaggcccagaagctgccccaaagccaagcgccaagtctatctatgagcagaggaagcgttactccacagttgttatggctgatgtatcccagtacccagtcaatcacctggtgacgttctgcctgggtgaggacgatggcgtgcataccgtggaggatgcctccaggaagttggccgtcatggatagccagggccgagtctgggcacaggagatgctgctgcgagtgtctcccgaccatgtcacgctgctcgacccggcctccaaggaggagctggagtcgtacccactgggcgccatcgtgcgctgtgacgcggtgatgccacccggcaggagccgctcgttgctgctgctcgtgtgccaggaacccgagcgcgcgcagcccgacgtgcacttcttccagggcctgcgcctcggggcggagctgatccgagaggacatccagggggctctgcacaattaccgctcgggccgcggggagcgcagggcggcggcgctcagggccacgcaggaggagttgcagcgcgaccgctcgcccgccgctgagaccccgcccctgcagcgccgcccgtcagtccgcgcagtgatcagcaccgtagagcggggcgcgggccgcggacgaccccaggcgaagcccattcccgaggcagaggaggcgcagaggcctgagccggtggggacctcgagcaacgctgactcggcctccccggacctgggtccccggggtcctgacctggcggttctgcaggcggagcgggaagtggtgagccgctaaggaaggggtctgggggcagggccaggcgactggaggcggggctagggcgtggaagggcggggccggctgcgggacgggcgttctctggtcagacttctgcgttatggaagaggggctgggtcgggggcggggcttggttgtggggcgtggccaggtgtttggggcgtggcctgatctggggaagtgtataggtgctcaggttcagggcttcgacggggatggttttggaactcgggagccctgagcgtccccctcctctgtcccctaggacatcctgaaccacgtgttcgacgacgtagagagctttgtatcgaggctgcagaagtcggcggaggcggccagggtgctggagcaccgggaacgcggccgcaggagccggcgccgggcggctgggggtaaggggcaccctggcgtgggatctgaaccccctcccgatctcttccaaatgtccccgctctccccaggctctcccctcccgccacttgccagggctgacctcaccgccatcttaaccgggtgttcacctctctctgcctgcctggtgctggcccgcgtcccatcgccgcgcccgtctgctcccctcagagggcttgctgacgctgcgggccagccgccctcggaggcgagtacaccgacgtgctgcgaagatcaagtacgccttcagctctggccggtgaggacgcgcccgc

SEQ ID NO: 376142 - DNA, 1272 bp, Homo sapiens
ggaaaggacagcggagagcagggcagagctgagcaggcagggcacctccaggtgggcaggagctaccactcagcaccatgagcaccgccacaggcccagaagctgccccaaagccaagcgccaagtctatctatgagcagaggaagcgttactccacagttgttatggctgatgtatcccagtacccagtcaatcacctggtgacgttctgcctgggtgaggacgatggcgtgcataccgtggaggatgcctccaggaagttggccgtcatggatagccagggccgagtctgggcacaggagatgctgctgcgagtgtctcccgaccatgtcacgctgctcgacccggcctccaaggaggagctggagtcgtacccactgggcgccatcgtgcgctgtgacgcggtgatgccacccggcaggagccgctcgttgctgctgctcgtgtgccaggaacccgagcgcgcgcagcccgacgtgcacttcttccagggcctgcgcctcggggcggagctgatccgagaggacatccagggggctctgcacaattaccgctcgggccgcggggagcgcagggcggcggcgctcagggccacgcaggaggagttgcagcgcgaccgctcgcccgccgctgagaccccgcccctgcagcgccgcccgtcagtccgcgcagtgatcagcaccgtagagcggggcgcgggccgcggacgaccccaggcgaagcccattcccgaggcagaggaggcgcagaggcctgagccggtggggacctcgagcaacgctgactcggcctccccggacctgggtccccggggtcctgacctggcggttctgcaggcggagcgggaagtggacatcctgaaccacgtgttcgacgacgtagagagctttgtatcgaggctgcagaagtcggcggaggcggccagggtgctggagcaccgggaacgcggccgcaggagccggcgccgggcggctgggggtaaggggcaccctggcgtgggatctgaaccccctcccgatctcttccaaatgtccccgctctccccaggctctcccctcccgccacttgccagggctgacctcaccgccatcttaaccgggtgttcacctctctctgcctgcctggtgctggcccgcgtcccatcgccgcgcccgtctgctcccctcagagggcttgctgacgctgcgggccagccgccctcggaggcgagtacaccgacgtgctgcgaagatcaagtacgccttcagctctggccggtgaggacgcgcccgc

SEQ ID NO: 376143 - DNA, 676 bp, Homo sapiens
cacaaccaatgttttgtttcttcacagaacaggctatgagctattttcaattattgcactgaaatgctgtcctctaaaattaacaaatgaatgaagcatttgcaaactggacattgcactgagaacaacgtagagtgaaactatccagttgtttttctaattatattttatctacttagataataggaactagcaattactaatgttttttttttaactaagcaatttggtgggaaaaaacatcacctaaagtaatgtattattcttatgaacaatgtgaaacaaaattaatcatttggaatggcatctagatagtaggactttaattcttaatttagagtattgagcataaaatactatggttttattgaatcttttaccatgccatttcttacagtaaaaaaggaaaaatagaaatggaatatctagataattaaaataaacattttctggttatgtgaaacaaaggagagttttaaggggtagaagaggaaggtgcagaattcttatctgccttcctagcagacagagtaggcaagtggctacttgatccaatttcaaggacaactgcaaacagtgcatcctccccaaatatttccatcacccatttactgatgcattcaccatttttgtagtttaaaaatttgaacctcaataaaatccaaatgctactgag

SEQ ID NO: 376144 - DNA, 281 bp, Homo sapiens
gcgcctccaaggcaggcaggcaggcaggcacctccgtggaaaacccactcccgcctgctgacacctatgctcatccaacagatcatgccgactcaagatgcaggtcattctcttagagaaagtgggggcccaagccccagaaaataacccaaacatccagcggaaccgaccacccccaacatttcccgagggtggtaggtgtacctcgcgaagtgttcggggctgtccacgaggcacaactcttttatttctgcccaaggaagggcggcctgagtgcgtct

SEQ ID NO: 376145 - DNA, 1767 bp, Homo sapiens
gctttctaggcaagcgcaggtccaggcggtgcagcttgggcggcccagcggatcgtgccgcggcggccgagcgcagctacaggagggtgtccagaagccacaagccatggctgtggggaacatcaacgagctgcccgagaacatcctgctggagctgttcacgcacgtgcccgcccgccagctgctgctgaactgccgcctggtctgcagcctctggcgggacctcatcgacctcgtgaccctctggaaacgcaagtgcctgcgagagggcttcatcactgaggactgggaccagcccgtggccgactggaagatcttctacttcttacggagcctgcacaggaacctcctgcacaacccgtgcgctgaagaggggttcgagttctggagcctggatgtgaatggaggcgatgagtggaaggtggaggatctctctcgagaccagaggaaggaattccccaatgaccaggttcgcagccaggccagattgcgggtccaagtaccagctgtgcgttcagctcctgtcgtccgcgcacgcgcctctggggaccttccagccagacccggcgaccatccagcagaagagcgatgccaagtggagggaggtctcccacacattctccaactacccgcccggcgtccgctacatctggtttcagcacggcggcgtggacactcattactgggccggctggtacggcccgagggtcaccaacagcagcatcaccatcgggcccccgctgccctgacaccccctgagcccccatctgctgaaccctgactggtaaacaactgctgtcagaaaagggctgggcttgggaaggggaggtggaggccaggtgtccccagacctctaacccttgcccctagcagcctcttctttgtggagcctctcagtgtgggcagccctcgcatgctggggtcgggccagctctccccgaaaggtcttgacctgaatgatggccggggaagcctgcgtgtgcccctttcagagacggagcacctgagatgtgggaggtgcagcatgttcccctgggcccctcagaaagtcgagcttggaggccagcctggatctgtctctcccttcccctcctgggaccattctacctgtgttctttgaccctcggagcagggacaggcaagacaactggcaagcttgcagctgccctgatggtgcaggtgcagggaggtgaccatgtaactctgaccaatctgggaagtggagggtgggctcatgggccgtgctctgcccctgtctgctgctcccagtctttcgctctgcctgcctgctcagaagaggtggctttggcccagaggctcaggccgggactgagatggacagacccagggtggggtggggtccaggtcgggtgtggactgtcctcactgtcagtggagccccagaagctagatgggtaccaggtggggttaggttcccagaggactgagggaatcctgtacaggatgtcccagggtagatggggagcaggattgggacctgctctgacagctggacacatgagccctggatgagtatggtagggggtttgaagaatcccctgtccacctcccaaatccaggcccggccccctctggcttggagagcattccaagcccccaccccacccctagaactgccattcccaagacctctgtctcccagccaaccacccttggaacttgcctcttgtcctgctggaaagatagcagtgttctcctgacttcgccctactgcatgcagccaaataaaaggtgtgcccagtctaa

SEQ ID NO: 376146 - DNA, 357 bp, Homo sapiens
gagatggagtctcgctctgtcgcccaggctggagtgcagtggcgcaatctcagctcactgcaagctctgcctcccaggttcgcgccattcacctgcctcagcctctggagtagctgagactacaggcgcccaccaccatgcccggctaattttgtttgtatttttagtagagatggagtttcaccatgttggccagggtggtctcaatctcctgacctcgtgatccacccacctcgacctcccaaagtgctgagattacaggcgtgagccaccgcgcccagcgattgtttcttgaggcttccccagccatatggaactataagtcaattaaacctctttccttttataaatcaccca

SEQ ID NO: 376147 - DNA, 1797 bp, Homo sapiens
gctttctaggcaagcgcaggtccaggcggtgcagcttgggcggcccagcggatcgtgccgcggcggccgagcgcagctccttggaccgccccagtgacccctggagctacaggagggtgtccagaagccacaagccatggctgtggggaacatcaacgagctgcccgagaacatcctgctggagctgttcacgcacgtgcccgcccgccagctgctgctgaactgccgcctggtctgcagcctctggcgggacctcatcgacctcgtgaccctctggaaacgcaagtgcctgcgagagggcttcatcactgaggactgggaccagcccgtggccgactggaagatcttctacttcttacggagcctgcacaggaacctcctgcacaacccgtgcgctgaagaggggttcgagttctggagcctggatgtgaatggaggcgatgagtggaaggtggaggatctctctcgagaccagaggaaggaattccccaatgaccaggttcgcagccaggccagattgcgggtccaagtaccagctgtgcgttcagctcctgtcgtccgcgcacgcgcctctggggaccttccagccagacccggcgaccatccagcagaagagcgatgccaagtggagggaggtctcccacacattctccaactacccgcccggcgtccgctacatctggtttcagcacggcggcgtggacactcattactgggccggctggtacggcccgagggtcaccaacagcagcatcaccatcgggcccccgctgccctgacaccccctgagcccccatctgctgaaccctgactggtaaacaactgctgtcagaaaagggctgggcttgggaaggggaggtggaggccaggtgtccccagacctctaacccttgcccctagcagcctcttctttgtggagcctctcagtgtgggcagccctcgcatgctggggtcgggccagctctccccgaaaggtcttgacctgaatgatggccggggaagcctgcgtgtgcccctttcagagacggagcacctgagatgtgggaggtgcagcatgttcccctgggcccctcagaaagtcgagcttggaggccagcctggatctgtctctcccttcccctcctgggaccattctacctgtgttctttgaccctcggagcagggacaggcaagacaactggcaagcttgcagctgccctgatggtgcaggtgcagggaggtgaccatgtaactctgaccaatctgggaagtggagggtgggctcatgggccgtgctctgcccctgtctgctgctcccagtctttcgctctgcctgcctgctcagaagaggtggctttggcccagaggctcaggccgggactgagatggacagacccagggtggggtggggtccaggtcgggtgtggactgtcctcactgtcagtggagccccagaagctagatgggtaccaggtggggttaggttcccagaggactgagggaatcctgtacaggatgtcccagggtagatggggagcaggattgggacctgctctgacagctggacacatgagccctggatgagtatggtagggggtttgaagaatcccctgtccacctcccaaatccaggcccggccccctctggcttggagagcattccaagcccccaccccacccctagaactgccattcccaagacctctgtctcccagccaaccacccttggaacttgcctcttgtcctgctggaaagatagcagtgttctcctgacttcgccctactgcatgcagccaaataaaaggtgtgcccagtctaa

SEQ ID NO: 376148 - DNA, 2264 bp, Homo sapiens
gctttctaggcaagcgcaggtccaggcggtgcagcttgggcggcccagcggatcgtgccgcggcggccgagcgcaggcaggagatcatgtcctctgagatcttgagaaggtggctggagccctttggacctccgcgggaggcagtgataattagcctcctcctcccatcatgttctgaggatgggagagaggatggtgacggcaccggaggcctggggtgctctgcccggctgcgcattatatccccattaaagactggcctactgaaaaaggctggccctggaatcaaagaagatccgggcttcttccccctctgcccttatttttgaccttgggcagtgccttccacctctattgtgagaggccagagaaaaaaatcagagctcaccttttattaaagtacctgatgtgtcccaagctccttggaccgccccagtgacccctggagctacaggagggtgtccagaagccacaagccatggctgtggggaacatcaacgagctgcccgagaacatcctgctggagctgttcacgcacgtgcccgcccgccagctgctgctgaactgccgcctggtctgcagcctctggcgggacctcatcgacctcgtgaccctctggaaacgcaagtgcctgcgagagggcttcatcactgaggactgggaccagcccgtggccgactggaagatcttctacttcttacggagcctgcacaggaacctcctgcacaacccgtgcgctgaagaggggttcgagttctggagcctggatgtgaatggaggcgatgagtggaaggtggaggatctctctcgagaccagaggaaggaattccccaatgaccaggtcaagaaatacttcgttacttcatattacacctgcctcaagtcccaggtggtggacctcaaggccgaagggtattgggaggagctgatggataccacacggccggacatcgaggtcaaggactggttcgcagccaggccagattgcgggtccaagtaccagctgtgcgttcagctcctgtcgtccgcgcacgcgcctctggggaccttccagccagacccggcgaccatccagcagaagagcgatgccaagtggagggaggtctcccacacattctccaactacccgcccggcgtccgctacatctggtttcagcacggcggcgtggacactcattactgggccggctggtacggcccgagggtcaccaacagcagcatcaccatcgggcccccgctgccctgacaccccctgagcccccatctgctgaaccctgactggtaaacaactgctgtcagaaaagggctgggcttgggaaggggaggtggaggccaggtgtccccagacctctaacccttgcccctagcagcctcttctttgtggagcctctcagtgtgggcagccctcgcatgctggggtcgggccagctctccccgaaaggtcttgacctgaatgatggccggggaagcctgcgtgtgcccctttcagagacggagcacctgagatgtgggaggtgcagcatgttcccctgggcccctcagaaagtcgagcttggaggccagcctggatctgtctctcccttcccctcctgggaccattctacctgtgttctttgaccctcggagcagggacaggcaagacaactggcaagcttgcagctgccctgatggtgcaggtgcagggaggtgaccatgtaactctgaccaatctgggaagtggagggtgggctcatgggccgtgctctgcccctgtctgctgctcccagtctttcgctctgcctgcctgctcagaagaggtggctttggcccagaggctcaggccgggactgagatggacagacccagggtggggtggggtccaggtcgggtgtggactgtcctcactgtcagtggagccccagaagctagatgggtaccaggtggggttaggttcccagaggactgagggaatcctgtacaggatgtcccagggtagatggggagcaggattgggacctgctctgacagctggacacatgagccctggatgagtatggtagggggtttgaagaatcccctgtccacctcccaaatccaggcccggccccctctggcttggagagcattccaagcccccaccccacccctagaactgccattcccaagacctctgtctcccagccaaccacccttggaacttgcctcttgtcctgctggaaagatagcagtgttctcctgacttcgccctactgcatgcagccaaataaaaggtgtgcccagtctaa

SEQ ID NO: 376149 - DNA, 2031 bp, Homo sapiens
gctttctaggcaagcgcaggtccaggcggtgcagcttgggcggcccagcggatcgtgccgcggcggccgagcgcagctacaggagggtgtccagaagccacaagccatggctgtggggaacatcaacgagctgcccgagaacatcctgctggagctgttcacgcacgtgcccgcccgccagctgctgctgaactgccgcctggtctgcagcctctggcgggacctcatcgacctcgtgaccctctggaaacgcaagtgcctgcgagagggcttcatcactgaggactgggaccagcccgtggccgactggaagatcttctacttcttacggagcctgcacaggaacctcctgcacaacccgtgcgctgaagaggggttcgagttctggagcctggatgtgaatggaggcgatgagtggaaggtggaggatctctctcgagaccagaggaaggaattccccaatgaccaggtcaagaaatacttcgttacttcatattagtaagatccggggacttggggtaggggaaagcccaaatcaatttaccctggggtctctcccaccctggaaggggcagtcctagcccctcactgccctagtggtgagcccagcccctcgcacccctctgcctgcccccagcacctgcctcaagtcccaggtggtggacctcaaggccgaagggtattgggaggagctgatggataccacacggccggacatcgaggtcaaggactggttcgcagccaggccagattgcgggtccaagtaccagctgtgcgttcagctcctgtcgtccgcgcacgcgcctctggggaccttccagccagacccggcgaccatccagcagaagagcgatgccaagtggagggaggtctcccacacattctccaactacccgcccggcgtccgctacatctggtttcagcacggcggcgtggacactcattactgggccggctggtacggcccgagggtcaccaacagcagcatcaccatcgggcccccgctgccctgacaccccctgagcccccatctgctgaaccctgactggtaaacaactgctgtcagaaaagggctgggcttgggaaggggaggtggaggccaggtgtccccagacctctaacccttgcccctagcagcctcttctttgtggagcctctcagtgtgggcagccctcgcatgctggggtcgggccagctctccccgaaaggtcttgacctgaatgatggccggggaagcctgcgtgtgcccctttcagagacggagcacctgagatgtgggaggtgcagcatgttcccctgggcccctcagaaagtcgagcttggaggccagcctggatctgtctctcccttcccctcctgggaccattctacctgtgttctttgaccctcggagcagggacaggcaagacaactggcaagcttgcagctgccctgatggtgcaggtgcagggaggtgaccatgtaactctgaccaatctgggaagtggagggtgggctcatgggccgtgctctgcccctgtctgctgctcccagtctttcgctctgcctgcctgctcagaagaggtggctttggcccagaggctcaggccgggactgagatggacagacccagggtggggtggggtccaggtcgggtgtggactgtcctcactgtcagtggagccccagaagctagatgggtaccaggtggggttaggttcccagaggactgagggaatcctgtacaggatgtcccagggtagatggggagcaggattgggacctgctctgacagctggacacatgagccctggatgagtatggtagggggtttgaagaatcccctgtccacctcccaaatccaggcccggccccctctggcttggagagcattccaagcccccaccccacccctagaactgccattcccaagacctctgtctcccagccaaccacccttggaacttgcctcttgtcctgctggaaagatagcagtgttctcctgacttcgccctactgcatgcagccaaataaaaggtgtgcccagtctaa

SEQ ID NO: 376150 - DNA, 1268 bp, Homo sapiens
gctttctaggcaagcgcaggtccaggcggtgcagcttgggcggcccagcggatcgtgccgcggcggccgagcgcagctacaggagggtgtccagaagccacaagccatggctgtggggaacatcaacgagctgcccgagaacatcctgctggagctgttcacgcacgtgcccgcccgccagctgctgctgaactgccgcctggtctgcagcctctggcgggacctcatcgacctcgtgaccctctggaaacgcaagtgcctgcgagagggcttcatcactgaggactgggaccagcccgtggccgactggaagatcttctacttcttacggagcctgcacaggaacctcctgcacaacccgtgcgctgaagaggggttcgagttctggagcctggatgtgaatggaggcgatgagtggaaggtggaggatctctctcgagaccagaggaaggaattccccaatgaccaggtcaagaaatacttcgttacttcatattacacctgcctcaagtcccaggtggtggacctcaaggccgaagggtattgggaggagctgatggataccacacggccggacatcgaggtcaaggactggttcgcagccaggccagattgcgggtccaagtaccagctgtgcgttcagctcctgtcgtccgcgcacgcgcctctggggaccttccagccagacccggcgaccatccagcagaagagcgatgccaagtggagggaggtctcccacacattctccaactacccgcccggcgtccgctacatctggtttcagcacggcggcgtggacactcattactgggccggctggtacggcccgagggtcaccaacagcagcatcaccatcgggcccccgctgccctgacaccccctgagcccccatctgctgaaccctgactgctttacggacattggatgaagccgaagcatttagaatggtgcctggcacacagttgtgagtgagttctcacgagatctgatggttttacaagtgacggtttccccggctccctcctgccgccatgtgaagaaggtcgttgcttccccttcaccttccaccaccatgatttagagatggagtttcaccatgttggccagggtggtctcaatctcctgacctcgtgatccacccacctcgacctcccaaagtgctgagattacaggcgtgagccaccgcgcccagcgattgtttcttgaggcttccccagccatatggaactataagtcaattaaacctctttccttttataaatcaccca

SEQ ID NO: 376151 - DNA, 1786 bp, Homo sapiens
tatattggacatcctttggcagcttgcagtttctttccattcctttgggctgaatgataatcctgtggagtagaccagcaggattttgctccattttatagatgaggaaactgaagcacagagaaaggaattggtccgtcccaaatcacagagttcaaactagaactccactgatttctagctggcaccaagaactcagccccttccttgttcccctgcccccctcaggcagtgccacactcagagtctgctcccaccctttttgttaaggctcatcttttatttcttttgttttttagagacacggtctcactctgttgcccaggctggagcgcagtgacgtgatcacagctcactgcagtcttgaactcctactttagcctgtactcctgcctcagcctgcctagaactacaggcacacaccaccatgcctggctaattttttttttcttgtagagatggtatctcactctctggtttgcgacaagactagttgcaaactcctgggctcaaacaaccctcccacctcagcctcccaaagtactgggattcccggtgtgagccgccacacccagcctgagtcagctcccttgacctttctcccccctctacctgccctgccaggtctcccacacattctccaactacccgcccggcgtccgctacatctggtttcagcacggcggcgtggacactcattactgggccggctggtacggcccgagggtcaccaacagcagcatcaccatcgggcccccgctgccctgacaccccctgagcccccatctgctgaaccctgactggtaaacaactgctgtcagaaaagggctgggcttgggaaggggaggtggaggccaggtgtccccagacctctaacccttgcccctagcagcctcttctttgtggagcctctcagtgtgggcagccctcgcatgctggggtcgggccagctctccccgaaaggtcttgacctgaatgatggccggggaagcctgcgtgtgcccctttcagagacggagcacctgagatgtgggaggtgcagcatgttcccctgggcccctcagaaagtcgagcttggaggccagcctggatctgtctctcccttcccctcctgggaccattctacctgtgttctttgaccctcggagcagggacaggcaagacaactggcaagcttgcagctgccctgatggtgcaggtgcagggaggtgaccatgtaactctgaccaatctgggaagtggagggtgggctcatgggccgtgctctgcccctgtctgctgctcccagtctttcgctctgcctgcctgctcagaagaggtggctttggcccagaggctcaggccgggactgagatggacagacccagggtggggtggggtccaggtcgggtgtggactgtcctcactgtcagtggagccccagaagctagatgggtaccaggtggggttaggttcccagaggactgagggaatcctgtacaggatgtcccagggtagatggggagcaggattgggacctgctctgacagctggacacatgagccctggatgagtatggtagggggtttgaagaatcccctgtccacctcccaaatccaggcccggccccctctggcttggagagcattccaagcccccaccccacccctagaactgccattcccaagacctctgtctcccagccaaccacccttggaacttgcctcttgtcctgctggaaagatagcagtgttctcctgacttcgccctactgcatgcagccaaataaaaggtgtgcccagtctaa

SEQ ID NO: 376152 - DNA, 351 bp, Homo sapiens
gtgattggattatgggagcggttttcccccatgctgttctcatgatagtgagtgagttctcacgagatctgatggttttacaagtgacggtttccccggctccctcctgccgccatgtgaagaaggtcgttgcttccccttcaccttccaccaccatgatttagagatggagtttcaccatgttggccagggtggtctcaatctcctgacctcgtgatccacccacctcgacctcccaaagtgctgagattacaggcgtgagccaccgcgcccagcgattgtttcttgaggcttccccagccatatggaactataagtcaattaaacctctttccttttataaatcaccca

SEQ ID NO: 376153 - DNA, 341 bp, Homo sapiens
tgccgagggaggcctggcaccgaccaggcccaggccgccgagcttgcccgggctgcgctgcgcggctgcgaacgggggctggggtcgccatcgatgtacaggggtccgagcccagactttggggggcattttaaggcacagcgtgggaaggggaggctgcaggcgcgctggcggacttggggctggcggagcccagccgcggggctgggggtgggagtgggggtggggagataggaagggcccttccctgtcgcccaccctcttgccactcccacctaggcaggagatcatgtcctctgagatcttgagaaggtggctggagccctttggacctccgcggg

SEQ ID NO: 376154 - DNA, 1997 bp, Homo sapiens
  misc_feature (1825)..(1825): n is a, c, g, or t
  misc_feature (1997)..(1997): n is a, c, g, or t
gctttctaggcaagcgcaggtccaggcggtgcagcttgggcggcccagcggatcgtgccgcggcggccgagcgcagctacaggagggtgtccagaagccacaagccatggctgtggggaacatcaacgagctgcccgagaacatcctgctggagctgttcacgcacgtgcccgcccgccagctgctgctgaactgccgcctggtctgcagcctctggcgggacctcatcgacctcgtgaccctctggaaacgcaagtgcctgcgagagggcttcatcactgaggactgggaccagcccgtggccgactggaagatcttctacttcttacggagcctgcacaggaacctcctgcacaacccgtgcgctgaagaggggttcgagttctggagcctggatgtgaatggaggcgatgagtggaaggtggaggatctctctcgagaccagaggaaggaattccccaatgaccaggttcgcagccaggccagattgcgggtccaagtaccagctgtgcgttcagctcctgtcgtccgcgcacgcgcctctggggaccttccagccagacccggcgaccatccagcagaagagcgatgccaagtggagggaggtctcccacacattctccaactacccgcccggcgtccgctacatctggtttcagcacggcggcgtggacactcattactgggccggctggtacggcccgagggtcaccaacagcagcatcaccatcgggcccccgctgccctgacaccccctgagcccccatctgctgaaccctgactggtaaacaactgctgtcagaaaagggctgggcttgggaaggggaggtggaggccaggtgtccccagacctctaacccttgcccctagcagcctcttctttgtggagcctctcagtgtgggcagccctcgcatgctggggtcgggccagctctccccgaaaggtcttgacctgaatgatggccggggaagcctgcgtgtgcccctttcagagacggagcacctgagatgtgggaggtgcagcatgttcccctgggcccctcagaaagtcgagcttggaggccagcctggatctgtctctcccttcccctcctgggaccattctacctgtgttctttgaccctcggagcagggacaggcaagacaactggcaagcttgcagctgccctgatggtgcaggtgcagggaggtgaccatgtaactctgaccaatctgggaagtggagggtgggctcatgggccgtgctctgcccctgtctgctgctcccagtctttcgctctgcctgcctgctcagaagaggtggctttggcccagaggctcaggccgggactgagatggacagacccagggtggggtggggtccaggtcgggtgtggactgtcctcactgtcagtggagccccagaagctagatgggtaccaggtggggttaggttcccagaggactgagggaatcctgtacaggatgtcccagggtagatggggagcaggattgggacctgctctgacagctggacacatgagccctggatgagtatggtagggggtttgaagaatcccctgtccacctcccaaatccaggcccggccccctctggcttggagagcattccaagcccccaccccacccctagaactgccattcccaagacctctgtctcccagccaaccacccttggaacttgcctcttgtcctgctggaaagatagcagtgttctcctgacttcgccctactgcatgcagccaaataaaaggtgtgcccagtctaaaaaaaaaaaaaaaaaaaaaaaaaaaaaaaaaaaaaaaaaaaaaaaaaaaaaaaaaaanaaaaaaaaaaaacaaaactattgcttgtgtttccgtttggattggctttgcgtatctactttcagtgctttcgtcatttccttcttcctagctgcttatcatgcgataggctacactgtgctcctttctcaattttacccagttctaatgggaatggtgtgtttagattttn

SEQ ID NO: 376155 - DNA, 2139 bp, Homo sapiens
gctttctaggcaagcgcaggtccaggcggtgcagcttgggcggcccagcggatcgtgccgcggcggccgagcgcaggcaggagatcatgtcctctgagatcttgagaaggtggctggagccctttggacctccgcgggaggcagtgataattagcctcctcctcccatcatgttctgaggatgggagagaggatggtgacggcaccggaggcctggggtgctctgcccggctgcgcattatatccccattaaagactggcctactgaaaaaggctggccctggaatcaaagaagatccgggcttcttccccctctgcccttatttttgaccttgggcagtgccttccacctctattgtgagaggccagagaaaaaaatcagagctcaccttttattaaagtacctgatgtgtcccaagctccttggaccgccccagtgacccctggagctacaggagggtgtccagaagccacaagccatggctgtggggaacatcaacgagctgcccgagaacatcctgctggagctgttcacgcacgtgcccgcccgccagctgctgctgaactgccgcctggtctgcagcctctggcgggacctcatcgacctcgtgaccctctggaaacgcaagtgcctgcgagagggcttcatcactgaggactgggaccagcccgtggccgactggaagatcttctacttcttacggagcctgcacaggaacctcctgcacaacccgtgcgctgaagaggggttcgagttctggagcctggatgtgaatggaggcgatgagtggaaggtggaggatctctctcgagaccagaggaaggaattccccaatgaccaggttcgcagccaggccagattgcgggtccaagtaccagctgtgcgttcagctcctgtcgtccgcgcacgcgcctctggggaccttccagccagacccggcgaccatccagcagaagagcgatgccaagtggagggaggtctcccacacattctccaactacccgcccggcgtccgctacatctggtttcagcacggcggcgtggacactcattactgggccggctggtacggcccgagggtcaccaacagcagcatcaccatcgggcccccgctgccctgacaccccctgagcccccatctgctgaaccctgactggtaaacaactgctgtcagaaaagggctgggcttgggaaggggaggtggaggccaggtgtccccagacctctaacccttgcccctagcagcctcttctttgtggagcctctcagtgtgggcagccctcgcatgctggggtcgggccagctctccccgaaaggtcttgacctgaatgatggccggggaagcctgcgtgtgcccctttcagagacggagcacctgagatgtgggaggtgcagcatgttcccctgggcccctcagaaagtcgagcttggaggccagcctggatctgtctctcccttcccctcctgggaccattctacctgtgttctttgaccctcggagcagggacaggcaagacaactggcaagcttgcagctgccctgatggtgcaggtgcagggaggtgaccatgtaactctgaccaatctgggaagtggagggtgggctcatgggccgtgctctgcccctgtctgctgctcccagtctttcgctctgcctgcctgctcagaagaggtggctttggcccagaggctcaggccgggactgagatggacagacccagggtggggtggggtccaggtcgggtgtggactgtcctcactgtcagtggagccccagaagctagatgggtaccaggtggggttaggttcccagaggactgagggaatcctgtacaggatgtcccagggtagatggggagcaggattgggacctgctctgacagctggacacatgagccctggatgagtatggtagggggtttgaagaatcccctgtccacctcccaaatccaggcccggccccctctggcttggagagcattccaagcccccaccccacccctagaactgccattcccaagacctctgtctcccagccaaccacccttggaacttgcctcttgtcctgctggaaagatagcagtgttctcctgacttcgccctactgcatgcagccaaataaaaggtgtgcccagtctaa

SEQ ID NO: 376156 - DNA, 1892 bp, Homo sapiens
gctttctaggcaagcgcaggtccaggcggtgcagcttgggcggcccagcggatcgtgccgcggcggccgagcgcagctacaggagggtgtccagaagccacaagccatggctgtggggaacatcaacgagctgcccgagaacatcctgctggagctgttcacgcacgtgcccgcccgccagctgctgctgaactgccgcctggtctgcagcctctggcgggacctcatcgacctcgtgaccctctggaaacgcaagtgcctgcgagagggcttcatcactgaggactgggaccagcccgtggccgactggaagatcttctacttcttacggagcctgcacaggaacctcctgcacaacccgtgcgctgaagaggggttcgagttctggagcctggatgtgaatggaggcgatgagtggaaggtggaggatctctctcgagaccagaggaaggaattccccaatgaccaggtcaagaaatacttcgttacttcatattacacctgcctcaagtcccaggtggtggacctcaaggccgaagggtattgggaggagctgatggataccacacggccggacatcgaggtcaaggactggttcgcagccaggccagattgcgggtccaagtaccagctgtgcgttcagctcctgtcgtccgcgcacgcgcctctggggaccttccagccagacccggcgaccatccagcagaagagcgatgccaagtggagggaggtctcccacacattctccaactacccgcccggcgtccgctacatctggtttcagcacggcggcgtggacactcattactgggccggctggtacggcccgagggtcaccaacagcagcatcaccatcgggcccccgctgccctgacaccccctgagcccccatctgctgaaccctgactggtaaacaactgctgtcagaaaagggctgggcttgggaaggggaggtggaggccaggtgtccccagacctctaacccttgcccctagcagcctcttctttgtggagcctctcagtgtgggcagccctcgcatgctggggtcgggccagctctccccgaaaggtcttgacctgaatgatggccggggaagcctgcgtgtgcccctttcagagacggagcacctgagatgtgggaggtgcagcatgttcccctgggcccctcagaaagtcgagcttggaggccagcctggatctgtctctcccttcccctcctgggaccattctacctgtgttctttgaccctcggagcagggacaggcaagacaactggcaagcttgcagctgccctgatggtgcaggtgcagggaggtgaccatgtaactctgaccaatctgggaagtggagggtgggctcatgggccgtgctctgcccctgtctgctgctcccagtctttcgctctgcctgcctgctcagaagaggtggctttggcccagaggctcaggccgggactgagatggacagacccagggtggggtggggtccaggtcgggtgtggactgtcctcactgtcagtggagccccagaagctagatgggtaccaggtggggttaggttcccagaggactgagggaatcctgtacaggatgtcccagggtagatggggagcaggattgggacctgctctgacagctggacacatgagccctggatgagtatggtagggggtttgaagaatcccctgtccacctcccaaatccaggcccggccccctctggcttggagagcattccaagcccccaccccacccctagaactgccattcccaagacctctgtctcccagccaaccacccttggaacttgcctcttgtcctgctggaaagatagcagtgttctcctgacttcgccctactgcatgcagccaaataaaaggtgtgcccagtctaa

SEQ ID NO: 376157 - DNA, 1143 bp, Homo sapiens
gctttctaggcaagcgcaggtccaggcggtgcagcttgggcggcccagcggatcgtgccgcggcggccgagcgcagctacaggagggtgtccagaagccacaagccatggctgtggggaacatcaacgagctgcccgagaacatcctgctggagctgttcacgcacgtgcccgcccgccagctgctgctgaactgccgcctggtctgcagcctctggcgggacctcatcgacctcgtgaccctctggaaacgcaagtgcctgcgagagggcttcatcactgaggactgggaccagcccgtggccgactggaagatcttctacttcttacggagcctgcacaggaacctcctgcacaacccgtgcgctgaagaggggttcgagttctggagcctggatgtgaatggaggcgatgagtggaaggtggaggatctctctcgagaccagaggaaggaattccccaatgaccaggttcgcagccaggccagattgcgggtccaagtaccagctgtgcgttcagctcctgtcgtccgcgcacgcgcctctggggaccttccagccagacccggcgaccatccagcagaagagcgatgccaagtggagggaggtctcccacacattctccaactacccgcccggcgtccgctacatctggtttcagcacggcggcgtggacactcattactgggccggctggtacggcccgagggtcaccaacagcagcatcaccatcgggcccccgctgccctgacaccccctgagcccccatctgctgaaccctgactgctttacggacattggatgaagccgaagcatttagaatggtgcctggcacacagttgtgagtgagttctcacgagatctgatggttttacaagtgacggtttccccggctccctcctgccgccatgtgaagaaggtcgttgcttccccttcaccttccaccaccatgatttagagatggagtttcaccatgttggccagggtggtctcaatctcctgacctcgtgatccacccacctcgacctcccaaagtgctgagattacaggcgtgagccaccgcgcccagcgattgtttcttgaggcttccccagccatatggaactataagtcaattaaacctctttccttttataaatcaccca

SEQ ID NO: 376158 - DNA, 2403 bp, Homo sapiens
gctttctaggcaagcgcaggtccaggcggtgcagcttgggcggcccagcggatcgtgccgcggcggccgagcgcaggcaggagatcatgtcctctgagatcttgagaaggtggctggagccctttggacctccgcgggaggcagtgataattagcctcctcctcccatcatgttctgaggatgggagagaggatggtgacggcaccggaggcctggggtgctctgcccggctgcgcattatatccccattaaagactggcctactgaaaaaggctggccctggaatcaaagaagatccgggcttcttccccctctgcccttatttttgaccttgggcagtgccttccacctctattgtgagaggccagagaaaaaaatcagagctcaccttttattaaagtacctgatgtgtcccaagctccttggaccgccccagtgacccctggagctacaggagggtgtccagaagccacaagccatggctgtggggaacatcaacgagctgcccgagaacatcctgctggagctgttcacgcacgtgcccgcccgccagctgctgctgaactgccgcctggtctgcagcctctggcgggacctcatcgacctcgtgaccctctggaaacgcaagtgcctgcgagagggcttcatcactgaggactgggaccagcccgtggccgactggaagatcttctacttcttacggagcctgcacaggaacctcctgcacaacccgtgcgctgaagaggggttcgagttctggagcctggatgtgaatggaggcgatgagtggaaggtggaggatctctctcgagaccagaggaaggaattccccaatgaccaggtcaagaaatacttcgttacttcatattagtaagatccggggacttggggtaggggaaagcccaaatcaatttaccctggggtctctcccaccctggaaggggcagtcctagcccctcactgccctagtggtgagcccagcccctcgcacccctctgcctgcccccagcacctgcctcaagtcccaggtggtggacctcaaggccgaagggtattgggaggagctgatggataccacacggccggacatcgaggtcaaggactggttcgcagccaggccagattgcgggtccaagtaccagctgtgcgttcagctcctgtcgtccgcgcacgcgcctctggggaccttccagccagacccggcgaccatccagcagaagagcgatgccaagtggagggaggtctcccacacattctccaactacccgcccggcgtccgctacatctggtttcagcacggcggcgtggacactcattactgggccggctggtacggcccgagggtcaccaacagcagcatcaccatcgggcccccgctgccctgacaccccctgagcccccatctgctgaaccctgactggtaaacaactgctgtcagaaaagggctgggcttgggaaggggaggtggaggccaggtgtccccagacctctaacccttgcccctagcagcctcttctttgtggagcctctcagtgtgggcagccctcgcatgctggggtcgggccagctctccccgaaaggtcttgacctgaatgatggccggggaagcctgcgtgtgcccctttcagagacggagcacctgagatgtgggaggtgcagcatgttcccctgggcccctcagaaagtcgagcttggaggccagcctggatctgtctctcccttcccctcctgggaccattctacctgtgttctttgaccctcggagcagggacaggcaagacaactggcaagcttgcagctgccctgatggtgcaggtgcagggaggtgaccatgtaactctgaccaatctgggaagtggagggtgggctcatgggccgtgctctgcccctgtctgctgctcccagtctttcgctctgcctgcctgctcagaagaggtggctttggcccagaggctcaggccgggactgagatggacagacccagggtggggtggggtccaggtcgggtgtggactgtcctcactgtcagtggagccccagaagctagatgggtaccaggtggggttaggttcccagaggactgagggaatcctgtacaggatgtcccagggtagatggggagcaggattgggacctgctctgacagctggacacatgagccctggatgagtatggtagggggtttgaagaatcccctgtccacctcccaaatccaggcccggccccctctggcttggagagcattccaagcccccaccccacccctagaactgccattcccaagacctctgtctcccagccaaccacccttggaacttgcctcttgtcctgctggaaagatagcagtgttctcctgacttcgccctactgcatgcagccaaataaaaggtgtgcccagtctaa

SEQ ID NO: 376159 - DNA, 2022 bp, Homo sapiens
ggctggtacggtctgggatgtatgggatcttgggcggccagcggatcgtgccgcggcggccgagcgcctacaggagggtgtccagaagccacaagccatggctgtggggaacatcaacgagctgcccgagaacatcctgctggagctgttcacgcacgtgcccgcccgccagctgctgctgaactgccgcctggtctgcagcctctggcgggacctcatcgacctcgtgaccctctggaaacgcaagtgcctgcgagagggcttcatcactgaggactgggaccagcccgtggccgactggaagatcttctacttcttacggagcctgcacaggaacctcctgcacaacccgtgcgctgaagaggggttcgagttctggagcctggatgtgaatggaggcgatgagtggaaggtggaggatctctctcgagaccagaggaaggaattccccaatgaccaggtcaagaaatacttcgttacttcatattagtaagatccggggacttggggtaggggaaagcccaaatcaatttaccctggggtctctcccaccctggaaggggcagtcctagcccctcactgccctagtggtgagcccagcccctcgcacccctctgcctgcccccagcacctgcctcaagtcccaggtggtggacctcaaggccgaagggtattgggaggagctgatggataccacacggccggacatcgaggtcaaggactggttcgcagccaggccagattgcgggtccaagtaccagctgtgcgttcagctcctgtcgtccgcgcacgcgcctctggggaccttccagccagacccggcgaccatccagcagaagagcgatgccaagtggagggaggtctcccacacattctccaactacccgcccggcgtccgctacatctggtttcagcacggcggcgtggacactcattactgggccggctggtacggcccgagggtcaccaacagcagcatcaccatcgggcccccgctgccctgacaccccctgagcccccatctgctgaaccctgactggtaaacaactgctgtcagaaaagggctgggcttgggaaggggaggtggaggccaggtgtccccagacctctaacccttgcccctagcagcctcttctttgtggagcctctcagtgtgggcagccctcgcatgctggggtcgggccagctctccccgaaaggtcttgacctgaatgatggccggggaagcctgcgtgtgcccctttcagagacggagcacctgagatgtgggaggtgcagcatgttcccctgggcccctcagaaagtcgagcttggaggccagcctggatctgtctctcccttcccctcctgggaccattctacctgtgttctttgaccctcggagcagggacaggcaagacaactggcaagcttgcagctgccctgatggtgcaggtgcagggaggtgaccatgtaactctgaccaatctgggaagtggagggtgggctcatgggccgtgctctgcccctgtctgctgctcccagtctttcgctctgcctgcctgctcagaagaggtggctttggcccagaggctcaggccgggactgagatggacagacccagggtggggtggggtccaggtcgggtgtggactgtcctcactgtcagtggagccccagaagctagatgggtaccaggtggggttaggttcccagaggactgagggaatcctgtacaggatgtcccagggtagatggggagcaggattgggacctgctctgacagctggacacatgagccctggatgagtatggtagggggtttgaagaatcccctgtccacctcccaaatccaggcccggccccctctggcttggagagcattccaagcccccaccccacccctagaactgccattcccaagacctctgtctcccagccaaccacccttggaacttgcctcttgtcctgctggaaagatagcagtgttctcctgacttcgccctactgcatgcagccaaataaaaggtgtgcccagtctaa

SEQ ID NO: 376160 - DNA, 1158 bp, Homo sapiens
gctttctaggcaagcgcaggtccaggcggtgcagcttgggcggcccagcggatcgtgccgcggcggccgagcgcaggcaggagatcatgtcctctgagatcttgagaaggtggctggagccctttggacctccgcgggaggcagtgataattagcctcctcctcccatcatgttctgaggatgggagagaggatggtgacggcaccggaggcctggggtgctctgcccggctgcgcattatatccccattaaagactggcctactgaaaaaggctggccctggaatcaaagaagatccgggcttcttccccctctgcccttatttttgaccttgggcagtgccttccacctctattgtgagaggccagagaaaaaaatcagagctcaccttttattaaagtacctgatgtgtcccaagctccttggaccgccccagtgacccctggagctacaggagggtgtccagaagccacaagccatggctgtggggaacatcaacgagctgcccgagaacatcctgctggagctgttcacgcacgtgcccgcccgccagctgctgctgaactgccgcctggtctgcagcctctggcgggacctcatcgacctcgtgaccctctggaaacgcaagtgcctgcgagagggcttcatcactgaggactgggaccagcccgtggccgactggaagatcttctacttcttacggagcctgcacaggaacctcctgcacaacccgtgcgctgaagaggggttcgagttctggagcctggatgtgaatggaggcgatgagtggaaggtggaggatctctctcgagaccagaggaaggaattccccaatgaccaggtcaagaaatacttcgttacttcatattacacctgcctcaagtcccaggtggtggacctcaaggccgaagggtattgggaggagctgatggataccacacggccggacatcgaggtcaaggactggttcgcagccaggccagattgcgggtccaagtaccagctgtgcgttcagctcctgtcgtccgcgcacgcgcctctggggaccttccagccagacccggcgaccatccagcagaagagcgatgccaagtggagggagtctcccaaattctccaactaccgcccgcgtccgtagcagccgggccgagctcgatg

SEQ ID NO: 376161 - DNA, 340 bp, Homo sapiens
tctttgggagtaaagaatgagagtgaggtgggagcagtaattcatataagtcgagcttgcttgaatttggaaaattctttccttctttaggttttaaagtgacagaagtggtaatgaggttttttttgtttttcttttttaaaaagaaagcttattttgcagttaaggtcatttgacttgccttttgaaatgaatgcactcccatatgatattgatatatttaagctcagaacagtgagatattagatttaattaaaagaatctacattgcttatgtaagccttataagccttaaagtttgcttttttttttttttttttaaagatacagggtctcactt

SEQ ID NO: 376162 - DNA, 375 bp, Homo sapiens
agacttataaaagaagtagaacacacatgcttcccattaggtgagaaagaaacatgcctgagagtctaatggattactcaagtctgtgctgccaaggaagaacagaatctttagatatcatgtgttttacaaattgaagtttgtggaaaccctgcatcaaacaagtctattggtgacattttcccaacagcatttgctcactttgtgtttctgtgtcacatgttgataattcttacaatatttgaaaccttttttattattatacatgttctggtgatctgtgatcagtgatctttgatgttactactgtaatttttttggatgctgtgaactgtgcccatataaaatggtgaattaaatcaataaatgttgtgt

SEQ ID NO: 376163 - DNA, 1873 bp, Homo sapiens
agtccaaactcaagaggcagcatggagcgtggtctgcttccccactactcacggctctgcaatgtgggcaccaaggggccaacccttgcctttgccggaaaccctggagaacggtgacgtgaaatccacctgttttcctcatccccaagcaaacagaaccctgctgtaagttaatgaaaagtatagaaaaaccctgctgtaagttatgagaagtatagaaaaccatgctgtaagttaatgaaaagtatggaaaacagtctacttcggccaggcatggtggctcacacctgtaatcccagcacttagggaggtgaggtgcgtggattccttgagcccaggaattcgagaccagcctgggcgacaggacgagactagtctctacaaaaaatgtgaaaattagccgagtgtggtggcgtgcacctgtagtcccagctactcaggaggctgaggtgggaggatcgcttgagcctgagaggtcgaggctgcagtgagctgtgatcgtgccactgcactccagcctgggcaacagagcgagaccctgtttcaaaaaaaaaaaaacaaagcagtctgctttgtgcagtgttttcagtaataatccaactgtgaaaacccaactgtgaagacttagggagagagagctgctcccttagcgggtactcagcaggcagccggggagtggtgggcacctgagagctcctgatggtacccaggcagacttcggagaaggaagcgcggggccctgctgcctgggatcccagcagtggagccggctttttggagcaggaggcactgagggggtgttcaggctttccccccatgtttccccattcagggaaggggttgtacaaaagaggaacgcactgtccagtaacgctgcggcgccgtgggcagctctgagcgtggcggtgattggcagcaagtgtgtgagacttggctgtgaaccctgcagccagctctcaggtcagggtgcaggtgccctcagcacactcagcatcccaggaaaggggcggcctcgccccacctccctcccacggccacataccacaggtcccaggggtgcctccggtattgaggctgccttgcctccctttgtccgcactgtccctgtccccttgtgccacctgtgcagacttgagaatggagctcactgtggtgttcatgccggggcctgtctagctcctcaccccacgatttgaccagtgccacaccacgggaccttgtgtgacctcgggcctgcgtcctctggaaaacagctgtggagtggtgtgatgaggacaggtgccttggaaagcatcaggaccttgtgagcacgaggcagctgccagcactccacgttcccgccatgctctcctcaccgtgtgggcatccacctggccagcgccgcctccgcagtgcccctccctctggtcgctcccgcgcagcatgcgaaggtgttatctgcccgcgtcctgccttttccccacaccggcacggaggagccacgtgttcggtggtcgttcggacgtggtgatttgcaggtgacatcgcaggtgttgagatgacactgaggatgttgaatattggggaggtgaagcaactgactctttttttgcttgagacagggtctcacttcgttgcctaggctggagtgcagtgagctgagattgcaccactgccctccagactgggtgacagagtgagatttgtctcaaaaataaaaaaaggaaaaaaaaaaaacaaggacagtgtggatctgcatcaggattgaggctttcgctgaagggcttgcgttggtgacggattgtagtcttgaggcctgcagtcacaggacacttcccagcagatgtgtgaggctgacagagtgattttgtaaaccgaaagcctgttgtacgga

SEQ ID NO: 376164 - DNA, 520 bp, Homo sapiens
ctgtgtttgtgcctttgagcaggactgaacaggactgaaaaccttcctgtggaaacattagttaggagcgtgcctcaccctcacccctgcagggcctcttatggtctctgtagctgaacacacccctgctgcccagcacgcacccgcagaaggggtgtgcaccctagctgcaccgtccttccacacccctgctgcccagcatgcacccgcagaaggggtgtgcaccccagctccactgtccttcctcacgcttgacttcaatggtttctacacggagcgcctggagcgcctgtctgcagagaggagccagaaggccaccccccaagtgcctgtcctgcgggggcccccggctcctgcacccagggtcgcagtcaccgcacagtgagccctggctgtgacaggaaggaagggtgtggggtcagcagggactggtgcaaatgggtccagaattttcaaatcgaatgctctgtgttctgtctttgcagtttaaatataaagcaggaatgattgactcagctca

SEQ ID NO: 376165 - DNA, 573 bp, Homo sapiens
acatggtggaaagtaagtgatgcagagtcagaggcagttcctggaagatgcactcgctgttcccaaaacgccaagccacacccactcctttagggatggtagacattggggtctcggttttattggtcatcctgagaaggccactggagtaatagaaagaaatggaatttgaagttgaaaagtgtagatctgccagcctgggcaacacggcaagaccccacctttacaaaaaatttaaaaattagccaggaatggtggcacgtgccagtggtcccagctccgagggagactaaggatacaggatcgcttgagcctgggtgctcaaggctgcagtgagctgagattgcaccactgccctccagactgggtgacagagtgagatttgtctcaaaaataaaaaaaggaaaaaaaaaaaacaaggacagtgtggatctgcatcaggattgaggctttcgctgaagggcttgcgttggtgacggattgtagtcttgaggcctgcagtcacaggacacttcccagcagatgtgtgaggctgacagagtgattttgtaaaccgaaagcctgttgtacgga

SEQ ID NO: 376166 - DNA, 1025 bp, Homo sapiens
ccaggctccggccccgcctcgccgccgtaggccccactggatcctacaactactttttccctcttttgctcacgcacctcgaagaactggtgctcccgcgggaagcgcacggggcgcgcaacgaagcgaaagggcgcggccccagccgcgggatcccgctctacaggcagcggctccgccgccccgggccccgcagcgaggcgggcgcacagcgcggggggcaactgcatcaccccgggcgcgggcgggcgcagcctgtcggccaccgtccgcgagccgagccggacgtgacgtcacgctcacttccgccgccgtcgggggctgcgcgggggctgtggctccgggactgcggagaacatattgtgatgttcgtgcctcagagctaaaactatgagtgaatttcggattcaccatgacgtcaatgaactgcttagcctgctgcgtgtccacggaggagatggggctgaggtctacattgacctgcttcaaaagaacaggaccccgtacgtcactaccactgtctctgctcacagtgccaaggtgagcactgcccttggtgtagcgctgtgcagggtgagcactgttcctgggtcagggtggtgcagggtgagcccacccctgggtcagggtgcagggtgagcgccgttcctgggtcagggtggtacagggtgagcaccattcctgggtgagggtgcagggtgagcccacccctgggtcagggtgcaggatgaacactgttcctggatcaggatggtgcagggtgaacccacccctcagtccatgtgcaggatgagcgtcgtccctgggtcagggtgcatgatgagcaccgcccctgggtcagggtgcagggtgagcgccacctctggtgcagggggcagggtgagcgccacctctggtgcagggtgcagggtgagcgccacctctggtgcagggtgcagggtgagcgccacctctggtgcagggctgtgcggggtgcagggtgagcgccaccccggggtcaggatggtgcagggtgagcactgccc

SEQ ID NO: 376167 - DNA, 3267 bp, Homo sapiens
ccaggctccggccccgcctcgccgccgtaggccccactggatcctacaactactttttccctcttttgctcacgcacctcgaagaactggtgctcccgcgggaagcgcacggggcgcgcaacgaagcgaaagggcgcggccccagccgcgggatcccgctctacaggcagcggctccgccgccccgggccccgcagcgaggcgggcgcacagcgcggggggcaactgcatcaccccgggcgcgggcgggcgcagcctgtcggccaccgtccgcgagccgagccggacgtgacgtcacgctcacttccgccgccgtcgggggctgcgcgggggctgtggctccgggactgcggagaacatattgtgatgttcgtgcctcagagctaaaactatgagtgaatttcggattcaccatgacgtcaatgaactgcttagcctgctgcgtgtccacggaggagatggggctgaggtctacattgacctgcttcaaaagaacaggaccccgtacgtcactaccactgtctctgctcacagtgccaaggtgagcactgcccttggtgtagcgctgtgcagggttaaaattgcagagttttctcgtactccagaagactttctaaagaaatatgatgaactgaaatctaaaaatacaaggaaccttgacccgctggtgtacctgttgtcaaagctcacggaagacaaagagactctgcagtacttacaacagaatgcaaaagaaagagctgagcttgcagccgctgctgtgggcagcagtaccaccagcatcaacgtccctgccgcggcctccaagatctccatgcaggagcttgaggaactgaggaagcagcttggcagcgtggccacaggctccacgctgcagcagtctctggaacttaaaagaaagatgcttcgagacaagcagaacaaaaaaaattcaggccagcacctccccatcttcccagcatgggtgtatgagagacctgccctgatcggggatttcctgattggtgctggcatcagcacagacaccgctttgccgataggcacgttgcccctggcctcgcaggagtcggccgtggtggaggacctgctgtacgtgctggtgggcgtggacgggaggtacgtcagtgctcagcccctggctgggaggcagagccggaccttcctcgtggaccccaacctggacctgtccatcagggagctggtgcacaggatcctcccagtggccgccagctactccgctgtgaccaggttcattgaagagaagtcttccttcgagtacgggcaggtgaaccacgccctggcggccgccatgcgcaccctggtgaaggagcacctgattctggtgtcacagctggagcagctgcacaggcagggcctcctttcgctgcagaagctctggttctacatccagccagccatgcgcaccatggacatcctggcctccctcgccacctcggtggacaaaggcgaatgtcttggggggtccacgctgagcctgctccacgacaggagcttcagctacacaggggacagccaggcgcaggagctatgcctgtacctaaccaaggcggccagtgctccctacttcgaggttctggagaagtggatctacaggggcatcatccacgacccatacagtgagtttatggtcgaggagcacgagctgcggaaggagaggatccaggaggattacaacgacaagtactgggaccagcggtacaccatcgtccagcagcagatcccgtccttcctgcagaaaatggcggacaagatcctcagcacaggaaaatatctaaatgtggtcagagagtgtggccatgacgtcacctgcccggtggctaaagagatcatctacacgttaaaagagcgggcgtatgtggagcagatcgagaaggcgtttaactacgccagcaaggtgctgctggacttcctgatggaggagaaggagctggtggctcacctcaggtccatcaagcgctacttcctcatggaccagggcgacttcttcgtgcacttcatggacctcgcggaggaggagctccggaagccggtggaggacatcacgccccctcgcctggaagcgctcctggagctggcgctgcgcatgagcacggccaacactgaccccttcaaggacgacctcaagatcgacctgatgccccatgacctcatcactcagctcttgcgcgtcctggccatcgagaccaagcaggagaaggcgatggcgcacgccgaccccacggagctggcgctgagcggcctggaggccttctctttcgactacatcgtcaagtggcccctttcgctcatcatcaacaggaaagccctcactcgctaccagatgctcttcaggcacatgttctattgcaagcacgtggagcggcagctctgcagcgtctggatcagcaacaaaaccgccaagcagcactcgctgcactccgcccagtggtttgctggggctttcactctgcggcagcgaatgctcaacttcgtccagaatattcaatactacatgatgttcgaagtgatggaaccgacctggcacatcctggagaaaaacctgaaatccgcctccaacattgacgacgtccttggccaccacacaggcttcctggacacctgcctgaaggactgcatgctcaccaaccccgagctgctgaaggtcttctccaagctcatgtctgtgtgcgtcatgttcaccaactgcatgcagaaatttacacagagcatgaaattagatggcgagctgggcgggcagacgctggagcacagcaccgtcctggggctgcccgcaggggccgaggagcgggcccggaaggagctcgccaggaagcacctggctgagcacgcagacactgtgcagctggtgtccggcttcgaggccaccatcaacaagtttgacaagaacttctcagcccacctgctggacctcctggcccggctgagcatctatagcaccagtgactgtgagcacggcatggccagcgtcatctccaggcttgacttcaatggtttctacacggagcgcctggagcgcctgtctgcagagaggagccagaaggccaccccccaagtgcctgtcctgcgggggcccccggctcctgcacccagggtcgcagtcaccgcacagtgagccctggctgtgacaggaaggaagggtgtggggtcagcagggactggtgcaaatgggtccagaattttcaaatcgaatgctctgtgttctgtctttgcagtttaaatataaagcaggaatgattgactcagctca

SEQ ID NO: 376168 - DNA, 3917 bp, Homo sapiens
agtccaaactcaagaggcagcatggagcgtggtctgcttccccactactcacggctctgcaatgtgggcaccaaggggccaacccttgcctttgccggaaaccctggagaacggtgacgtgaaatccacctgttttcctcatccccaagcaaacagaaccctgctgtaagttaatgaaaagtatagaaaaaccctgctgtaagttatgagaagtatagaaaaccatgctgtaagttaatgaaaagtatggaaaacagtctacttcggccaggcatggtggctcacacctgtaatcccagcacttagggaggtgaggtgcgtggattccttgagcccaggaattcgagaccagcctgggcgacaggacgagactagtctctacaaaaaatgtgaaaattagccgagtgtggtggcgtgcacctgtagtcccagctactcaggaggctgaggtgggaggatcgcttgagcctgagaggtcgaggctgcagtgagctgtgatcgtgccactgcactccagcctgggcaacagagcgagaccctgtttcaaaaaaaaaaaaacaaagcagtctgctttgtgcagtgttttcagtaataatccaactgtgaaaacccaactgtgaagacttagggagagagagctgctcccttagcgggtactcagcaggcagccggggagtggtgggcacctgagagctcctgatggtacccaggcagacttcggagaaggaagcgcggggccctgctgcctgggatcccagcagtggagccggctttttggagcaggaggcactgagggggtgttcaggctttccccccatgtttccccattcagggaaggggttgtacaaaagaggaacgcactgtccagtaacgctgcggcgccgtgggcagctctgagcgtggcggtgattggcagcaagtgtgtgagacttggctgtgaaccctgcagccagctctcaggtcagggtgcaggtgccctcagcacactcagcatcccaggaaaggggcggcctcgccccacctccctcccacggccacataccacaggtcccaggggtgcctccggtattgaggctgccttgcctccctttgtccgcactgtccctgtccccttgtgccacctgtgcagacttgagaatggagctcactgtggtgttcatgccggggcctgtctagctcctcaccccacgatttgaccagtgccacaccacgggaccttgtgtgacctcgggcctgcgtcctctggaaaacagctgtggagtggtgtgatgaggacaggtgccttggaaagcatcaggaccttgtgagcacgaggcagctgccagcactccacgttcccgccatgctctcctcaccgtgtgggcatccacctggccagcgccgcctccgcagtgcccctccctctggtcgctcccgcgcagcatgcgaaggtgttatctgcccgcgtcctgccttttccccacaccggcacggaggagccacgtgttcggtggtcgttcggacgtggtgatttgcagggtctcacttcgttgcctaggctggagtgcagtggcacaatctcagctcactgcagcctcgacctcccaagctcagtagagacggggattcgccgtgttgcccaggctggtcttgaactcctggagtcaagcgatctgtccaccttggcctcctaaagtgatgggattacaggcacgttgcccctggcctcgcaggagtcggccgtggtggaggacctgctgtacgtgctggtgggcgtggacgggaggtacgtcagtgctcagcccctggctgggaggcagagccggaccttcctcgtggaccccaacctggacctgtccatcagggagctggtgcacaggatcctcccagtggccgccagctactccgctgtgaccaggttcattgaagagaagtcttccttcgagtacgggcaggtgaaccacgccctggcggccgccatgcgcaccctggtgaaggagcacctgattctggtgtcacagctggagcagctgcacaggcagggcctcctttcgctgcagaagctctggttctacatccagccagccatgcgcaccatggacatcctggcctccctcgccacctcggtggacaaaggcgaatgtcttggggggtccacgctgagcctgctccacgacaggagcttcagctacacaggggacagccaggcgcaggagctatgcctgtacctaaccaaggcggccagtgctccctacttcgaggttctggagaagtggatctacaggggcatcatccacgacccatacagtgagtttatggtcgaggagcacgagctgcggaaggagaggatccaggaggattacaacgacaagtactgggaccagcggtacaccatcgtccagcagcagatcccgtccttcctgcagaaaatggcggacaagatcctcagcacaggaaaatatctaaatgtggtcagagagtgtggccatgacgtcacctgcccggtggctaaagagatcatctacacgttaaaagagcgggcgtatgtggagcagatcgagaaggcgtttaactacgccagcaaggtgctgctggacttcctgatggaggagaaggagctggtggctcacctcaggtccatcaagcgctacttcctcatggaccagggcgacttcttcgtgcacttcatggacctcgcggaggaggagctccggaagccggtggaggacatcacgccccctcgcctggaagcgctcctggagctggcgctgcgcatgagcacggccaacactgaccccttcaaggacgacctcaagatcgacctgatgccccatgacctcatcactcagctcttgcgcgtcctggccatcgagaccaagcaggagaaggcgatggcgcacgccgaccccacggagctggcgctgagcggcctggaggccttctctttcgactacatcgtcaagtggcccctttcgctcatcatcaacaggaaagccctcactcgctaccagatgctcttcaggcacatgttctattgcaagcacgtggagcggcagctctgcagcgtctggatcagcaacaaaaccgccaagcagcactcgctgcactccgcccagtggtttgctggggctttcactctgcggcagcgaatgctcaacttcgtccagaatattcaatactacatgatgttcgaagtgatggaaccgacctggcacatcctggagaaaaacctgaaatccgcctccaacattgacgacgtccttggccaccacacaggcttcctggacacctgcctgaaggactgcatgctcaccaaccccgagctgctgaaggtcttctccaagctcatgtctgtgtgcgtcatgttcaccaactgcatgcagaaatttacacagagcatgaaattagatggcgagctgggcgggcagacgctggagcacagcaccgtcctggggctgcccgcaggggccgaggagcgggcccggaaggagctcgccaggaagcacctggctgagcacgcagacactgtgcagctggtgtccggcttcgaggccaccatcaacaagtttgacaagaacttctcagcccacctgctggacctcctggcccggctgagcatctatagcaccagtgactgtgagcacggcatggccagcgtcatctccaggcttgacttcaatggtttctacacggagcgcctggagcgcctgtctgcagagaggagccagaaggccaccccccaagtgcctgtcctgcgggggcccccggctcctgcacccagggtcgcagtcaccgcacagtgagccctggctgtgacaggaaggaagggtgtggggtcagcagggactggtgcaaatgggtccagaattttcaaatcgaatgctctgtgttctgtctttgcagtttaaatataaagcaggaatgattgactcagctca

SEQ ID NO: 376169 - DNA, 3016 bp, Homo sapiens
ccaggctccggccccgcctcgccgccgtaggccccactggatcctacaactactttttccctcttttgctcacgcacctcgaagaactggtgctcccgcgggaagcgcacggggcgcgcaacgaagcgaaagggcgcggccccagccgcgggatcccgctctacaggcagcggctccgccgccccgggccccgcagcgaggcgggcgcacagcgcggggggcaactgcatcaccccgggcgcgggcgggcgcagcctgtcggccaccgtccgcgagccgagccggacgtgacgtcacgctcacttccgccgccgtcgggggctgcgcgggggctgtggctccgggactgcggagaacatattgtgatgttcgtgcctcagagctaaaactatgagtgaatttcggattcaccatgacgtcaatgaactgcttagcctgctgcgtgtccacggaggagatggggctgaggtctacattgacctgcttcaaaagaacaggaccccgtacgtcactaccactgtctctgctcacagtgccaaggttaaaattgcagagttttctcgtactccagaagactttctaaagaaatatgatgaactgaaatctaaaaatacaaggaaccttgacccgctggtgtacctgttgtcaaagctcacggaagacaaagagactctgcagtacttacaacagaatgcaaaagaaagagctgagcttgcagccgctgctgtgggcagcagtaccaccagcatcaacgtccctgccgcggcctccaagatctccatgcaggagcttgaggaactgaggaagcagcttggcagcgtggccacaggctccacgctgcagcagtctctggaacttaaaagaaagatgcttcgagacaagcagaacaaaaaaaattcaggccagcacctccccatcttcccagcatgggtgtatgagagacctgccctgatcggggatttcctgattggtgctggcatcagcacagacaccgctttgccgataggcacgttgcccctggcctcgcaggagtcggccgtggtggaggacctgctgtacgtgctggtgggcgtggacgggaggtacgtcagtgctcagcccctggctgggaggcagagccggaccttcctcgtggaccccaacctggacctgtccatcagggagctggtgcacaggatcctcccagtggccgccagctactccgctgtgaccaggttcattgaagagaagtcttccttcgagtacgggcaggtgaaccacgccctggcggccgccatgcgcaccctggtgaaggagcacctgattctggtgtcacagctggagcagctgcacaggcagggcctcctttcgctgcagaagctctggttctacatccagccagccatgcgcaccatggacatcctggcctccctcgccacctcggtggacaaaggcgaatgtcttggggggtccacgctgagcctgctccacgacaggagcttcagctacacaggggacagccaggcgcaggagctatgcctgtacctaaccaaggcggccagtgctccctacttcgaggttctggagaagtggatctacaggggcatcatccacgacccatacagtgagtttatggtcgaggagcacgagctgcggaaggagaggatccaggaggattacaacgacaagtactgggaccagcggtacaccatcgtccagcagcagatcccgtccttcctgcagaaaatggcggacaagatcctcagcacaggaaaatatctaaatgtggtcagagagtgtggccatgacgtcacctgcccggtggctaaagagatcatctacacgttaaaagagcgggcgtatgtggagcagatcgagaaggcgtttaactacgccagcaaggtgctgctggacttcctgatggaggagaaggagctggtggctcacctcaggtccatcaagcgctacttcctcatggaccagggcgacttcttcgtgcacttcatggacctcgcggaggaggagctccggaagccggtggaggacatcacgccccctcgcctggaagcgctcctggagctggcgctgcgcatgagcacggccaacactgaccccttcaaggacgacctcaagatcgacctgatgccccatgacctcatcactcagctcttgcgcgtcctggccatcgagaccaagcaggagaaggcgatggcgcacgccgaccccacggagctggcgctgagcggcctggaggccttctctttcgactacatcgtcaagtggcccctttcgctcatcatcaacaggaaagccctcactcgctaccagatgctcttcaggcacatgttctattgcaagcacgtggagcggcagctctgcagcgtctggatcagcaacaaaaccgccaagcagcactcgctgcactccgcccagtggtttgctggggctttcactctgcggcagcgaatgctcaacttcgtccagaatattcaatactacatgatgttcgaagtgatggaaccgacctggcacatcctggagaaaaacctgaaatccgcctccaacattgacgacgtccttggccaccacacaggcttcctggacacctgcctgaaggactgcatgctcaccaaccccgagctgctgaaggtcttctccaagctcatgtctgtgtgcgtcatgttcaccaactgcatgcagaaatttacacagagcatgaaattagatggcgagctgggcgggcagacgctggagcacagcaccgtcgcttgacttcaatggtttctacacggagcgcctggagcgcctgtctgcagagaggagccagaaggccaccccccaagtgcctgtcctgcgggggcccccggctcctgcacccagggtcgcagtcaccgcacagtgagccctggctgtgacaggaaggaagggtgtggggtcagcagggactggtgcaaatgggtccagaattttcaaatcgaatgctctgtgttctgtctttgcagtttaaatataaagcaggaatgattgactcagctca

SEQ ID NO: 376170 - DNA, 3124 bp, Homo sapiens
ccaggctccggccccgcctcgccgccgtaggccccactggatcctacaactactttttccctcttttgctcacgcacctcgaagaactggtgctcccgcgggaagcgcacggggcgcgcaacgaagcgaaagggcgcggccccagccgcgggatcccgctctacaggcagcggctccgccgccccgggccccgcagcgaggcgggcgcacagcgcggggggcaactgcatcaccccgggcgcgggcgggcgcagcctgtcggccaccgtccgcgagccgagccggacgtgacgtcacgctcacttccgccgccgtcgggggctgcgcgggggctgtggctccgggactgcggagaacatattgtgatgttcgtgcctcagagctaaaactatgagtgaatttcggattcaccatgacgtcaatgaactgcttagcctgctgcgtgtccacggaggagatggggctgaggtctacattgacctgcttcaaaagaacaggaccccgtacgtcactaccactgtctctgctcacagtgccaaggttaaaattgcagagttttctcgtactccagaagactttctaaagaaatatgatgaactgaaatctaaaaatacaaggaaccttgacccgctggtgtacctgttgtcaaagctcacggaagacaaagagactctgcagtacttacaacagaatgcaaaagaaagagctgagcttgcagccgctgctgtgggcagcagtaccaccagcatcaacgtccctgccgcggcctccaagatctccatgcaggagcttgaggaactgaggaagcagcttggcagcgtggccacaggctccacgctgcagcagtctctggaacttaaaagaaagatgcttcgagacaagcagaacaaaaaaaattcaggccagcacctccccatcttcccagcatgggtgtatgagagacctgccctgatcggggatttcctgattggtgctggcatcagcacagacaccgctttgccgataggcacgttgcccctggcctcgcaggagtcggccgtggtggaggacctgctgtacgtgctggtgggcgtggacgggaggtacgtcagtgctcagcccctggctgggaggcagagccggaccttcctcgtggaccccaacctggacctgtccatcagggagctggtgcacaggatcctcccagtggccgccagctactccgctgtgaccaggttcattgaagagaagtcttccttcgagtacgggcaggtgaaccacgccctggcggccgccatgcgcaccctggtgaaggagcacctgattctggtgtcacagctggagcagctgcacaggcagggcctcctttcgctgcagaagctctggttctacatccagccagccatgcgcaccatggacatcctggcctccctcgccacctcggtggacaaaggcgaatgtcttggggggtccacgctgagcctgctccacgacaggagcttcagctacacaggggacagccaggcgcaggagctatgcctgtacctaaccaaggcggccagtgctccctacttcgaggttctggagaagtggatctacaggggcatcatccacgacccatacagtgagtttatggtcgaggagcacgagctgcggaaggagaggatccaggaggattacaacgacaagtactgggaccagcggtacaccatcgtccagcagcagatcccgtccttcctgcagaaaatggcggacaagatcctcagcacaggaaaatatctaaatgtggtcagagagtgtggccatgacgtcacctgcccggtggctaaagagatcatctacacgttaaaagagcgggcgtatgtggagcagatcgagaaggcgtttaactacgccagcaaggtgctgctggacttcctgatggaggagaaggagctggtggctcacctcaggtccatcaagcgctacttcctcatggaccagggcgacttcttcgtgcacttcatggacctcgcggaggaggagctccggaagccggtggaggacatcacgccccctcgcctggaagcgctcctggagctggcgctgcgcatgagcacggccaacactgaccccttcaaggacgacctcaagatcgacctgatgccccatgacctcatcactcagctcttgcgcgtcctggccatcgagaccaagcaggagaaggcgatggcgcacgccgaccccacggagctggcgctgagcggcctggaggccttctctttcgactacatcgtcaagtggcccctttcgctcatcatcaacaggaaagccctcactcgctaccagatgctcttcaggcacatgttctattgcaagcacgtggagcggcagctctgcagcgtctggatcagcaacaaaaccgccaagcagcactcgctgcactccgcccagtggtgcgttcttcctctgcccccgcatgccctcctgaagcagcgctcgctgcactctgcccagtggtgcagcgccccccttgtgccctcctggtagacagctttctaggcttctggaagtgtcatctggaagcgcacgttggtggctttagatccataatgcttcattgcttcattttcctgtcttggggctgcacggcgctgccgtccaccccacaggggatgctggctctgtccctcagccctttctggagccttgtggtgactgcacgggcatggagactgcccaggtcggtgtgcaggacactagctcctcccgagagcggacagccacatcttgctgggaccagaggtgctttgcagccggtctgtgcctctagggtgttgaaaaaaggggtcgatggcagagcttcataagaatttgtccagtcgggtgcagtggctcatgcctgtaatctcagcactttgggaagctgaggagggaggattgtttgagcccacaagttcgagacccgcctggacaatgtaacaagagctcatctcttaaaaaaaaagaaaattattttaattagccgggaatgcctgtagttccagcaactcaggaggctgaggtgggagggttgcttgagtccaggaggtcaaggctgcagtgagccaagatcgtgccactgcactgcagtctgagcgacagcaagaccctgtctctcgaagaa

SEQ ID NO: 376171 - DNA, 1763 bp, Homo sapiens
tctagtcaggcgcggttgatcggacgagccaggcgcaggagctatgcctgtacctaaccaaggcggccagtgctccctacttcgaggttctggagaagtggatctacaggggcatcatccacgacccatacagtgagtttatggtcgaggagcacgagctgcggaaggagaggatccaggaggattacaacgacaagtactgggaccagcggtacaccatcgtccagcagcagatcccgtccttcctgcagaaaatggcggacaagatcctcagcacaggaaaatatctaaatgtggtcagagagtgtggccatgacgtcacctgcccggtggctaaagagatcatctacacgttaaaagagcgggcgtatgtggagcagatcgagaaggcgtttaactacgccagcaaggtgctgctggacttcctgatggaggagaaggagctggtggctcacctcaggtccatcaagcgctacttcctcatggaccagggcgacttcttcgtgcacttcatggacctcgcggaggaggagctccggaagccggtggaggacatcacgccccctcgcctggaagcgctcctggagctggcgctgcgcatgagcacggccaacactgaccccttcaaggacgacctcaagatcgacctgatgccccatgacctcatcactcagctcttgcgcgtcctggccatcgagaccaagcaggagaaggcgatggcgcacgccgaccccacggagctggcgctgagcggcctggaggccttctctttcgactacatcgtcaagtggcccctttcgctcatcatcaacaggaaagccctcactcgctaccagatgctcttcaggcacatgttctattgcaagcacgtggagcggcagctctgcagcgtctggatcagcaacaaaaccgccaagcagcactcgctgcactccgcccagtggtttgctggggctttcactctgcggcagcgaatgctcaacttcgtccagaatattcaatactacatgatgttcgaagtgatggaaccgacctggcacatcctggagaaaaacctgaaatccgcctccaacattgacgacgtccttggccaccacacaggcttcctggacacctgcctgaaggactgcatgctcaccaaccccgagctgctgaaggtcttctccaagctcatgtctgtgtgcgtcatgttcaccaactgcatgcagaaatttacacagagcatgaaattagatggcgagctgggcgggcagacgctggagcacagcaccgtcctggggctgcccgcaggggccgaggagcgggcccggaaggagctcgccaggaagcacctggctgagcacgcagacactgtgcagctggtgtccggcttcgaggccaccatcaacaagtttgacaagaacttctcagcccacctgctggacctcctggcccggctgagcatctatagcaccagtgactgtgagcacggcatggccagcgtcatctccaggcttgacttcaatggtttctacacggagcgcctggagcgcctgtctgcagagaggagccagaaggccaccccccaagtgcctgtcctgcgggggcccccggctcctgcacccagggtcgcagtcaccgcacagtgagccctggctgtgacaggaaggaagggtgtggggtcagcagggactggtgcaaatgggtccagaattttcaaatcgaatgctctgtgttctgtctttgcagtttaaatataaagcaggaatgattgactcagctca

SEQ ID NO: 376172 - DNA, 2383 bp, Homo sapiens
ccaggctccggccccgcctcgccgccgtaggccccactggatcctacaactactttttccctcttttgctcacgcacctcgaagaactggtgctcccgcgggaagcgcacggggcgcgcaacgaagcgaaagggcgcggccccagccgcgggatcccgctctacaggcagcggctccgccgccccgggccccgcagcgaggcgggcgcacagcgcggggggcaactgcatcaccccgggcgcgggcgggcgcagcctgtcggccaccgtccgcgagccgagccggacgtgacgtcacgctcacttccgccgccgtcgggggctgcgcgggggctgtggctccgggactgcggagaacatattgtgatgttcgtgcctcagagctaaaactatgagtgaatttcggattcaccatgacgtcaatgaactgcttagcctgctgcgtgtccacggaggagatggggctgaggtctacattgacctgcttcaaaagaacaggaccccgtacgtcactaccactgtctctgctcacagtgccaaggttaaaattgcagagttttctcgtactccagaagactttctaaagaaatatgatgaactgaaatctaaaaatacaaggaaccttgacccgctggtgtacctgttgtcaaagctcacggaagacaaagagactctgcagtacttacaacagaatgcaaaagaaagagctgagcttgcagccgctgctgtgggcagcagtaccaccagcatcaacgtccctgccgcggcctccaagatctccatgcaggagcttgaggaactgaggaagcagcttggcagcgtggccacaggctccacgctgcagcagtctctggaacttaaaagaaagatgcttcgagacaagcagaacaaaaaaaattcaggccagcacctccccatcttcccagcatgggtgtatgagagacctgccctgatcggggatttcctgattggtgctggcatcagcacagacaccgctttgccgataggcacgttgcccctggcctcgcaggagtcggccgtggtggaggacctgctgtacgtgctggtgggcgtggacgggaggtacgtcagtgctcagcccctggctgggaggcagagccggaccttcctcgtggaccccaacctggacctgtccatcagggagctggtgcacaggatcctcccagtggccgccagctactccgctgtgaccaggttcattgaagagaagtcttccttcgagtacgggcaggtgaaccacgccctggcggccgccatgcgcaccctggtgaaggagcacctgattctggtgtcacagctggagcagctgcacaggcagggcctcctttcgctgcagaagctctggttctacatccagccagccatgcgcaccatggacatcctggcctccctcgccacctcggtggacaaaggcgaatgtcttggggggtccacgctgagcctgctccacgacaggagcttcagctacacaggggacagccaggcgcaggagctatgcctgtacctaaccaaggcggccagtgctccctacttcgaggttctggagaagtggatctacaggggcatcatccacgacccatacagtgagtttatggtcgaggagcacgagctgcggaaggagaggatccaggaggattacaacgacaagtactgggaccagcggtacaccatcgtccagcagcagatcccgtccttcctgcagaaaatggcggacaagatcctcagcacaggaaaatatctaaatgtggtcagagagtgtggccatgacgtcacctgcccggtggctaaagagatcatctacacgttaaaagagcgggcgtatgtggagcagatcgagaaggcgtttaactacgccagcaaggtgctgctggacttcctgatggaggagaaggagctggtggctcacctcaggtccatcaagcgctacttcctcatggaccagggcgacttcttcgtgcacttcatggacctcgcggaggaggagctccggaagccggtggaggacatcacgccccctcgcctggaagcgctcctggagctggcgctgcgcatgagcacggccaacactgaccccttcaaggacgacctcaagctcttgcgcgtcctggccatcgagaccaagcaggagaaggcgatggcgcacgccgaccccacggagctggcgctgagcggcctggaggccttctctttcgactacatcgtcaagtggcccctttcgctcatcatcaacaggaaaagcctcaatcggtaccagaagtcttcgggggcctgtgctatggaagcccgtgggcggcggcctggcggctgggtagacaaaacgccaagagaccgcgcccgcccaaggggggggggggacaccgcgg

SEQ ID NO: 376173 - DNA, 308 bp, Homo sapiens
gcgctgttgtgggggaggggttaggtcccatcctgatgaccatggggacgtctgcatcgcttctaaagagagcgcccgccttggtgacaactccgtgcccaactcagttttggagggtctgtgagtcaccatccagggtcctgactcatctcctcctggggcaaaagttcccctctgggatgtggggttcaagtgagtcatttgcttcctgtttgggatgagactcagaatatcggacattgtatgtgcctgcagcttgcctttttgaggaagtctgacagccaggttcattgaagagaagtcttcct

SEQ ID NO: 376174 - DNA, 3234 bp, Homo sapiens
ccaggctccggccccgcctcgccgccgtaggccccactggatcctacaactactttttccctcttttgctcacgcacctcgaagaactggtgctcccgcgggaagcgcacggggcgcgcaacgaagcgaaagggcgcggccccagccgcgggatcccgctctacaggcagcggctccgccgccccgggccccgcagcgaggcgggcgcacagcgcggggggcaactgcatcaccccgggcgcgggcgggcgcagcctgtcggccaccgtccgcgagccgagccggacgtgacgtcacgctcacttccgccgccgtcgggggctgcgcgggggctgtggctccgggactgcggagaacatattgtgatgttcgtgcctcagagctaaaactatgagtgaatttcggattcaccatgacgtcaatgaactgcttagcctgctgcgtgtccacggaggagatggggctgaggtctacattgacctgcttcaaaagaacaggaccccgtacgtcactaccactgtctctgctcacagtgccaaggttaaaattgcagagttttctcgtactccagaagactttctaaagaaatatgatgaactgaaatctaaaaatacaaggaaccttgacccgctggtgtacctgttgtcaaagctcacggaagacaaagagactctgcagtacttacaacagaatgcaaaagaaagagctgagcttgcagccgctgctgtgggcagcagtaccaccagcatcaacgtccctgccgcggcctccaagatctccatgcaggagcttgaggaactgaggaagcagcttggcagcgtggccacaggctccacgctgcagcagtctctggaacttaaaagaaagatgcttcgagacaagcagaacaaaaaaaattcaggccagcacctccccatcttcccagcatgggtgtatgagagacctgccctgatcggggatttcctgattggtgctggcatcagcacagacaccgctttgccgataggcacgttgcccctggcctcgcaggagtcggccgtggtggaggacctgctgtacgtgctggtgggcgtggacgggaggtacgtcagtgctcagcccctggctgggaggcagagccggaccttcctcgtggaccccaacctggacctgtccatcagggagctggtgcacaggatcctcccagtggccgccagctactccgctgtgaccaggttcattgaagagaagtcttccttcgagtacgggcaggtgaaccacgccctggcggccgccatgcgcaccctggtgaaggagcacctgattctggtgtcacagctggagcagctgcacaggcagggcctcctttcgctgcagaagctctggttctacatccagccagccatgcgcaccatggacatcctggcctccctcgccacctcggtggacaaaggcgaatgtcttggggggtccacgctgagcctgctccacgacaggagcttcagctacacaggggacagccaggcgcaggagctatgcctgtacctaaccaaggcggccagtgctccctacttcgaggttctggagaagtggatctacaggggcatcatccacgacccatacagtgagtttatggtcgaggagcacgagctgcggaaggagaggatccaggaggattacaacgacaagtactgggaccagcggtacaccatcgtccagcagcagatcccgtccttcctgcagaaaatggcggacaagatcctcagcacaggaaaatatctaaatgtggtcagagagtgtggccatgacgtcacctgcccggtggctaaagagatcatctacacgttaaaagagcgggcgtatgtggagcagatcgagaaggcgtttaactacgccagcaaggtgctgctggacttcctgatggaggagaaggagctggtggctcacctcaggtccatcaagcgctacttcctcatggaccagggcgacttcttcgtgcacttcatggacctcgcggaggaggagctccggaagccggtggaggacatcacgccccctcgcctggaagcgctcctggagctggcgctgcgcatgagcacggccaacactgaccccttcaaggacgacctcaagatcgacctgatgccccatgacctcatcactcagctcttgcgcgtcctggccatcgagaccaagcaggagaaggcgatggcgcacgccgaccccacggagctggcgctgagcggcctggaggccttctctttcgactacatcgtcaagtggcccctttcgctcatcatcaacaggaaagccctcactcgctaccagatgctcttcaggcacatgttctattgcaagcacgtggagcggcagctctgcagcgtctggatcagcaacaaaaccgccaagcagcactcgctgcactccgcccagtggtttgctggggctttcactctgcggcagcgaatgctcaacttcgtccagaatattcaatactacatgatgttcgaagtgatggaaccgacctggcacatcctggagaaaaacctgaaatccgcctccaacattgacgacgtccttggccaccacacaggcttcctggacacctgcctgaaggactgcatgctcaccaaccccgagctgctgaaggtcttctccaagctcatgtctgtgtgcgtcatgttcaccaactgcatgcagaaatttacacagagcatgaaattagatggcgagctgggcgggcagacgctggagcacagcaccgtcctggggctgcccgcaggggccgaggagcgggcccggaaggagctcgccaggaagcacctggctgagcacgcagacactgtgcagctggtgtccggcttcgaggccaccatcaacaagtttgacaagaacttctcagcccacctgctggacctcctggcccggctgagcatctatagcaccagtgactgtgagcacggcatggccagcgtcatctccaggcttgacttcaatggtttctacacggagcgcctggagcgcctgtctgcagagaggagccagaaggccaccccccaagtgcctgtcctgcgggggcccccggctcctgcacccagggtcgcagtcaccgcacagtgagccctggctgtgacaggaaggaagggtgtggggtcagcagggactggtgcaaatgggtccagaattttcaaatcgaatgctctgtgttctgtctttgcagtttaaatataaagcaggaatgattgactcagctca

SEQ ID NO: 376175 - DNA, 780 bp, Homo sapiens
  misc_feature (16)..(16): n is a, c, g, or t
  misc_feature (41)..(41): n is a, c, g, or t
  misc_feature (49)..(49): n is a, c, g, or t
gctaggtacgagcctngggttactcggacgagggagagagngagagagnactagcacatcctggagaaaaacctgaaatccgcctccaacattgacgacgtccttggccaccacacaggcttcctggacacctgcctgaaggactgcatgctcaccaaccccgagctgctgaaggtcttctccaagctcatgtctgtgtgcgtcatgttcaccaactgcatgcagaaatttacacagagcatgaaattagatggcgagctgggcgggcagacgctggagcacagcaccgtcctggggctgcccgcaggggccgaggagcgggcccggaaggagctcgccaggaagcacctggctgagcacgcagacactgtgcagctggtgtccggcttcgaggccaccatcaacaagtttgacaagaacttctcagcccacctgctggacctcctggcccggctgagcatctatagcaccagtgactgtgagcacggcatggccagcgtcatctccaggcttgacttcaatggtttctacacggagcgcctggagcgcctgtctgcagagaggagccagaaggccaccccccaagtgcctgtcctgcgggggcccccggctcctgcacccagggtcgcagtcaccgcacagtgagccctggctgtgacaggaaggaagggtgtggggtcagcagggactggtgcaaatgggtccagaattttcaaatcgaatgctctgtgttctgtctttgcagtttaaatataaagcaggaatgattgactcagctca

SEQ ID NO: 376176 - DNA, 289 bp, Homo sapiens
gggccgtggtgtcaacgcaccgtgttgggcacgcaccgtgttgggccaacgttggccaacgcaacttctcagcccacctgctggacctcctggcccggctgagcatctatagcaccagtgactgtgagcacggcatggccagcgtcatctccagaggtgggtgggcgccaccccggctcagcccttcctcagctcagtccagcgcctgcccctgcccagcaccgccctggctcagcccttcctcagctcagtccagcacctgcccctgcccaacaccgccctggcccag

SEQ ID NO: 376177 - DNA, 4001 bp, Homo sapiens
agtccaaactcaagaggcagcatggagcgtggtctgcttccccactactcacggctctgcaatgtgggcaccaaggggccaacccttgcctttgccggaaaccctggagaacggtgacgtgaaatccacctgttttcctcatccccaagcaaacagaaccctgctgtaagttaatgaaaagtatagaaaaaccctgctgtaagttatgagaagtatagaaaaccatgctgtaagttaatgaaaagtatggaaaacagtctacttcggccaggcatggtggctcacacctgtaatcccagcacttagggaggtgaggtgcgtggattccttgagcccaggaattcgagaccagcctgggcgacaggacgagactagtctctacaaaaaatgtgaaaattagccgagtgtggtggcgtgcacctgtagtcccagctactcaggaggctgaggtgggaggatcgcttgagcctgagaggtcgaggctgcagtgagctgtgatcgtgccactgcactccagcctgggcaacagagcgagaccctgtttcaaaaaaaaaaaaacaaagcagtctgctttgtgcagtgttttcagtaataatccaactgtgaaaacccaactgtgaagacttagggagagagagctgctcccttagcgggtactcagcaggcagccggggagtggtgggcacctgagagctcctgatggtacccaggcagacttcggagaaggaagcgcggggccctgctgcctgggatcccagcagtggagccggctttttggagcaggaggcactgagggggtgttcaggctttccccccatgtttccccattcagggaaggggttgtacaaaagaggaacgcactgtccagtaacgctgcggcgccgtgggcagctctgagcgtggcggtgattggcagcaagtgtgtgagacttggctgtgaaccctgcagccagctctcaggtcagggtgcaggtgccctcagcacactcagcatcccaggaaaggggcggcctcgccccacctccctcccacggccacataccacaggtcccaggggtgcctccggtattgaggctgccttgcctccctttgtccgcactgtccctgtccccttgtgccacctgtgcagacttgagaatggagctcactgtggtgttcatgccggggcctgtctagctcctcaccccacgatttgaccagtgccacaccacgggaccttgtgtgacctcgggcctgcgtcctctggaaaacagctgtggagtggtgtgatgaggacaggtgccttggaaagcatcaggaccttgtgagcacgaggcagctgccagcactccacgttcccgccatgctctcctcaccgtgtgggcatccacctggccagcgccgcctccgcagtgcccctccctctggtcgctcccgcgcagcatgcgaaggtgttatctgcccgcgtcctgccttttccccacaccggcacggaggagccacgtgttcggtggtcgttcggacgtggtgatttgcaggtgacatcgcaggtgttgagatgacactgaggatgttgaatattggggaggtgaagcaactgactctttttttgcttgagacagggtctcacttcgttgcctaggctggagtgcagtggcacaatctcagctcactgcagcctcgacctcccaagctcagtagagacggggattcgccgtgttgcccaggctggtcttgaactcctggagtcaagcgatctgtccaccttggcctcctaaagtgatgggattacaggcacgttgcccctggcctcgcaggagtcggccgtggtggaggacctgctgtacgtgctggtgggcgtggacgggaggtacgtcagtgctcagcccctggctgggaggcagagccggaccttcctcgtggaccccaacctggacctgtccatcagggagctggtgcacaggatcctcccagtggccgccagctactccgctgtgaccaggttcattgaagagaagtcttccttcgagtacgggcaggtgaaccacgccctggcggccgccatgcgcaccctggtgaaggagcacctgattctggtgtcacagctggagcagctgcacaggcagggcctcctttcgctgcagaagctctggttctacatccagccagccatgcgcaccatggacatcctggcctccctcgccacctcggtggacaaaggcgaatgtcttggggggtccacgctgagcctgctccacgacaggagcttcagctacacaggggacagccaggcgcaggagctatgcctgtacctaaccaaggcggccagtgctccctacttcgaggttctggagaagtggatctacaggggcatcatccacgacccatacagtgagtttatggtcgaggagcacgagctgcggaaggagaggatccaggaggattacaacgacaagtactgggaccagcggtacaccatcgtccagcagcagatcccgtccttcctgcagaaaatggcggacaagatcctcagcacaggaaaatatctaaatgtggtcagagagtgtggccatgacgtcacctgcccggtggctaaagagatcatctacacgttaaaagagcgggcgtatgtggagcagatcgagaaggcgtttaactacgccagcaaggtgctgctggacttcctgatggaggagaaggagctggtggctcacctcaggtccatcaagcgctacttcctcatggaccagggcgacttcttcgtgcacttcatggacctcgcggaggaggagctccggaagccggtggaggacatcacgccccctcgcctggaagcgctcctggagctggcgctgcgcatgagcacggccaacactgaccccttcaaggacgacctcaagatcgacctgatgccccatgacctcatcactcagctcttgcgcgtcctggccatcgagaccaagcaggagaaggcgatggcgcacgccgaccccacggagctggcgctgagcggcctggaggccttctctttcgactacatcgtcaagtggcccctttcgctcatcatcaacaggaaagccctcactcgctaccagatgctcttcaggcacatgttctattgcaagcacgtggagcggcagctctgcagcgtctggatcagcaacaaaaccgccaagcagcactcgctgcactccgcccagtggtttgctggggctttcactctgcggcagcgaatgctcaacttcgtccagaatattcaatactacatgatgttcgaagtgatggaaccgacctggcacatcctggagaaaaacctgaaatccgcctccaacattgacgacgtccttggccaccacacaggcttcctggacacctgcctgaaggactgcatgctcaccaaccccgagctgctgaaggtcttctccaagctcatgtctgtgtgcgtcatgttcaccaactgcatgcagaaatttacacagagcatgaaattagatggcgagctgggcgggcagacgctggagcacagcaccgtcctggggctgcccgcaggggccgaggagcgggcccggaaggagctcgccaggaagcacctggctgagcacgcagacactgtgcagctggtgtccggcttcgaggccaccatcaacaagtttgacaagaacttctcagcccacctgctggacctcctggcccggctgagcatctatagcaccagtgactgtgagcacggcatggccagcgtcatctccaggcttgacttcaatggtttctacacggagcgcctggagcgcctgtctgcagagaggagccagaaggccaccccccaagtgcctgtcctgcgggggcccccggctcctgcacccagggtcgcagtcaccgcacagtgagccctggctgtgacaggaaggaagggtgtggggtcagcagggactggtgcaaatgggtccagaattttcaaatcgaatgctctgtgttctgtctttgcagtttaaatataaagcaggaatgattgactcagctca

SEQ ID NO: 376178 - DNA, 2722 bp, Homo sapiens
ggcccgtggccgtcctcgtgaggaagcttagctgtgtgtcctgcagccgtctcatcctctctggatagaaattatcaagagtttcttaacgtttaagtgatagctttttaaagacaaggttttttgtcccagagtaactcagacttaccaagttgtacttaccaatgttgaaagtgcagcttctgctggagtcgccttttcaactcctaacttcaccttttcaaatgtcagccatgtatctgagcattgcggagccgagtgtggtgagatcttgacaccagccaccacgcctcccaggccggccccgtcctgcggcggttggaactcagcctgtggctccccagtggggtcagtcaaagccaagtgcagtggctgaccttttatacccataaacaaatatgagcaagagtgagactgacccgcagatgagggcacgtggctgtgggggcatgggagtgggggctgcggagccacagcgctgtctgtgcccgcaggcacgttgcccctggcctcgcaggagtcggccgtggtggaggacctgctgtacgtgctggtgggcgtggacgggaggtacgtcagtgctcagcccctggctgggaggcagagccggaccttcctcgtggaccccaacctggacctgtccatcagggagctggtgcacaggatcctcccagtggccgccagctactccgctgtgaccaggttcattgaagagaagtcttccttcgagtacgggcaggtgaaccacgccctggcggccgccatgcgcaccctggtgaaggagcacctgattctggtgtcacagctggagcagctgcacaggcagggcctcctttcgctgcagaagctctggttctacatccagccagccatgcgcaccatggacatcctggcctccctcgccacctcggtggacaaaggcgaatgtcttggggggtccacgctgagcctgctccacgacaggagcttcagctacacaggggacagccaggcgcaggagctatgcctgtacctaaccaaggcggccagtgctccctacttcgaggttctggagaagtggatctacaggggcatcatccacgacccatacagtgagtttatggtcgaggagcacgagctgcggaaggagaggatccaggaggattacaacgacaagtactgggaccagcggtacaccatcgtccagcagcagatcccgtccttcctgcagaaaatggcggacaagatcctcagcacaggaaaatatctaaatgtggtcagagagtgtggccatgacgtcacctgcccggtggctaaagagatcatctacacgttaaaagagcgggcgtatgtggagcagatcgagaaggcgtttaactacgccagcaaggtgctgctggacttcctgatggaggagaaggagctggtggctcacctcaggtccatcaagcgctacttcctcatggaccagggcgacttcttcgtgcacttcatggacctcgcggaggaggagctccggaagccggtggaggacatcacgccccctcgcctggaagcgctcctggagctggcgctgcgcatgagcacggccaacactgaccccttcaaggacgacctcaagatcgacctgatgccccatgacctcatcactcagctcttgcgcgtcctggccatcgagaccaagcaggagaaggcgatggcgcacgccgaccccacggagctggcgctgagcggcctggaggccttctctttcgactacatcgtcaagtggcccctttcgctcatcatcaacaggaaagccctcactcgctaccagatgctcttcaggcacatgttctattgcaagcacgtggagcggcagctctgcagcgtctggatcagcaacaaaaccgccaagcagcactcgctgcactccgcccagtggtttgctggggctttcactctgcggcagcgaatgctcaacttcgtccagaatattcaatactacatgatgttcgaagtgatggaaccgacctggcacatcctggagaaaaacctgaaatccgcctccaacattgacgacgtccttggccaccacacaggcttcctggacacctgcctgaaggactgcatgctcaccaaccccgagctgctgaaggtcttctccaagctcatgtctgtgtgcgtcatgttcaccaactgcatgcagaaatttacacagagcatgaaattagatggcgagctgggcgggcagacgctggagcacagcaccgtcctggggctgcccgcaggggccgaggagcgggcccggaaggagctcgccaggaagcacctggctgagcacgcagacactgtgcagctggtgtccggcttcgaggccaccatcaacaagtttgacaagaacttctcagcccacctgctggacctcctggcccggctgagcatctatagcaccagtgactgtgagcacggcatggccagcgtcatctccaggcttgacttcaatggtttctacacggagcgcctggagcgcctgtctgcagagaggagccagaaggccaccccccaagtgcctgtcctgcgggggcccccggctcctgcacccagggtcgcagtcaccgcacagtgagccctggctgtgacaggaaggaagggtgtggggtcagcagggactggtgcaaatgggtccagaattttcaaatcgaatgctctgtgttctgtctttgcagtttaaatataaagcaggaatgattgactcagctca

SEQ ID NO: 376179 - DNA, 3203 bp, Homo sapiens
ccaggctccggccccgcctcgccgccgtaggccccactggatcctacaactactttttccctcttttgctcacgcacctcgaagaactggtgctcccgcgggaagcgcacggggcgcgcaacgaagcgaaagggcgcggccccagccgcgggatcccgctctacaggcagcggctccgccgccccgggccccgcagcgaggcgggcgcacagcgcggggggcaactgcatcaccccgggcgcgggcgggcgcagcctgtcggccaccgtccgcgagccgagccggacgtgacgtcacgctcacttccgccgccgtcgggggctgcgcgggggctgtggctccgggactgcggagaacatattgtgatgttcgtgcctcagagctaaaactatgagtgaatttcggattcaccatgacgtcaatgaactgcttagcctgctgcgtgtccacggaggagatggggctgaggtctacattgacctgcttcaaaagaacaggaccccgtacgtcactaccactgtctctgctcacagtgccaaggttaaaattgcagagttttctcgtactccagaagactttctaaagaaatatgatgaactgaaatctaaaaatacaaggaaccttgacccgctggtgtacctgttgtcaaagctcacggaagacaaagagactctgcagtacttacaacagaatgcaaaagaaagagctgagcttgcagccgctgctgtgggcagcagtaccaccagcatcaacgtccctgccgcggcctccaagatctccatgcaggagcttgaggaactgaggaagcagcttggcagcgtggccacaggctccacgctgcagcagtctctggaacttaaaagaaagatgcttcgagacaagcagaacaaaaaaaattcaggccagcacctccccatcttcccagcatgggtgtatgagagacctgccctgatcggggatttcctgattggtgctggcatcagcacagacaccgctttgccgataggcacgttgcccctggcctcgcaggagtcggccgtggtggaggacctgctgtacgtgctggtgggcgtggacgggaggtacgtcagtgctcagcccctggctgggaggcagagccggaccttcctcgtggaccccaacctggacctgtccatcagggagctggtgcacaggatcctcccagtggccgccagctactccgctgtgaccaggttcattgaagagaagtcttccttcgagtacgggcaggtgaaccacgccctggcggccgccatgcgcaccctggtgaaggagcacctgattctggtgtcacagctggagcagctgcacaggcagggcctcctttcgctgcagaagctctggttctacatccagccagccatgcgcaccatggacatcctggcctccctcgccacctcggtggacaaaggcgaatgtcttggggggtccacgctgagcctgctccacgacaggagcttcagctacacaggggacagccaggcgcaggagctatgcctgtacctaaccaaggcggccagtgctccctacttcgaggttctggagaagtggatctacaggggcatcatccacgacccatacagtgagtttatggtcgaggagcacgagctgcggaaggagaggatccaggaggattacaacgacaagtactgggaccagcggtacaccatcgtccagcagcagatcccgtccttcctgcagaaaatggcggacaagatcctcagcacaggaaaatatctaaatgtggtcagagagtgtggccatgacgtcacctgcccggtggctaaagagatcatctacacgttaaaagagcgggcgtatgtggagcagatcgagaaggcgtttaactacgccagcaaggtgctgctggacttcctgatggaggagaaggagctggtggctcacctcagggcgacttcttcgtgcacttcatggacctcgcggaggaggagctccggaagccggtggaggacatcacgccccctcgcctggaagcgctcctggagctggcgctgcgcatgagcacggccaacactgaccccttcaaggacgacctcaagatcgacctgatgccccatgacctcatcactcagctcttgcgcgtcctggccatcgagaccaagcaggagaaggcgatggcgcacgccgaccccacggagctggcgctgagcggcctggaggccttctctttcgactacatcgtcaagtggcccctttcgctcatcatcaacaggaaagccctcactcgctaccagatgctcttcaggcacatgttctattgcaagcacgtggagcggcagctctgcagcgtctggatcagcaacaaaaccgccaagcagcactcgctgcactccgcccagtggtttgctggggctttcactctgcggcagcgaatgctcaacttcgtccagaatattcaatactacatgatgttcgaagtgatggaaccgacctggcacatcctggagaaaaacctgaaatccgcctccaacattgacgacgtccttggccaccacacaggcttcctggacacctgcctgaaggactgcatgctcaccaaccccgagctgctgaaggtcttctccaagctcatgtctgtgtgcgtcatgttcaccaactgcatgcagaaatttacacagagcatgaaattagatggcgagctgggcgggcagacgctggagcacagcaccgtcctggggctgcccgcaggggccgaggagcgggcccggaaggagctcgccaggaagcacctggctgagcacgcagacactgtgcagctggtgtccggcttcgaggccaccatcaacaagtttgacaagaacttctcagcccacctgctggacctcctggcccggctgagcatctatagcaccagtgactgtgagcacggcatggccagcgtcatctccaggcttgacttcaatggtttctacacggagcgcctggagcgcctgtctgcagagaggagccagaaggccaccccccaagtgcctgtcctgcgggggcccccggctcctgcacccagggtcgcagtcaccgcacagtgagccctggctgtgacaggaaggaagggtgtggggtcagcagggactggtgcaaatgggtccagaattttcaaatcgaatgctctgtgttctgtctttgcagtttaaatataaagcaggaatgattgactcagctca

SEQ ID NO: 376180 - DNA, 3014 bp, Homo sapiens
ccaggctccggccccgcctcgccgccgtaggccccactggatcctacaactactttttccctcttttgctcacgcacctcgaagaactggtgctcccgcgggaagcgcacggggcgcgcaacgaagcgaaagggcgcggccccagccgcgggatcccgctctacaggcagcggctccgccgccccgggccccgcagcgaggcgggcgcacagcgcggggggcaactgcatcaccccgggcgcgggcgggcgcagcctgtcggccaccgtccgcgagccgagccggacgtgacgtcacgctcacttccgccgccgtcgggggctgcgcgggggctgtggctccgggactgcggagaacatattgtgatgttcgtgcctcagagctaaaactatgagtgaatttcggattcaccatgacgtcaatgaactgcttagcctgctgcgtgtccacggaggagatggggctgaggtctacattgacctgcttcaaaagaacaggaccccgtacgtcactaccactgtctctgctcacagtgccaaggttaaaattgcagagttttctcgtactccagaagactttctaaagaaatatgatgaactgaaatctaaaaatacaaggaaccttgacccgctggtgtacctgttgtcaaagctcacggaagacaaagagactctgcagtacttacaacagaatgcaaaagaaagagctgagcttgcagccgctgctgtgggcagcagtaccaccagcatcaacgtccctgccgcggcctccaagatctccatgcaggagcttgaggaactgaggaagcagcttggcagcgtggccacaggctccacgctgcagcagtctctggaacttaaaagaaagatgcttcgagacaagcagaacaaaaaaaattcaggccagcacctccccatcttcccagcatgggtgtatgagagacctgccctgatcggggatttcctgattggtgctggcatcagcacagacaccgctttgccgataggcacgttgcccctggcctcgcaggagtcggccgtggtggaggacctgctgtacgtgctggtgggcgtggacgggaggtacgtcagtgctcagcccctggctgggaggcagagccggaccttcctcgtggaccccaacctggacctgtccatcagggagctggtgcacaggatcctcccagtggccgccagctactccgctgtgaccaggttcattgaagagaagtcttccttcgagtacgggcaggtgaaccacgccctggcggccgccatgcgcaccctggtgaaggagcacctgattctggtgtcacagctggagcagctgcacaggcagggcctcctttcgctgcagaagctctggttctacatccagccagccatgcgcaccatggacatcctggcctccctcgccacctcggtggacaaaggcgaatgtcttggggggtccacgctgagcctgctccacgacaggagcttcagctacacaggggacagccaggcgcaggagctatgcctgtacctaaccaaggcggccagtgctccctacttcgaggttctggagaagtggatctacaggggcatcatccacgacccatacagtgagtttatggtcgaggagcacgagctgcggaaggagaggatccaggaggattacaacgacaagtactgggaccagcggtacaccatcgtccagcagcagatcccgtccttcctgcagaaaatggcggacaagatcctcagcacaggaaaatatctaaatgtggtcagagagtgtggccatgacgtcacctgcccggtggctaaagagatcatctacacgttaaaagagcgggcgtatgtggagcagatcgagaaggcgtttaactacgccagcaaggtgctgctggacttcctgatggaggagaaggagctggtggctcacctcaggtccatcaagcgctacttcctcatggaccagggcgacttcttcgtgcacttcatggacctcgcggaggaggagctccggaagccggtggaggacatcacgccccctcgcctggaagcgctcctggagctggcgctgcgcatgagcacggccaacactgaccccttcaaggacgacctcaagatcgacctgatgccccatgacctcatcactcagctcttgcgcgtcctggccatcgagaccaagcaggagaaggcgatggcgcacgccgaccccacggagctggcgctgagcggcctggaggccttctctttcgactacatcgtcaagtggcccctttcgctcatcatcaacaggaaagccctcactcgctaccagatgctcttcaggcacatgttctattgcaagcacgtggagcggcagctctgcagcgtctggatcagcaacaaaaccgccaagcagcactcgctgcactccgcccagtggtttgctggggctttcactctgcggcagcgaatgctcaacttcgtccagaatattcaatactacatgatgttcgaagtgatggaaccgacctggcacatcctggagaaaaacctgaaatccgcctccaacattgacgacgtccttggccaccacacaggcttcctggacacctgcctgaaggactgcatgctcaccaaccccgagctgctgaaggtcttctccaagctcatgtctgtgtgcgtcatgttcaccaactgcatgcagaaatttacacagagcatgaaattagatggcgagctgggcgggcagacgctggagcacagcaccgtcctggggctgcccgcaggggccgaggagcgggcccggaaggagctcgccaggaagcacctggctgagcacgcagacactgtgcagctggtgtccggcttcgaggccaccatcaacaagtttgacaagaacttctcagcccacctgctggacctcctggcccggctgagcatctatagcaccagtgactgtgagcacggcatggccagcgtcatctccagatcctaggctcgacgtcaatggtattaagtcctgctgggattcctggatta

SEQ ID NO: 376181 - DNA, 2702 bp, Homo sapiens
ccaggctccggccccgcctcgccgccgtaggccccactggatcctacaactactttttccctcttttgctcacgcacctcgaagaactggtgctcccgcgggaagcgcacggggcgcgcaacgaagcgaaagggcgcggccccagccgcgggatcccgctctacaggcagcggctccgccgccccgggccccgcagcgaggcgggcgcacagcgcggggggcaactgcatcaccccgggcgcgggcgggcgcagcctgtcggccaccgtccgcgagccgagccggacgtgacgtcacgctcacttccgccgccgtcgggggctgcgcgggggctgtggctccgggactgcggagaacatattgtgatgttcgtgcctcagagctaaaactatgagtgaatttcggattcaccatgacgtcaatgaactgcttagcctgctgcgtgtccacggaggagatggggctgaggtctacattgacctgcttcaaaagaacaggaccccgtacgtcactaccactgtctctgctcacagtgccaaggttaaaattgcagagttttctcgtactccagaagactttctaaagaaatatgatgaactgaaatctaaaaatacaaggaaccttgacccgctggtgtacctgttgtcaaagctcacggaagacaaagagactctgcagtacttacaacagaatgcaaaagaaagagctgagcttgcagccgctgctgtgggcagcagtaccaccagcatcaacgtccctgccgcggcctccaagatctccatgcaggagcttgaggaactgaggaagcagcttggcagcgtggccacaggctccacgctgcagcagtctctggaacttaaaagaaagatgcttcgagacaagcagaacaaaaaaaattcaggccagcacctccccatcttcccagcatgggtgtatgagagacctgccctgatcggggatttcctgattggtgctggcatcagcacagacaccgctttgccgataggcacgttgcccctggcctcgcaggagtcggccgtggtggaggacctgctgtacgtgctggtgggcgtggacgggaggtacgtcagtgctcagcccctggctgggaggcagagccggaccttcctcgtggaccccaacctggacctgtccatcagggagctggtgcacaggatcctcccagtggccgccagctactccgctgtgaccaggttcattgaagagaagtcttccttcgagtacgggcaggtgaaccacgccctggcggccgccatgcgcaccctggtgaaggagcacctgattctggtgtcacagctggagcagctgcacaggcagggcctcctttcgctgcagaagctctggttctacatccagccagccatgcgcaccatggacatcctggcctccctcgccacctcggtggacaaaggcgaatgtcttggggggtccacgctgagcctgctccacgacaggagcttcagctacacaggggacagccaggcgcaggagctatgcctgtacctaaccaaggcggccagtgctccctacttcgaggttctggagaagtggatctacaggggcatcatccacgacccatacagtgagtttatggtcgaggagcacgagctgcggaaggagaggatccaggaggattacaacgacaagtactgggaccagcggtacaccatcgtccagcagcagatcccgtccttcctgcagaaaatggcggacaagatcctcagcacaggaaaatatctaaatgtggtcagagagtgtggccatgacgtcacctgcccggtggctaaagagatcatctacacgttaaaagagcgggcgtatgtggagcagatcgagaaggcgtttaactacgccagcaaggtgctgctggacttcctgatggaggagaaggagctggtggctcacctcaggtccatcaagcgctacttcctcatggaccagggcgacttcttcgtgcacttcatggacctcgcggaggaggagctccggaagccggtggaggacatcacgccccctcgcctggaagcgctcctggagctggcgctgcgcatgagcacggccaacactgaccccttcaaggacgacctcaagatcgacctgatgccccatgacctcatcactcagctcttgcgcgtcctggccatcgagaccaagcaggagaaggcgatggcgcacgccgaccccacggagctggcgctgagcggcctggaggccttctctttcgactacatcgtcaagtggcccctttcgctcatcatcaacaggaaagccctcactcgctaccagatgctcttcaggcacatgttctattgcaagcacgtggagcggcagctctgcagcgtctggatcagcaacaaaaccgccaagcagcactcgctgcactccgcccagtggtttgctggggctttcactctgcggcagcgaatgctcaacttcgtccagaatattcaatactacatgatgttcgaagtgatggaaccgacctggcacatcctggagaaaaacctgaaatccgcctccaacattgacgacgtccttggccaccacacaggcttcctggacacctgcctgaaggactgcatgctcaccaaccccgagctgctgaaggtcttctccaagctcatgttctgtgttctgtctttgcagtttaaatataaagcaggaatgattgactcagctca

SEQ ID NO: 376182 - DNA, 2478 bp, Homo sapiens
ccaggctccggccccgcctcgccgccgtaggccccactggatcctacaactactttttccctcttttgctcacgcacctcgaagaactggtgctcccgcgggaagcgcacggggcgcgcaacgaagcgaaagggcgcggccccagccgcgggatcccgctctacaggcagcggctccgccgccccgggccccgcagcgaggcgggcgcacagcgcggggggcaactgcatcaccccgggcgcgggcgggcgcagcctgtcggccaccgtccgcgagccgagccggacgtgacgtcacgctcacttccgccgccgtcgggggctgcgcgggggctgtggctccgggactgcggagaacatattgtgatgttcgtgcctcagagctaaaactatgagtgaatttcggattcaccatgacgtcaatgaactgcttagcctgctgcgtgtccacggaggagatggggctgaggtctacattgacctgcttcaaaagaacaggaccccgtacgtcactaccactgtctctgctcacagtgccaaggttaaaattgcagagttttctcgtactccagaagactttctaaagaaatatgatgaactgaaatctaaaaatacaaggaaccttgacccgctggtgtacctgttgtcaaagctcacggaagacaaagagactctgcagtacttacaacagaatgcaaaagaaagagctgagcttgcagccgctgctgtgggcagcagtaccaccagcatcaacgtccctgccgcggcctccaagatctccatgcaggagcttgaggaactgaggaagcagcttggcagcgtggccacaggctccacgctgcagcagtctctggaacttaaaagaaagatgcttcgagacaagcagaacaaaaaaaattcaggccagcacctccccatcttcccagcatgggtgtatgagagacctgccctgatcggggatttcctgattggtgctggcatcagcacagacaccgctttgccgataggcacgttgcccctggcctcgcaggagtcggccgtggtggaggacctgctgtacgtgctggtgggcgtggacgggaggtacgtcagtgctcagcccctggctgggaggcagagccggaccttcctcgtggaccccaacctggacctgtccatcagggagctggtgcacaggatcctcccagtggccgccagctactccgctgtgaccaggttcattgaagagaagtcttccttcgagtacgggcaggtgaaccacgccctggcggccgccatgcgcaccctggtgaaggagcacctgattctggtgtcacagctggagcagctgcacaggcagggcctcctttcgctgcagaagctctggttctacatccagccagccatgcgcaccatggacatcctggcctccctcgccacctcggtggacaaaggcgaatgtcttggggggtccacgctgagcctgctccacgacaggagcttcagctacacaggggacagccaggcgcaggagctatgcctgtacctaaccaaggcggccagtgctccctacttcgaggttctggagaagtggatctacaggggcatcatccacgacccatacagtgagtttatggtcgaggagcacgagctgcggaaggagaggatccaggaggattacaacgacaagtactgggaccagcggtacaccatcgtccagcagcagatcccgtccttcctgcagaaaatggcggacaagatcctcagcacaggaaaatatctaaatgtggtcagagagtgtggccatgacgtcacctgcccggtggctaaagagatcatctacacgttaaaagagcgggcgtatgtggagcagatcgagaaggcgtttaactacgccagcaaggtgctgctggacttcctgatggaggagaaggagctggtggctcacctcaggtccatcaagcgctacttcctcatggaccagggcgacttcttcgtgcacttcatggacctcgcggaggaggagctccggaagccggtggaggacatcacgccccctcgcctggaagcgctcctggagctggcgctgcgcatgagcacggccaacactgaccccttcaaggacgacctcaagatcgacctgatgccccatgacctcatcactcagctcttgcgcgtcctggccatcgagaccaagcaggagaaggcgatggcgcacgccgaccccacggagctggcgctgagcggcctggaggccttctctttcgactacatcgtcaagtggcccctttcgctcatcatcaacaggtgcgggtcggctgctcgggcacctgccagatcttcactcaggtttggcagaagcgagaactgtgccacgcggtggccacctcgtcccacagaggacccaaggcggctctccccagccttcagtgtccgggagattcacgggctgtccgggggccacggtgcggactgtggagtacagacgccgtgtccacga

SEQ ID NO: 376183 - DNA, 1621 bp, Homo sapiens
cagagtccaaacagggccctccctaatcctattatctttcaatggttaccttgacttaacctattgagttacctggtcagcactgggatctttttttctctccaaaggacctgcgttggacaagatcctcagcacaggaaaatatctaaatgtggtcagagagtgtggccatgacgtcacctgcccggtggctaaagagatcatctacacgttaaaagagcgggcgtatgtggagcagatcgagaaggcgtttaactacgccagcaaggtgctgctggacttcctgatggaggagaaggagctggtggctcacctcaggtccatcaagcgctacttcctcatggaccagggcgacttcttcgtgcacttcatggacctcgcggaggaggagctccggaagccggtggaggacatcacgccccctcgcctggaagcgctcctggagctggcgctgcgcatgagcacggccaacactgaccccttcaaggacgacctcaagatcgacctgatgccccatgacctcatcactcagctcttgcgcgtcctggccatcgagaccaagcaggagaaggcgatggcgcacgccgaccccacggagctggcgctgagcggcctggaggccttctctttcgactacatcgtcaagtggcccctttcgctcatcatcaacaggaaagccctcactcgctaccagatgctcttcaggcacatgttctattgcaagcacgtggagcggcagctctgcagcgtctggatcagcaacaaaaccgccaagcagcactcgctgcactccgcccagtggtttgctggggctttcactctgcggcagcgaatgctcaacttcgtccagaatattcaatactacatgatgttcgaagtgatggaaccgacctggcacatcctggagaaaaacctgaaatccgcctccaacattgacgacgtccttggccaccacacaggcttcctggacacctgcctgaaggactgcatgctcaccaaccccgagctgctgaaggtcttctccaagctcatgtctgtgtgcgtcatgttcaccaactgcatgcagaaatttacacagagcatgaaattagatggcgagctgggcgggcagacgctggagcacagcaccgtcctggggctgcccgcaggggccgaggagcgggcccggaaggagctcgccaggaagcacctggctgagcacgcagacactgtgcagctggtgtccggcttcgaggccaccatcaacaagtttgacaagaacttctcagcccacctgctggacctcctggcccggctgagcatctatagcaccagtgactgtgagcacggcatggccagcgtcatctccaggcttgacttcaatggtttctacacggagcgcctggagcgcctgtctgcagagaggagccagaaggccaccccccaagtgcctgtcctgcgggggcccccggctcctgcacccagggtcgcagtcaccgcacagtgagccctggctgtgacaggaaggaagggtgtggggtcagcagggactggtgcaaatgggtccagaattttcaaatcgaatgctctgtgttctgtctttgcagtttaaatataaagcaggaatgattgactcagctca

SEQ ID NO: 376184 - DNA, 406 bp, Homo sapiens
aaaaattggtatatagtttagtatgacttctgaataagagaaagctgacccttataatttaaatgaattatttagcttagtattattcctgcattttaacaatggctatttaatctttcttaggttcttcaaaaacagcttgatgatgccaaggagggagaaatggccctattaagcaagcacaaagaagtggaaagtgagctagcagctgccagagaacgtttacaacagcaagcttcagatcttgtcctcaaagctagtatgtgtgaccacagtttttgatgtaatgcttagctaaaatcaacactttatttatttatttttttggagacagagtcttgctctgtcgcccagacgggaattgcgccagtgcacttcagcctgagcaacagagcaaggctgtatc

SEQ ID NO: 376185 - DNA, 2971 bp, Homo sapiens
tgaggattatgaaggcaagttgaataaagctcagtccttttatgaacgtgagcttgatactttgaaaaggtcacagctttttacagcagaaagcctacaggccagcaaagaaaaggaagctgatcttagaaaagaatttcagggacaagaagcaattttacgaaaaactataggaaaattaaagacagagttacagatggtacaggatgaagctggaagtcttcttgacaaatgccaaaagcttcagacggcacttgccatagcagagaacaatgttcaggttcttcaaaaacagcttgatgatgccaaggagggagaaatggccctattaagcaagcacaaagaagtggaaagtgagctagcagctgccagagaacgtttacaacagcaagcttcagatcttgtcctcaaagctagtcatattggaatgcttcaagcaactcaaatgacccaggaagttacaattaaagatttagaatcagaaaaatcgagagtcaatgagagattatctcaacttgaagaggaaagagcttttttgcgaagcaaaacccaaagtctggatgaagagcagaagcaacagattctagaactggagaagaaagtaaatgaagcaaagagaactcagcaagaatattatgaaagggaacttaaaaacctgcaaagtagattggaagaggaggtgactcaattaaacgaggcccattctaagactttggaagaattagcttggaagcaccatatggcaattgaagctgtccacagtaatgcaattagggataagaaaaaactgcaaatggatttggaagaacaacataacaaagataaactaaacctggaagaggataaaaatcagcttcaacaagagctagaaaacctaaaggaagtactggaagacaagttgaatacagccaatcaagagattggccacctccaagatatggtaaggaaaagtgaacaaggtcttggctctgcagaaggacttattgctagtcttcaggactcccaggaaaggcttcagaatgagcttgacttgactaaagacagcctaaaggagaccaaggatgctctattaaatgtggagggtgagctagaacaagaaaggcaacagcatgaagaaacaattgctgccatgaaagaagaagagaagctcaaagtggacaaaatggcccatgacttagaaattaagtggactgaaaatcttagacaagagtgttctaaacttcgtgaagagttaaggcttcaacatgaagaggataagaagtcagcaatgtctcaacttttgcagttgaaagatcgagagaaaaatgcagcaagagattcatggcagaagaaagtagaagatctcttaaaccagatttccttgctgaaacagaatctggagatacagctttcccagtctcagacttctttgcaacaactgcaagcccagtttacgcaagaacgacagcggcttacgcaagagcttgaagaattagaggagcaacatcagcaaagacacaaatcattaaaagaagcacatgtccttgcatttcaaactatggaagaggaaaaggaaaaggagcaaagagctcttgaaaatcatttacaacagaagcattctgcagagcttcaatcactaaaagatgcacacagagagtcaatggagggcttccggatagaaatggaacaggaacttcagactcttcggtttgaattagaagatgaaggaaaggctatgcttgcttccttgcgctcagaactcaaccatcaacatgcagctgcaattgatttgttacggcataatcatcatcaagaattggcagctgctaaaatggaattagagagaagcatagacatcagcagaagacagagtaaggagcacatatgtagaattacagatctacaagaggaattaagacacagagagcatcacatctctgaattggataaggaggttcagcaccttcatgagaatataagtgccctaaccaaagaactggaatttaaggggaaagaaattctcagaatacgaagtgaatctaaccaacagataaggttgcatgaacaagatttaaacaagagacttgaaaaagagttggatgtcatgacagcagaccacctcagagagaaaaatatcatgcgggcagattttaataagactaacgagctactcaaggaaataaatgccgctttacaagtgtcattagaagaaatggaagaaaaatatctaatgagagaatcaaaaccagaagatatacagatgattacagaattaaaagccatgcttacagaaagagaccagatcataaagaaactaattgaggataataagttttatcagctggaattagtcaatcgagaaactaacttcaacaaagtgtttaactcaagtcctactgttggtgttattaatccattggctaagcaaaagaagaagaatgataaatcaccaacaaacaggtttgtgagtgttcccaatctaagtgctctggaatctggtggagtgggcaatggacatcctaaccgcctggatcccattcctaattctccagtccacgatattgagttcaacagcagcaaaccacttccacagccagtgccacctaaagggcccaagacatttttgagtcctgctcagagtgaagcttctccagtggcttctccagatccccagcgccaggagtggtttgcccggtacttcacattctgaaagaattgtgttggcacagctctgtatagactgttactaagagcatgactttatacagattgttatgtaaataggctttcctatgtcaaacactgtgaatgagaaagtatttgtctctccaacttgaaaatgcactgtatttcctgtgatatttattggaatcattctataaggtactatattatgtgtgtaattataactgttatttttatttgagatggaagagtctttaacctttgtaattactgcataataaattttgttagaatcaaaaaaaaaaat

SEQ ID NO: 376186 - DNA, 3066 bp, Homo sapiens
tgaggattatgaaggcaagttgaataaagctcagtccttttatgaacgtgagcttgatactttgaaaaggtcacagctttttacagcagaaagcctacaggccagcaaagaaaaggaagctgatcttagaaaagaatttcagggacaagaagcaattttacgaaaaactataggaaaattaaagacagagttacagatggtacaggatgaagctggaagtcttcttgacaaatgccaaaagcttcagacggcacttgccatagcagagaacaatgttcaggttcttcaaaaacagcttgatgatgccaaggagggagaaatggccctattaagcaagcacaaagaagtggaaagtgagctagcagctgccagagaacgtttacaacagcaagcttcagatcttgtcctcaaagctagtcatattggaatgcttcaagcaactcaaatgacccaggaagttacaattaaagatttagaatcagaaaaatcgagagtcaatgagagattatctcaacttgaagaggaaagagcttttttgcgaagcaaaacccaaagtctggatgaagagcagaagcaacagattctagaactggagaagaaagtaaatgaagcaaagagaactcagcaagaatattatgaaagggaacttaaaaacctgcaaagtagattggaagaggaggtgactcaattaaacgaggcccattctaagactttggaagaattagcttggaagcaccatatggcaattgaagctgtccacagtaatgcaattagggataagaaaaaactgcaaatggatttggaagaacaacataacaaagataaactaaacctggaagaggataaaaatcagcttcaacaagagctagaaaacctaaaggaagtactggaagacaagttgaatacagccaatcaagagattggccacctccaagatatggtaaggaaaagtgaacaaggtcttggctctgcagaaggacttattgctagtcttcaggactcccaggaaaggcttcagaatgagcttgacttgactaaagacagcctaaaggagaccaaggatgctctattaaatgtggagggtgagctagaacaagaaaggcaacagcatgaagaaacaattgctgccatgaaagaagaagagaagctcaaagtggacaaaatggcccatgacttagaaattaagtggactgaaaatcttagacaagagtgttctaaacttcgtgaagagttaaggcttcaacatgaagaggataagaagtcagcaatgtctcaacttttgcagttgaaagatcgagagaaaaatgcagcaagagattcatggcagaagaaagtagaagatctcttaaaccagatttccttgctgaaacagaatctggagatacagctttcccagtctcagacttctttgcaacaactgcaagcccagtttacgcaagaacgacagcggcttacgcaagagcttgaagaattagaggagcaacatcagcaaagacacaaatcattaaaagaagcacatgtccttgcatttcaaactatggaagaggaaaaggaaaaggagcaaagagctcttgaaaatcatttacaacagaagcattctgcagagcttcaatcactaaaagatgcacacagagagtcaatggagggcttccggatagaaatggaacaggaacttcagactcttcggtttgaattagaagatgaaggaaaggctatgcttgcttccttgcgctcagaactcaaccatcaacatgcagctgcaattgatttgttacggcataatcatcatcaagaattggcagctgctaaaatggaattagagagaagcatagacatcagcagaagacagagtaaggagcacatatgtagaattacagatctacaagaggaattaagacacagagagcatcacatctctgaattggataaggaggttcagcaccttcatgagaatataagtgccctaaccaaagaactggaatttaaggggaaagaaattctcagaatacgaagtgaatctaaccaacagataaggttgcatgaacaagatttaaacaagagacttgaaaaagagttggatgtcatgacagcagaccacctcagagagaaaaatatcatgcgggcagattttaataagactaacgagctactcaaggaaataaatgccgctttacaagtgtcattagaagaaatggaagaaaaatatctaatgagagaatcaaaaccagaagatatacagatgattacagaattaaaagccatgcttacagaaagagaccagatcataaagaaactaattgaggataataagttttatcagctggaattagtcaatcgagaaactaacttcaacaaagtgtttaactcaagtcctactgttggtgttattaatccattggctaagcaaaagaagaagaatgataaatcaccaacaaacaggtttgtgagtgttcccaatctaagtgctctggaatctggtggagtgggcaatggacatcctaaccgcctggatcccattcctaattctccagtccacgatattgagttcaacagcagcaaaccacttccacagccagtgccacctaaagggcccaagacatttttgaggtatcagtaagatgcatgtgcatgagctcaaggaacatgactactggagtttccattacacattgttgcgtgccttgtaattttccccaaagacgtcctgctcagagtgaagcttctccagtggcttctccagatccccagcgccaggagtggtttgcccggtacttcacattctgaaagaattgtgttggcacagctctgtatagactgttactaagagcatgactttatacagattgttatgtaaataggctttcctatgtcaaacactgtgaatgagaaagtatttgtctctccaacttgaaaatgcactgtatttcctgtgatatttattggaatcattctataaggtactatattatgtgtgtaattataactgttatttttatttgagatggaagagtctttaacctttgtaattactgcataataaattttgttagaatcaaaaaaaaaaat

SEQ ID NO: 376187 - DNA, 1512 bp, Homo sapiens
atatgcttattgtcaaaatagaaacatacgtaaactctgggaacttaaatatacttatgcaaaaactaaatttagaaaaaataaataattttaaaaatttccattccaattttttaccttgcagttgttgattaaatgtattagcaaattttgaatgaaatgcaaatttcattagaaatttagccattagataaagtcagaaagtactgttgttttatgctcatcttactattactgattttttgctgctttatgttttttttcttattcttactaaatcttagcagtgtcactagtaatagtcttacaaagtaggcaggtttttttaggctaagtgattagtgacatagttaatgattaacaaaaaaaatagcaagaatgaaaattagtcagatacacctctgaatttgtctcctgctaaatattttgtgttgcttattttcccttgtgcatgggtatgttcaggtatcagtaagatgcatgtgcatgagctcaaggaacatgactactggagtttccattacacattgttgcgtgccttgtaattttccccaaagacggtagggattcttttgttttcttaagtagcccaaagaatctttagttagaattaagaaaagtataaactatataacatctaacgggggaaattatatttttagtgttctccctttcctgggagtatttgcatagggaattatgaaatgaaaatttaatgtaaaatgcatatagtaaaaaatactagtagttactttagttatatttaaggacacatctgtacgatcagctaaaagagaaaaggtgctgaaagagaggacccattattttattctctcgtttcccaccaattcttactggaattttttattcaaaggagggtgacatttttgccagttgttttttgttctttgtgattgttgtgatgtggctcctccttaactgacttcatttgagctgctgatgcactcttatgctctcatggagtggagaaccgattctagtatagagggggtagcaaatctttaaaacacgacttacaacatggggaacccgttgtggtaatctatgctgatgttttatgtgcttttgccttcattttgcaaaatgacttaatgctgggttacatgtctctctttttatgaattcagtcctgctcagagtgaagcttctccagtggcttctccagatccccagcgccaggagtggtttgcccggtacttcacattctgaaagaattgtgttggcacagctctgtatagactgttactaagagcatgactttatacagattgttatgtaaataggctttcctatgtcaaacactgtgaatgagaaagtatttgtctctccaacttgaaaatgcactgtatttcctgtgatatttattggaatcattctataaggtactatattatgtgtgtaattataactgttatttttatttgagatggaagagtctttaacctttgtaattactgcataataaattttgttagaatcaaaaaaaaaaat

SEQ ID NO: 376188 - DNA, 2863 bp, Homo sapiens
tgaggattatgaaggcaagttgaataaagctcagtccttttatgaacgtgagcttgatactttgaaaaggtcacagctttttacagcagaaagcctacaggccagcaaagaaaaggaagctgatcttagaaaagaatttcagggacaagaagcaattttacgaaaaactataggaaaattaaagacagagttacagatggtacaggatgaagctggaagtcttcttgacaaatgccaaaagcttcagacggcacttgccatagcagagaacaatgttcaggttcttcaaaaacagcttgatgatgccaaggagggagaaatggccctattaagcaagcacaaagaagtggaaagtgagctagcagctgccagagaacgtttacaacagcaagcttcagatcttgtcctcaaagctagtcatattggaatgcttcaagcaactcaaatgacccaggaagttacaattaaagatttagaatcagaaaaatcgagagtcaatgagagattatctcaacttgaagaggaaagagcttttttgcgaagcaaaacccaaagtctggatgaagagcagaagcaacagattctagaactggagaagaaagtaaatgaagcaaagagaactcagcaagaatattatgaaagggaacttaaaaacctgcaaagtagattggaagaggaggtgactcaattaaacgaggcccattctaagactttggaagaattagcttggaagcaccatatggcaattgaagctgtccacagtaatgcaattagggataagaaaaaactgcaaatggatttggaagaacaacataacaaagataaactaaacctggaagaggataaaaatcagcttcaacaagagctagaaaacctaaaggaagtactggaagacaagttgaatacagccaatcaagagattggccacctccaagatatggtaaggaaaagtgaacaaggtcttggctctgcagaaggacttattgctagtcttcaggactcccaggaaaggcttcagaatgagcttgacttgactaaagacagcctaaaggagaccaaggatgctctattaaatgtggagggtgagctagaacaagaaaggcaacagcatgaagaaacaattgctgccatgaaagaagaagagaagctcaaagtggacaaaatggcccatgacttagaaattaagtggactgaaaatcttagacaagagtgttctaaacttcgtgaagagttaaggcttcaacatgaagaggataagaagtcagcaatgtctcaacttttgcagttgaaagatcgagagaaaaatgcagcaagagattcatggcagaagaaagtagaagatctcttaaaccagatttccttgctgaaacagaatctggagatacagctttcccagtctcagacttctttgcaacaactgcaagcccagtttacgcaagaacgacagcggcttacgcaagagcttgaagaattagaggagcaacatcagcaaagacacaaatcattaaaagaagcacatgtccttgcatttcaaactatggaagaggaaaaggaaaaggagcaaagagctcttgaaaatcatttacaacagaagcattctgcagagcttcaatcactaaaagatgcacacagagagtcaatggagggcttccggatagaaatggaacaggaacttcagactcttcggtttgaattagaagatgaaggaaaggctatgcttgcttccttgcgctcagaactcaaccatcaacatgcagctgcaattgatttgttacggcataatcatcatcaagaattggcagctgctaaaatggaattagagagaagcatagacatcagcagaagacagagtaaggagcacatatgtagaattacagatctacaagaggaattaagacacagagagcatcacatctctgaattggataaggaggttcagcaccttcatgagaatataagtgccctaaccaaagaactggaatttaaggggaaagaaattctcagaatacgaagtgaatctaaccaacagataaggttgcatgaacaagatttaaacaagagacttgaaaaagagttggatgtcatgacagcagaccacctcagagagaaaaatatcatgcgggcagattttaataagactaacgagctactcaaggaaataaatgccgctttacaagtgtcattagaagaaatggaagaaaaatatctaatgagagaatcaaaaccagaagatatacagatgattacagaattaaaagccatgcttacagaaagagaccagatcataaagaaactaattgaggataataagttttatcagctggaattagtcaatcgagaaactaacttcaacaaagtgtttaactcaagtcctactgttggtgttattaatccattggctaaggtatcagtaagatgcatgtgcatgagctcaaggaacatgactactggagtttccattacacattgttgcgtgccttgtaattttccccaaagacgtcctgctcagagtgaagcttctccagtggcttctccagatccccagcgccaggagtggtttgcccggtacttcacattctgaaagaattgtgttggcacagctctgtatagactgttactaagagcatgactttatacagattgttatgtaaataggctttcctatgtcaaacactgtgaatgagaaagtatttgtctctccaacttgaaaatgcactgtatttcctgtgatatttattggaatcattctataaggtactatattatgtgtgtaattataactgttatttttatttgagatggaagagtctttaacctttgtaattactgcataataaattttgttagaatcaaaaaaaaaaat

SEQ ID NO: 376189 - DNA, 2803 bp, Homo sapiens
tgaggattatgaaggcaagttgaataaagctcagtccttttatgaacgtgagcttgatactttgaaaaggtcacagctttttacagcagaaagcctacaggccagcaaagaaaaggaagctgatcttagaaaagaatttcagggacaagaagcaattttacgaaaaactataggaaaattaaagacagagttacagatggtacaggatgaagctggaagtcttcttgacaaatgccaaaagcttcagacggcacttgccatagcagagaacaatgttcaggttcttcaaaaacagcttgatgatgccaaggagggagaaatggccctattaagcaagcacaaagaagtggaaagtgagctagcagctgccagagaacgtttacaacagcaagcttcagatcttgtcctcaaagctagtcatattggaatgcttcaagcaactcaaatgacccaggaagttacaattaaagatttagaatcagaaaaatcgagagtcaatgagagattatctcaacttgaagaggaaagagcttttttgcgaagcaaaacccaaagtctggatgaagagcagaagcaacagattctagaactggagaagaaagtaaatgaagcaaagagaactcagcaagaatattatgaaagggaacttaaaaacctgcaaagtagattggaagaggaggtgactcaattaaacgaggcccattctaagactttggaagaattagcttggaagcaccatatggcaattgaagctgtccacagtaatgcaattagggataagaaaaaactgcaaatggatttggaagaacaacataacaaagataaactaaacctggaagaggataaaaatcagcttcaacaagagctagaaaacctaaaggaagtactggaagacaagttgaatacagccaatcaagagattggccacctccaagatatggtaaggaaaagtgaacaaggtcttggctctgcagaaggacttattgctagtcttcaggactcccaggaaaggcttcagaatgagcttgacttgactaaagacagcctaaaggagaccaaggatgctctattaaatgtggagggtgagctagaacaagaaaggcaacagcatgaagaaacaattgctgccatgaaagaagaagagaagctcaaagtggacaaaatggcccatgacttagaaattaagtggactgaaaatcttagacaagagtgttctaaacttcgtgaagagttaaggcttcaacatgaagaggataagaagtcagcaatgtctcaacttttgcagttgaaagatcgagagaaaaatgcagcaagagattcatggcagaagaaagtagaagatctcttaaaccagatttccttgctgaaacagaatctggagatacagctttcccagtctcagacttctttgcaacaactgcaagcccagtttacgcaagaacgacagcggcttacgcaagagcttgaagaattagaggagcaacatcagcaaagacacaaatcattaaaagaagcacatgtccttgcatttcaaactatggaagaggaaaaggaaaaggagcaaagagctcttgaaaatcatttacaacagaagcattctgcagagcttcaatcactaaaagatgcacacagagagtcaatggagggcttccggatagaaatggaacaggaacttcagactcttcggtttgaattagaagatgaaggaaaggctatgcttgcttccttgcgctcagaactcaaccatcaacatgcagctgcaattgatttgttacggcataatcatcatcaagaattggcagctgctaaaatggaattagagagaagcatagacatcagcagaagacagagtaaggagcacatatgtagaattacagatctacaagaggaattaagacacagagagcatcacatctctgaattggataaggaggttcagcaccttcatgagaatataagtgccctaaccaaagaactggaatttaaggggaaagaaattctcagaatacgaagtgaatctaaccaacagataaggttgcatgaacaagatttaaacaagagacttgaaaaagagttggatgtcatgacagcagaccacctcagagagaaaaatatcatgcgggcagattttaataagactaacgagctactcaaggaaataaatgccgctttacaagtgtcattagaagaaatggaagaaaaatatctaatgagagaatcaaaaccagaagatatacagatgattacagaattaaaagccatgcttacagaaagagaccagatcataaagaaactaattgaggataataagttttatcagctggaattagtcaatcgagaaactaacttcaacaaagtgtttaactcaagtcctactgttggtgttattaatccattggctaagcaaaagaagaagaatgataaatcaccaacaaacagtcctgctcagagtgaagcttctccagtggcttctccagatccccagcgccaggagtggtttgcccggtacttcacattctgaaagaattgtgttggcacagctctgtatagactgttactaagagcatgactttatacagattgttatgtaaataggctttcctatgtcaaacactgtgaatgagaaagtatttgtctctccaacttgaaaatgcactgtatttcctgtgatatttattggaatcattctataaggtactatattatgtgtgtaattataactgttatttttatttgagatggaagagtctttaacctttgtaattactgcataataaattttgttagaatcaaaaaaaaaaat

SEQ ID NO: 376190 - DNA, 3654 bp, Homo sapiens
tgaggattatgaaggcaagttgaataaagctcagtccttttatgaacgtgagcttgatactttgaaaaggtcacagctttttacagcagaaagcctacaggccagcaaagaaaaggaagctgatcttagaaaagaatttcagggacaagaagcaattttacgaaaaactataggaaaattaaagacagagttacagatggtacaggatgaagctggaagtcttcttgacaaatgccaaaagcttcagacggcacttgccatagcagagaacaatgttcaggttcttcaaaaacagcttgatgatgccaaggagggagaaatggccctattaagcaagcacaaagaagtggaaagtgagctagcagctgccagagaacgtttacaacagcaagcttcagatcttgtcctcaaagctagtcatattggaatgcttcaagcaactcaaatgacccaggaagttacaattaaagatttagaatcagaaaaatcgagagtcaatgagagattatctcaacttgaagaggaaagagcttttttgcgaagcaaaacccaaagtctggatgaagagcagaagcaacagattctagaactggagaagaaagtaaatgaagcaaagagaactcagcaagaatattatgaaagggaacttaaaaacctgcaaagtagattggaagaggaggtgactcaattaaacgaggcccattctaagactttggaagaattagcttggaagcaccatatggcaattgaagctgtccacagtaatgcaattagggataagaaaaaactgcaaatggatttggaagaacaacataacaaagataaactaaacctggaagaggataaaaatcagcttcaacaagagctagaaaacctaaaggaagtactggaagacaagttgaatacagccaatcaagagattggccacctccaagatatggtaaggaaaagtgaacaaggtcttggctctgcagaaggacttattgctagtcttcaggactcccaggaaaggcttcagaatgagcttgacttgactaaagacagcctaaaggagaccaaggatgctctattaaatgtggagggtgagctagaacaagaaaggcaacagcatgaagaaacaattgctgccatgaaagaagaagagaagctcaaagtggacaaaatggcccatgacttagaaattaagtggactgaaaatcttagacaagagtgttctaaacttcgtgaagagttaaggcttcaacatgaagaggataagaagtcagcaatgtctcaacttttgcagttgaaagatcgagagaaaaatgcagcaagagattcatggcagaagaaagtagaagatctcttaaaccagatttccttgctgaaacagaatctggagatacagctttcccagtctcagacttctttgcaacaactgcaagcccagtttacgcaagaacgacagcggcttacgcaagagcttgaagaattagaggagcaacatcagcaaagacacaaatcattaaaagaagcacatgtccttgcatttcaaactatggaagaggaaaaggaaaaggagcaaagagctcttgaaaatcatttacaacagaagcattctgcagagcttcaatcactaaaagatgcacacagagagtcaatggagggcttccggatagaaatggaacaggaacttcagactcttcggtttgaattagaagatgaaggaaaggctatgcttgcttccttgcgctcagaactcaaccatcaacatgcagctgcaattgatttgttacggcataatcatcatcaagaattggcagctgctaaaatggaattagagagaagcatagacatcagcagaagacagagtaaggagcacatatgtagaattacagatctacaagaggaattaagacacagagagcatcacatctctgaattggataaggaggttcagcaccttcatgagaatataagtgccctaaccaaagaactggaatttaaggggaaagaaattctcagaatacgaagtgaatctaaccaacagataaggttgcatgaacaagatttaaacaagagacttgaaaaagagttggatgtcatgacagcagaccacctcagagagaaaaatatcatgcgggcagattttaataagactaacgagctactcaaggaaataaatgccgctttacaagtgtcattagaagaaatggaagaaaaatatctaatgagagaatcaaaaccagaagatatacagatgattacagaattaaaagccatgcttacagaaagagaccagatcataaagaaactaattgaggataataagttttatcagctggaattagtcaatcgagaaactaacttcaacaaagtgtttaactcaagtcctactgttggtgttattaatccattggctaagcaaaagaagaagaatgataaatcaccaacaaacaggtttgtgagtgttcccaatctaagtgctctggaatctggtggagtgggcaatggacatcctaaccgcctggatcccattcctaattctccagtccacgatattgagttcaacagcagcaaaccacttccacagccagtgccacctaaagggcccaagacatttttgaggtatcagtaagatgcatgtgcatgagctcaaggaacatgactactggagtttccattacacattgttgcgtgccttgtaattttccccaaagacggtagggattcttttgttttcttaagtagcccaaagaatctttagttagaattaagaaaagtataaactatataacatctaacgggggaaattatatttttagtgttctccctttcctgggagtatttgcatagggaattatgaaatgaaaatttaatgtaaaatgcatatagtaaaaaatactagtagttactttagttatatttaaggacacatctgtacgatcagctaaaagagaaaaggtgctgaaagagaggacccattattttattctctcgtttcccaccaattcttactggaattttttattcaaaggagggtgacatttttgccagttgttttttgttctttgtgattgttgtgatgtggctcctccttaactgacttcatttgagctgctgatgcactcttatgctctcatggagtggagaaccgattctagtatagagggggtagcaaatctttaaaacacgacttacaacatggggaacccgttgtggtaatctatgctgatgttttatgtgcttttgccttcattttgcaaaatgacttaatgctgggttacatgtctctctttttatgaattcagtcctgctcagagtgaagcttctccagtggcttctccagatccccagcgccaggagtggtttgcccggtacttcacattctgaaagaattgtgttggcacagctctgtatagactgttactaagagcatgactttatacagattgttatgtaaataggctttcctatgtcaaacactgtgaatgagaaagtatttgtctctccaacttgaaaatgcactgtatttcctgtgatatttattggaatcattctataaggtactatattatgtgtgtaattataactgttatttttatttgagatggaagagtctttaacctttgtaattactgcataataaattttgttagaatcaaaaaaaaaaat

SEQ ID NO: 376191 - DNA, 1051 bp, Homo sapiens
tgaggattatgaaggcaagttgaataaagctcagtccttttatgaacgtgagcttgatactttgaaaaggtcacagctttttacagcagaaagcctacaggccagcaaagaaaaggaagctgatcttagaaaagaatttcagggacaagaagcaattttacgaaaaactataggaaaattaaagacagagttacagatggtacaggatgaagctggaagtcttcttgacaaatgccaaaagcttcagacggcacttgccatagcagagaacaatgttcaggttcttcaaaaacagcttgatgatgccaaggagggagaaatggccctattaagcaagcacaaagaagtggaaagtgagctagcagctgccagagaacgtttacaacagcaagcttcagatcttgtcctcaaagctagtcatattggaatgcttcaagcaactcaaatgacccaggaagttacaattaaagatttagaatcagaaaaatcgagagtcaatgagagattatctcaacttgaagaggaaagagcttttttgcgaagcaaaacccaaagtctggatgaagagcagaagcaacagattctagaactggagaagaaagtaaatgaagcaaagagaactcagcaagaatattatgaaagggaacttaaaaacctgcaaagtagattggaagaggaggtgactcaattaaacgaggcccattctaagactttggaagaattagcttggaagcaccatatggcaattgaagctgtccacagtaatgcaattagggataagaaaaaactgcaaatggatttggaagaacaacataacaaagataaactaaacctggaagaggataaaaatcagcttcaacaagagctagaaaacctaaaggaagtactggaagacaagttgaatacagccaatcaagaggcaagaattctttagacctgttgcctatgttatagattttaataataataacttattctggtgacattgtataggtaggtaagtctcagtaaaggtaacatatctagaataaaaataatttaaaaactttaa

SEQ ID NO: 376192 - DNA, 7382 bp, Homo sapiens
ataaggccttctaagagatctaagcagagtaagaatatgtctgattggaaatatattgtttttcttggctaatttgaccaagggctctagaaattatatggagggtatatgccagccgtactcttgttttttagtttcttgtctaagcaaaaaaattgttcttttgctatagacgcaatagaactaaatctatagtgttatgcacgttacttgtaaattcttatgtcaggaccaaatggtcgcttatattttttccagctcccaaattccctttattccactttagtcccttcattttcagagatgaggaaacagattgctttgttcaaagacagctagaactagaacacaggctaatacttgctagccatgtgatatactaatgtcagccaaatacgggcatttacactttcagatgtttgccatatctgtgcacttactaattctgtttaatacaatttaaattgactcctttaaataagcttattttaaaggaaattttttgctactataaatagaaaaccattatatcctttaaatagtaactctaaataggaattcaaaacaaagcaacgttattaaaatttaatttaaaattaatttaaatttaattgttattaaatttttaattattgctgttcttcgtcagaaatgtgtcaaagcattgttttcatgtttgatgtcagttccttaattgtctaaacagaaaaagcacagctaatgcctctagttaagcttctgtataacttttttaaatgaaatgcttcttagaggggaaatgagagggcatgaatacatgtttatatactaaagtatgatttcatgtatatcagaagatcttattatatggaaccaaaattattctttggttgatttaattgttcttgaaacttcagtttttaccttgaaggttttagttagcttagcataagtttatttttctaaataaggaatctgattgcctcacaactcagatgtatcacagttatggtgaaatagcaatatattggtttctgtaaccttttaaataccgtaatgaattaaaatctcttcagcaaaagcaaatatatctagggtgacgagaggtgtttttagtgtatttgaatgatggaaatgtttttcttaaaatatttctgaagcattttttaaaataattttttgaatttattgatgatagtagttgtgtgttagtgtgaatgactggtctaaatgtgtatgtcacttccaagggattagtaggggtcagaatgatttgttttattcattgacttttcctttgacgtgttcttattcattgggctacatacattccctgttgccttctcaccaaaagtgccactacacaggctgtatttcattgtactgtagaaaaagacaagtagacctttttcattcatgagattcctatgaaatctgttggtggaggtataaaatgaggagacttttatgggctagctagtaggagttttgctgtgaaacctttgtaacaggtctatcaggaactagggagagaaataaatgcaggaaatacttgatcccattaaactgaggatgaaaaagacatgataatattttggggattatttattgtgtgattttccggctgatcagaagtgttaattttttgttatacttgtgtcaaatacatatatatatatatattttgaaatggagtcttgctctgtcacccaggctggagtgcagtggtgcgatctgggttcactgcaacctctgcctccaggttcaagtgatcctcctgcctcagcctcccgagtagctaggactacaggcacgtgccaccacgccctgctaatttttgtattcttagtggagatggggtttcaccatgttggccaggctggtcttgaactcctgacctcaagtgatcttcccaccttggcctttctgaactatttcctttacacacatttagaactacatctaactgtattatagttttcactttcaccatcagacaaaattcagaagattcaagagaaggaaagtcgattgtatttactcatatttttgctaccgtgtttttacatctcatattttaaggctctcttaattatttattttctgtttagttaatttcctctagccattctttatttatagtgggtctgctggtaacaaattctctcaatttttcctcgtctgagaatgtcttgacttcccttccatttttgtcagcacctgaaaaatactatgccactatcttctgggttctgtggtttctgatgagaactccactgtcagtctaattgtcgttataaatgcagtgttctctctctctctctgcttccaggatattttttcttttttttttttttttttttcttgagacggagtctcactctgtcgcccaggctggagtgcagtggcgcaattttggctcactgcaagctctgcctcccgggttcaagcgattactcccactttagcctcccaagtagctaggactacaaggcacaccaccatgcctggctaatttttgtatttttagtagagacggggtttcaccatgttgcccaggctggtctcgaactcctgacatcaagtgatcttcctgcctccgcttcccaaagtgctggaattacaggcgtgagccactgctcccagcctctttattttttcagctttactctttcttctgtctttttgacatgtgtgtccagtgacacacgtgttagattttgctatagtctcacgcacgggtctataaggctctgttttttgtttcattttgtttttcctattttctctctattcagatcgagtaatttccactgttcagttttatcatagctgcttttaaatctttgtcaggtaattctgtcatctaagttttggcacctattgattatcttttgcattgtttttgtttttgtttctgtttttgttttgagatggagtcttgctctgttgcccaggttggagtgcagtggcactgatctcggctcactgcaacctcctcctcccgggttcaagtggttctcctgcctcaacctccttagtagctgggattacaggcatgtgccaccacgcccggctaattttgtatttttagtagagaccaggtttatccatgttggtcaggctggtctcaaactcccaacctcaagtgatccgcctgcctcgacctcccaaagtgctgggattacaggcgtgaaccactgcacccagcctatcttttgcattgttttaaatcttgttcttgctaggatgaatgattttctgttaaaactagatattttcatattatgttcctaggctctggatattatctaaaccttctgtttccactggcttttattgacactgctttggcaaggtcatagggggtgcctcattactgccaggtggacatagaagtcaagggtccctactcagcctctactgatgcctcaggaagaggatccttcttgttattgctgggtgggggtggaagtctagctgacacctactgaggtaggtgctggggcatgcccggccatcagggtgaaagtcctggctccctagttggcctacttttacattgccctaatagggcattggagctcctcactatggtttatgagctggaagtcaaggctcctcacttagctttcgttggtgtgggtggtggtggggcaaaactgttttctgggtttggctggagtggagcagttactgtcaaaagttttctgtcttgccaggctgtccctttcttgtttctttggctagagagagcaagcttttgttgtggctctttttgtctgtgccagttggcatttccaggttgctgccttctttagctccaagtctgggatatattaggcaaaaagaaaacccagagaatttacaccaccgtgtcattccatgggtcctgaggtcccttacttagtctgccttctctccacttttcacagtcttctcatgttttgtatataatgtccagggtctttagttatacttagcagaaataaaagggaaaagtatgtctgctctatgcttctgtaagtggaagtcttcaaatttgcatttttgattcctttaaacagttttgtaaaatatataatcattattgggcaaaatgtcccataaaatgtatataccttgtgatggtttgcataatattgtgttcaagaggactgctgaaaaataacatctttatttaaactgaaacgaattgttcacattattaatgaaaacttttcccctctaggaaataatgcaaaaggtgtcccaaggctcctgaccagtgaacaaagatttgagaaagacagccaagctcatgttttctcctgatcaagaaaatcatccatctaaagcaccagtaaaatatggtgaactcattgtcttagggtataatgggtctctcccaaatggcgatagaggaaggaggaaaagtaggtttgctttgtttaaaagacctaaggcaaatggggtgaagcccagcactgtgcatattgcttgtactcctcaggctgcaaaggcaataagcaacaaagaccagcatagcatatcatatactttatctcgggcccagactgtggtggttgaatatactcatgacagcaacaccgatatgtttcagattggccggtcgactgaaagccccattgattttgtagtaactgacacggttcctggaagtcaaagtaattctgatacacagtcagtacaaagcactatatcaagatttgcctgcagaatcatatgtgaacggaatcctccctttacagcacggatttatgctgcaggatttgactcatcaaaaaacatctttcttggggagaaggctgccaaatggaagacatcagatggacagatggatggcttgaccactaatggtgttcttgtgatgcatccacgcaatgggttcacagaagactccaagcctggaatatggagagaaatatcggtgtgtggaaatgtatttagcctacgtgaaaccagatcggctcagcagagaggaaaaatggtggaaattgaaaccaatcagttacaagatggctcgttaattgacctctgtggtgcaacattgttatggcgtactgcagaaggcctttcccacactcctaccgtgaagcatttagaagctttaagacaggaaatcaatgcagcacgacctcagtgccctgtagggttcaacacactagcatttcctagtatgaagaggaaagacgttgtagatgaaaaacaaccatgggtatatctaaactgcggccatgtacatggctatcataactggggaaacaaagaagaacgtgatggaaaagatcgtgaatgtcctatgtgtaggtctgttggtccctatgttcctctgtggcttggatgtgaagctggattttatgtggacgccggccctccaacccatgcgtttagcccgtgtgggcatgtgtgttcagaaaagacaactgcctattggtcccagatcccacttcctcatggtactcatacttttcatgcagcctgtcccttttgtgcacatcagttggctggtgaacaaggctacatcagacttatttttcaaggacctctagactaacagaccattgtcttgcaggactacattataaatttataagctaagtgagttgggttttcgaacctgttgtccacgtcacagtttttctgctctggtcatttgcattaagatgaagaattttttaaaacatttataataaatagtagcaatttctgagcaaaaatctgggaaactcaagcaaaggaatttctgaaagtatcagtcttctgaattctgagttttgaaaatatattttgaggagaaaaagacatagtctaatttgatgccttccttttagtgtttttgaatcacctatcctcagtgctgaaattgttttgtataactgagggtactgttggttcaaactatgttagtttacagtttgttgcaaacattgtaaaatacagcgacatgtatattaacttttttctatttatctttattatagaaaataccttagaatgttcttgatagagtagcatggtaacgatggtgtcacacccttggtgtgaatggtagcttagtgagcaacctagctcaaggatttgcaaagttaggaagaaggacgagagagcctctctccccaccccaatctaaatatggaatttggtaaattagaatactttgtaatttgtaagaccaaattcatactaattacccgcgtgaaaggtgtttgtttttaacaacattgaagataatcaggaaagattttttcttaatgtttctctcgagcgtagtactataacaaaaacttaatgctaagaaacattttatatgctcctttggatatgcaatttaatctagattatctatttttctcccatgataactaatctgtttttagtatcagcagcatttggcaagtttattttttggatataaactgtggttcatctgttcactgtttctagaaaaaaatcattgccataagaaaaagtataaattagcaagaaaggagagtgacttgatttgcttttggaaaaagaaatgcttaattaattattctgtatttggccttattcgggcattaggaaatctagagatctaaagggttgaatgacaatagtgcccccgtttttagcagaccagccttaactctgggtttgaatcctaaggagattgccacagtgagacttaaggaaatgtttggttggcagatgagcaccaatgactgcagcgtggagtgacgcactgcatggtctgtttattctctaattccaatatgtcttttgcttccagaagcaagaaaagtttcttctctcccctccttcccacccttttttcaaaggcaccacaagtatagacagttgcactacatcaaatctttttttgacacttgtagaaaccagtacacttttagattagacagtatcttcttttaatattttgatttgttttcctttagtttgaaaagttgtataatacttaactgactgtagcaaagttttatatgtggtagcatacctttaatttatcctattacaaaactgttctgaattttcttttggtttttaaaaaacaaaacttgttgcttagaagccatgaattattttattttacttcaactgtcgaaacttccttgttttaaaaaatgatcatttgggttcactcaggaaatgcatgtcaggaaacttgtattataagtttattagttgtgatgtatcagtaactgctgttacccctttttcaaagaaatgtaattgattttgaagttttctagattgtcacatgctttgtgactaatgcaagaaagcaagtcctgtgttgtatttgttctagtcatttttattcaggctatatattgtagcttaatttttatttgcaattaatttatttaaactaagtaaatacttttcaaaatacataa

SEQ ID NO: 376193 - DNA, 4782 bp, Homo sapiens
  misc_feature (846)..(846): n is a, c, g, or t
taaatttagcatagtaactacagtattagaacttcaaatcacatagattttaatggtatcaatgacaaacagctcttaactaccaaaaacttttccagattaaattcttctagcaggaaatttgagagtcatttgaagaatagtttaatatttagcttagggttttaaaccgccagtcttagcctatgggttcctcagttaatcattagcaacagtaattgtctctgtgtctggtacttggtgtcttaaaatgcagataatttttcttctcaaccctctagaagtgaagctggacaaggtttcatgctgttgctgcttagaaaagagctttgaactacaggaacgcaatgtgggactaaagagcaagatccagaagtgggatgagtcatgcaactcagaggacagtagtgaaggggcagtgaggaatcgacagagggtctgggggcaatacaaagcctaaaatagctaaaataattattagctaaggggctgtactttggacttacagcaaggctagcaacattaccaagggctttctccaatacaaagtattttattttttataaagggtcaatgtagtttctatatatggcagtcattgagtaaactctcttctcagctttaaaacattcttccttgccagccacaattacaggccattttataatcacttcctcctccagcctcaaaactgtccctgttccctgcttcctttccccctagattgaccaactacatatggtagatcatcaaacccaagatttgtcagggggcgggggcaggggaggtggacggtgaatgaggaaagattattattaagctactgctcatgcctcaatgaagcantaaagaatgacataaccacatgacaaacatacttaaattcaaattctggctttgccagtgtcacttcagaatataattcttctgagtctgtttcctaatgtacaaaaatggggacagtgatttcaatctagtagaatttttgcaagggtagatttagtgaggtgatgtgtatgggatagcattcaatagtgcctggtacatagtaaacacccaaatatttttattttgtttttaacttgtttccattggtttagtacttgcttacctttaggatgtatatgtgtgtgtgtgtgtatgtgtacatgttatggagaaatggtcataagatctgaacaacaaaagtatgtttactacttagcaaacatgtctgttggacaggttctgctaacataatgagagtgcatttgtacattcaggtagctaagacttaacaaatctaaaaattccttacttcaaaagttcagctatttaaagtgtttggttcacaattaaaggagattgtgttttaaacaatacatactgtactttttaaaggttgtattagcacatgcaaacagttcaccttaaaaaaacagaatgagtcataaggagtcagacatgccattaatcagctcttaattatcttccataaaagagggaaggaaaaaaatagagataacacgaatctgtgtataatccaaaaggttctctgtgacttggaatgaagccagaaaaagaatctcattttgtttcacacactggcacctggtatggagatcaacagttgctcaaaggaattttaaataattataatgtgttaatagataattaattgggaattgattctgcaaggcaaagtcaaacatttgttttataattgtgcagttcttgcaagagatcacctatactttttttcccccatcaggtataatgggtctctcccaaatggcgatagaggaaggaggaaaagtaggtttgctttgtttaaaagacctaaggcaaatggggtgaagcccagcactgtgcatattgcttgtactcctcaggctgcaaaggcaataagcaacaaagaccagcatagcatatcatatactttatctcgggcccagactgtggtggttgaatatactcatgacagcaacaccgatatgtttcagattggccggtcgactgaaagccccattgattttgtagtaactgacacggttcctggaagtcaaagtaattctgatacacagtcagtacaaagcactatatcaagatttgcctgcagaatcatatgtgaacggaatcctccctttacagcacggatttatgctgcaggatttgactcatcaaaaaacatctttcttggggagaaggctgccaaatggaagacatcagatggacagatggatggcttgaccactaatggtgttcttgtgatgcatccacgcaatgggttcacagaagactccaagcctggaatatggagagaaatatcggtgtgtggaaatgtatttagcctacgtgaaaccagatcggctcagcagagaggaaaaatggtggaaattgaaaccaatcagttacaagatggctcgttaattgacctctgtggtgcaacattgttatggcgtactgcagaaggcctttcccacactcctaccgtgaagcatttagaagctttaagacaggaaatcaatgcagcacgacctcagtgccctgtagggttcaacacactagcatttcctagtatgaagaggaaagacgttgtagatgaaaaacaaccatgggtatatctaaactgcggccatgtacatggctatcataactggggaaacaaagaagaacgtgatggaaaagatcgtgaatgtcctatgtgtaggtctgttggtccctatgttcctctgtggcttggatgtgaagctggattttatgtggacgccggccctccaacccatgcgtttagcccgtgtgggcatgtgtgttcagaaaagacaactgcctattggtcccagatcccacttcctcatggtactcatacttttcatgcagcctgtcccttttgtgcacatcagttggctggtgaacaaggctacatcagacttatttttcaaggacctctagactaacagaccattgtcttgcaggactacattataaatttataagctaagtgagttgggttttcgaacctgttgtccacgtcacagtttttctgctctggtcatttgcattaagatgaagaattttttaaaacatttataataaatagtagcaatttctgagcaaaaatctgggaaactcaagcaaaggaatttctgaaagtatcagtcttctgaattctgagttttgaaaatatattttgaggagaaaaagacatagtctaatttgatgccttccttttagtgtttttgaatcacctatcctcagtgctgaaattgttttgtataactgagggtactgttggttcaaactatgttagtttacagtttgttgcaaacattgtaaaatacagcgacatgtatattaacttttttctatttatctttattatagaaaataccttagaatgttcttgatagagtagcatggtaacgatggtgtcacacccttggtgtgaatggtagcttagtgagcaacctagctcaaggatttgcaaagttaggaagaaggacgagagagcctctctccccaccccaatctaaatatggaatttggtaaattagaatactttgtaatttgtaagaccaaattcatactaattacccgcgtgaaaggtgtttgtttttaacaacattgaagataatcaggaaagattttttcttaatgtttctctcgagcgtagtactataacaaaaacttaatgctaagaaacattttatatgctcctttggatatgcaatttaatctagattatctatttttctcccatgataactaatctgtttttagtatcagcagcatttggcaagtttattttttggatataaactgtggttcatctgttcactgtttctagaaaaaaatcattgccataagaaaaagtataaattagcaagaaaggagagtgacttgatttgcttttggaaaaagaaatgcttaattaattattctgtatttggccttattcgggcattaggaaatctagagatctaaagggttgaatgacaatagtgcccccgtttttagcagaccagccttaactctgggtttgaatcctaaggagattgccacagtgagacttaaggaaatgtttggttggcagatgagcaccaatgactgcagcgtggagtgacgcactgcatggtctgtttattctctaattccaatatgtcttttgcttccagaagcaagaaaagtttcttctctcccctccttcccacccttttttcaaaggcaccacaagtatagacagttgcactacatcaaatctttttttgacacttgtagaaaccagtacacttttagattagacagtatcttcttttaatattttgatttgttttcctttagtttgaaaagttgtataatacttaactgactgtagcaaagttttatatgtggtagcatacctttaatttatcctattacaaaactgttctgaattttcttttggtttttaaaaaacaaaacttgttgcttagaagccatgaattattttattttacttcaactgtcgaaacttccttgttttaaaaaatgatcatttgggttcactcaggaaatgcatgtcaggaaacttgtattataagtttattagttgtgatgtatcagtaactgctgttacccctttttcaaagaaatgtaattgattttgaagttttctagattgtcacatgctttgtgactaatgcaagaaagcaagtcctgtgttgtatttgttctagtcatttttattcaggctatatattgtagcttaatttttatttgcaattaatttatttaaactaagtaaatacttttcaaaatacataa

SEQ ID NO: 376194 - DNA, 3280 bp, Homo sapiens
ccccggctagacccctcccctccttgcgagtgtatgtcagtgacccagaggcggtgtgaggcggagggaccgtcggggggcgccgccgccgcctccactagcagcagcggcagcagccctagtcccgcggtgcggtcgaattggtccccagccctccgggagcgcaccacaaagcagccccaacgcctctccctgcgtccgcggctcctcagcgctcggctccgtggtcaacttcccctcgctgggctcggctggcgggcgcggagggcagcggcggaacggcgggctgtctgctcgcgctccccgcgcacaacacttcaccctctcgcctcgggtctcgggggccgctctgggatcccggccaccagcaattgtccggcaataagcaacaaagaccagcatagcatatcatatactttatctcgggcccagactgtggtggttgaatatactcatgacagcaacaccgatatgtttcagattggccggtcgactgaaagccccattgattttgtagtaactgacacggttcctggaagtcaaagtaattctgatacacagtcagtacaaagcactatatcaagatttgcctgcagaatcatatgtgaacggaatcctccctttacagcacggatttatgctgcaggatttgactcatcaaaaaacatctttcttggggagaaggctgccaaatggaagacatcagatggacagatggatggcttgaccactaatggtgttcttgtgatgcatccacgcaatgggttcacagaagactccaagcctggaatatggagagaaatatcggtgtgtggaaatgtatttagcctacgtgaaaccagatcggctcagcagagaggaaaaatggtggaaattgaaaccaatcagttacaagatggctcgttaattgacctctgtggtgcaacattgttatggcgtactgcagaaggcctttcccacactcctaccgtgaagcatttagaagctttaagacaggaaatcaatgcagcacgacctcagtgccctgtagggttcaacacactagcatttcctagtatgaagaggaaagacgttgtagatgaaaaacaaccatgggtatatctaaactgcggccatgtacatggctatcataactggggaaacaaagaagaacgtgatggaaaagatcgtgaatgtcctatgtgtaggtctgttggtccctatgttcctctgtggcttggatgtgaagctggattttatgtggacgccggccctccaacccatgcgtttagcccgtgtgggcatgtgtgttcagaaaagacaactgcctattggtcccagatcccacttcctcatggtactcatacttttcatgcagcctgtcccttttgtgcacatcagttggctggtgaacaaggctacatcagacttatttttcaaggacctctagactaacagaccattgtcttgcaggactacattataaatttataagctaagtgagttgggttttcgaacctgttgtccacgtcacagtttttctgctctggtcatttgcattaagatgaagaattttttaaaacatttataataaatagtagcaatttctgagcaaaaatctgggaaactcaagcaaaggaatttctgaaagtatcagtcttctgaattctgagttttgaaaatatattttgaggagaaaaagacatagtctaatttgatgccttccttttagtgtttttgaatcacctatcctcagtgctgaaattgttttgtataactgagggtactgttggttcaaactatgttagtttacagtttgttgcaaacattgtaaaatacagcgacatgtatattaacttttttctatttatctttattatagaaaataccttagaatgttcttgatagagtagcatggtaacgatggtgtcacacccttggtgtgaatggtagcttagtgagcaacctagctcaaggatttgcaaagttaggaagaaggacgagagagcctctctccccaccccaatctaaatatggaatttggtaaattagaatactttgtaatttgtaagaccaaattcatactaattacccgcgtgaaaggtgtttgtttttaacaacattgaagataatcaggaaagattttttcttaatgtttctctcgagcgtagtactataacaaaaacttaatgctaagaaacattttatatgctcctttggatatgcaatttaatctagattatctatttttctcccatgataactaatctgtttttagtatcagcagcatttggcaagtttattttttggatataaactgtggttcatctgttcactgtttctagaaaaaaatcattgccataagaaaaagtataaattagcaagaaaggagagtgacttgatttgcttttggaaaaagaaatgcttaattaattattctgtatttggccttattcgggcattaggaaatctagagatctaaagggttgaatgacaatagtgcccccgtttttagcagaccagccttaactctgggtttgaatcctaaggagattgccacagtgagacttaaggaaatgtttggttggcagatgagcaccaatgactgcagcgtggagtgacgcactgcatggtctgtttattctctaattccaatatgtcttttgcttccagaagcaagaaaagtttcttctctcccctccttcccacccttttttcaaaggcaccacaagtatagacagttgcactacatcaaatctttttttgacacttgtagaaaccagtacacttttagattagacagtatcttcttttaatattttgatttgttttcctttagtttgaaaagttgtataatacttaactgactgtagcaaagttttatatgtggtagcatacctttaatttatcctattacaaaactgttctgaattttcttttggtttttaaaaaacaaaacttgttgcttagaagccatgaattattttattttacttcaactgtcgaaacttccttgttttaaaaaatgatcatttgggttcactcaggaaatgcatgtcaggaaacttgtattataagtttattagttgtgatgtatcagtaactgctgttacccctttttcaaagaaatgtaattgattttgaagttttctagattgtcacatgctttgtgactaatgcaagaaagcaagtcctgtgttgtatttgttctagtcatttttattcaggctatatattgtagcttaatttttatttgcaattaatttatttaaactaagtaaatacttttcaaaatacataa

SEQ ID NO: 376195 - DNA, 4035 bp, Homo sapiens
ccccggctagacccctcccctccttgcgagtgtatgtcagtgacccagaggcggtgtgaggcggagggaccgtcggggggcgccgccgccgcctccactagcagcagcggcagcagccctagtcccgcggtgcggtcgaattggtccccagccctccgggagcgcaccacaaagcagccccaacgcctctccctgcgtccgcggctcctcagcgctcggctccgtggtcaacttcccctcgctgggctcggctggcgggcgcggagggcagcggcggaacggcgggctgtctgctcgcgctccccgcgcacaacacttcaccctctcgcctcgggtctcgggggccgctctgggatcccggccaccagcaattgtccggaaataatgcaaaaggtgtcccaaggctcctgaccagtgaacaaagatttgagaaagacagccaagctcatgttttctcctgatcaagaaaatcatccatctaaagcaccagtaaaatatggtgaactcattgtcttagggtataatgggtctctcccaaatggcgatagaggaaggaggaaaagtaggtttgctttgtttaaaagacctaaggcaaatggggtgaagcccagcactgtgcatattgcttgtactcctcaggctgcaaaggcaataagcaacaaagaccagcatagcatatcatatactttatctcgggcccagactgtggtggttgaatatactcatgacagcaacaccgatatgtttcagattggccggtcgactgaaagccccattgattttgtagtaactgacacggttcctggaagtcaaagtaattctgatacacagtcagtacaaagcactatatcaagatttgcctgcagaatcatatgtgaacggaatcctccctttacagcacggatttatgctgcaggatttgactcatcaaaaaacatctttcttggggagaaggctgccaaatggaagacatcagatggacagatggatggcttgaccactaatggtgttcttgtgatgcatccacgcaatgggttcacagaagactccaagcctggaatatggagagaaatatcggtgtgtggaaatgtatttagcctacgtgaaaccagatcggctcagcagagaggaaaaatggtggaaattgaaaccaatcagttacaagatggctcgttaattgacctctgtggtgcaacattgttatggcgtactgcagaaggcctttcccacactcctaccgtgaagcatttagaagctttaagacaggaaatcaatgcagcacgacctcagtgccctgtagggttcaacacactagcatttcctagtatgaagaggaaagacgttgtagatgaaaaacaaccatgggtatatctaaactgcggccatgtacatggctatcataactggggaaacaaagaagaacgtgatggaaaagatcgtgaatgtcctatgtgtaggtctgttggtccctatgttcctctgtggcttggatgtgaagctggattttatgtggacgccggccctccaacccatgcgtttagcccgtgtgggcatgtgtgttcagaaaagacaactgcctattggtcccagatcccacttcctcatggtactcatacttttcatgcagcctgtcccttttgtgcacatcagttggctggtgaacaaggctacatcagacttatttttcaaggacctctagactaacagaccattgtcttgcaggactacattataaatttataagctaagtgagttgggttttcgaacctgttgtccacgtcacagtttttctgctctggtcatttgcattaagatgaagaattttttaaaacatttataataaatagtagcaatttctgagcaaaaatctgggaaactcaagcaaaggaatttctgaaagtatcagtcttctgaattctgagttttgaaaatatattttgaggagaaaaagacatagtctaatttgatgccttccttttagtgtttttgaatcacctatcctcagtgctgaaattgttttgtataactgagggtactgttggttcaaactatgttagtttacagtttgttgcaaacattgtaaaatacagcgacatgtatattaacttttttctatttatctttattatagaaaataccttagaatgttcttgatagagtagcatggtaacgatggtgtcacacccttggtgtgaatggtagcttagtgagcaacctagctcaaggatttgcaaagttaggaagaaggacgagagagcctctctccccaccccaatctaaatatggaatttggtaaattagaatactttgtaatttgtaagaccaaattcatactaattacccgcgtgaaaggtgtttgtttttaacaacattgaagataatcaggaaagattttttcttaatgtttctctcgagcgtagtactataacaaaaacttaatgctaagaaacattttatatgctcctttggatatgcaatttaatctagattatctatttttctcccatgataactaatctgtttttagtatcagcagcatttggcaagtttattttttggatataaactgtggttcatctgttcactgtttctagaaaaaaatcattgccataagaaaaagtataaattagcaagaaaggagagtgacttgatttgcttttggaaaaagaaatgcttaattaattattctgtatttggccttattcgggcattaggaaatctagagatctaaagggttgaatgacaatagtgcccccgtttttagcagaccagccttaactctgggtttgaatcctaaggagattgccacagtgagacttaaggaaatgtttggttggcagatgagcaccaatgactgcagcgtggagtgacgcactgcatggtctgtttattctctaattccaatatgtcttttgcttccagaagcaagaaaagtttcttctctcccctccttcccacccttttttcaaaggcaccacaagtatagacagttgcactacatcaaatctttttttgacacttgtagaaaccagtacacttttagattagacagtatcttcttttaatattttgatttgttttcctttagtttgaaaagttgtataatacttaactgactgtagcaaagttttatatgtggtagcatacctttaatttatcctattacaaaactgttctgaattttcttttggtttttaaaaaacaaaacttgttgcttagaagccatgaattattttattttacttcaactgtcgaaacttccttgttttaaaaaatgatcatttgggttcactcaggaaatgcatgtcaggaaacttgtattataagtttattagttgtgatgtatcagtaactgctgttacccctttttcaaagaaatgtaattgattttgaagttttctagattgtcacatgctttgtgactaatgcaagaaagcaagtcctgtgttgtatttgttctagtcatttttattcaggctatatattgtagcttaatttttatttgcaattaatttatttaaactaagtaaatacttttcaaaatacataaaaaaaaaaaaaaaaaaaaaaaaaaaaaaaaaaaaaaaaaaaaaaaaaaaaaaaaaaaacaaaaaaaaaaaaaagaaataaaaaatgagaaagaaaagaaaaaaacaaaaaaagaacaagaaacaacaaaaagacaaaaaataaaagttaaaaaactatagaaacaataagataaaaaaacgaaaaaaaagggaaacacacgtagactgtggggacaacaacatcgcggcagtcctgcgccagccaccatcagccaccaccaattcacactacctcaaccaacattacaataaatatctaaatttcaatattctccgaaatcgctcaactctacttcatcactgcttctccaaatccataaaattctaaactctatccatcaccacaactcacatatcaccgtataacacctccctcctacattcttcacaacattattcactttcactcacaaaacgcaccagtccacattcaatcatatacccc

SEQ ID NO: 376196 - DNA, 3557 bp, Homo sapiens
ccccggctagacccctcccctccttgcgagtgtatgtcagtgacccagaggcggtgtgaggcggagggaccgtcggggggcgccgccgccgcctccactagcagcagcggcagcagccctagtcccgcggtgcggtcgaattggtccccagccctccgggagcgcaccacaaagcagccccaacgcctctccctgcgtccgcggctcctcagcgctcggctccgtggtcaacttcccctcgctgggctcggctggcgggcgcggagggcagcggcggaacggcgggctgtctgctcgcgctccccgcgcacaacacttcaccctctcgcctcgggtctcgggggccgctctgggatcccggccaccagcaattgtccggaaataatgcaaaaggtgtcccaaggctcctgaccagtgaacaaagatttgagaaagacagccaagctcatgttttctcctgatcaagaaaatcatccatctaaagcaccagtaaaatatggtgaactcattgtcttagggtataatgggtctctcccaaatggcgatagaggaaggaggaaaagtaggtttgctttgtttaaaagacctaaggcaaatggggtgaagcccagcactgtgcatattgcttgtactcctcaggctgcaaagaaattgccttttgtttggattggagaagagactttggagacatggcaataagcaacaaagaccagcatagcatatcatatactttatctcgggcccagactgtggtggttgaatatactcatgacagcaacaccgatatgtttcagtaactgacacggttcctggaagtcaaagtaattctgatacacagtcagtacaaagcactatatcaagatttgcctgcagaatcatatgtgaacggaatcctccctttacagcacggatttatgctgcaggatttgactcatcaaaaaacatctttcttggggagaaggctgccaaatggaagacatcagatggacagatggatggcttgaccactaatggtgttcttgtgatgcatccacgcaatgggttcacagaagactccaagcctggaatatggagagaaatatcggtgtgtggaaatgtatttagcctacgtgaaaccagatcggctcagcagagaggaaaaatggtggaaattgaaaccaatcagttacaagatggctcgttaattgacctctgtggtgcaacattgttatggcgtactgcagaaggcctttcccacactcctaccgtgaagcatttagaagctttaagacaggaaatcaatgcagcacgacctcagtgccctgtagggttcaacacactagcatttcctagtatgaagaggaaagacgttgtagatgaaaaacaaccatgggtatatctaaactgcggccatgtacatggctatcataactggggaaacaaagaagaacgtgatggaaaagatcgtgaatgtcctatgtgtaggtctgttggtccctatgttcctctgtggcttggatgtgaagctggattttatgtggacgccggccctccaacccatgcgtttagcccgtgtgggcatgtgtgttcagaaaagacaactgcctattggtcccagatcccacttcctcatggtactcatacttttcatgcagcctgtcccttttgtgcacatcagttggctggtgaacaaggctacatcagacttatttttcaaggacctctagactaacagaccattgtcttgcaggactacattataaatttataagctaagtgagttgggttttcgaacctgttgtccacgtcacagtttttctgctctggtcatttgcattaagatgaagaattttttaaaacatttataataaatagtagcaatttctgagcaaaaatctgggaaactcaagcaaaggaatttctgaaagtatcagtcttctgaattctgagttttgaaaatatattttgaggagaaaaagacatagtctaatttgatgccttccttttagtgtttttgaatcacctatcctcagtgctgaaattgttttgtataactgagggtactgttggttcaaactatgttagtttacagtttgttgcaaacattgtaaaatacagcgacatgtatattaacttttttctatttatctttattatagaaaataccttagaatgttcttgatagagtagcatggtaacgatggtgtcacacccttggtgtgaatggtagcttagtgagcaacctagctcaaggatttgcaaagttaggaagaaggacgagagagcctctctccccaccccaatctaaatatggaatttggtaaattagaatactttgtaatttgtaagaccaaattcatactaattacccgcgtgaaaggtgtttgtttttaacaacattgaagataatcaggaaagattttttcttaatgtttctctcgagcgtagtactataacaaaaacttaatgctaagaaacattttatatgctcctttggatatgcaatttaatctagattatctatttttctcccatgataactaatctgtttttagtatcagcagcatttggcaagtttattttttggatataaactgtggttcatctgttcactgtttctagaaaaaaatcattgccataagaaaaagtataaattagcaagaaaggagagtgacttgatttgcttttggaaaaagaaatgcttaattaattattctgtatttggccttattcgggcattaggaaatctagagatctaaagggttgaatgacaatagtgcccccgtttttagcagaccagccttaactctgggtttgaatcctaaggagattgccacagtgagacttaaggaaatgtttggttggcagatgagcaccaatgactgcagcgtggagtgacgcactgcatggtctgtttattctctaattccaatatgtcttttgcttccagaagcaagaaaagtttcttctctcccctccttcccacccttttttcaaaggcaccacaagtatagacagttgcactacatcaaatctttttttgacacttgtagaaaccagtacacttttagattagacagtatcttcttttaatattttgatttgttttcctttagtttgaaaagttgtataatacttaactgactgtagcaaagttttatatgtggtagcatacctttaatttatcctattacaaaactgttctgaattttcttttggtttttaaaaaacaaaacttgttgcttagaagccatgaattattttattttacttcaactgtcgaaacttccttgttttaaaaaatgatcatttgggttcactcaggaaatgcatgtcaggaaacttgtattataagtttattagttgtgatgtatcagtaactgctgttacccctttttcaaagaaatgtaattgattttgaagttttctagattgtcacatgctttgtgactaatgcaagaaagcaagtcctgtgttgtatttgttctagtcatttttattcaggctatatattgtagcttaatttttatttgcaattaatttatttaaactaagtaaatacttttcaaaatacataa

SEQ ID NO: 376197 - DNA, 4159 bp, Homo sapiens
  misc_feature (846)..(846): n is a, c, g, or t
taaatttagcatagtaactacagtattagaacttcaaatcacatagattttaatggtatcaatgacaaacagctcttaactaccaaaaacttttccagattaaattcttctagcaggaaatttgagagtcatttgaagaatagtttaatatttagcttagggttttaaaccgccagtcttagcctatgggttcctcagttaatcattagcaacagtaattgtctctgtgtctggtacttggtgtcttaaaatgcagataatttttcttctcaaccctctagaagtgaagctggacaaggtttcatgctgttgctgcttagaaaagagctttgaactacaggaacgcaatgtgggactaaagagcaagatccagaagtgggatgagtcatgcaactcagaggacagtagtgaaggggcagtgaggaatcgacagagggtctgggggcaatacaaagcctaaaatagctaaaataattattagctaaggggctgtactttggacttacagcaaggctagcaacattaccaagggctttctccaatacaaagtattttattttttataaagggtcaatgtagtttctatatatggcagtcattgagtaaactctcttctcagctttaaaacattcttccttgccagccacaattacaggccattttataatcacttcctcctccagcctcaaaactgtccctgttccctgcttcctttccccctagattgaccaactacatatggtagatcatcaaacccaagatttgtcagggggcgggggcaggggaggtggacggtgaatgaggaaagattattattaagctactgctcatgcctcaatgaagcantaaagaatgacataaccacatgacaaacatacttaaattcaaattctggctttgccagtgtcacttcagaatataattcttctgagtctgtttcctaatgtacaaaaatggggacagtgatttcaatctagtagaatttttgcaagggtagatttagtgaggtgatgtgtatgggatagcattcaatagtgcctggtacatagtaaacacccaaatatttttattttgtttttaacttgtttccattggtttagtacttgcttacctttaggatgtatatgtgtgtgtgtgtgtatgtgtacatgttatggagaaatggtcataagatctgaacaacaaaagtatgtttactacttagcaaacatgtctgttggacaggttctgctaacataatgagagtgcatttgtacattcaggtagctaagacttaacaaatctaaaaattccttacttcaaaagttcagctatttaaagtgtttggttcacaattaaaggagattgtgttttaaacaatacatactgtactttttaaaggttgtattagcacatgcaaacagttcaccttaaaaaaacagaatgagtcataaggagtcagacatgccattaatcagctcttaattatcttccataaaagagggaaggaaaaaaatagagataacacgaatctgtgtataatccaaaaggttctctgtgacttggaatgaagccagaaaaagaatctcattttgtttcacacactggcacctggtatggagatcaacagttgctcaaaggaattttaaataattataatgtgttaatagataattaattgggaattgattctgcaaggcaaagtcaaacatttgttttataattgtgcagttcttgcaagagatcacctatactttttttcccccatcaggtataatgggtctctcccaaatggcgatagaggaaggaggaaaagtaggtttgctttgtttaaaagacctaaggcaaatggggtgaagcccagcactgtgcatattgcttgtactcctcaggctgcaaaggtaaaaaaaaaaaaaaaaaagctacataaattaacttggagaatttgaaagacttttatgtgttgtttgtattctctagcattccccttacatttctatttcagaaattgccttttgtttggattggagaagagactttggagacatggtatttgaagagctgccatatggaaggggaattggacttttaaaaaaaaaatgacaaaccaggatcagtgggtggaaattagaaggaaacactctgtttccttattaaaagaggtgggatgggggacagggctttatctagtacttagaattatgcagctgtctgccctgagaagtgggaagttcccactctgttactagaggggtctccctggactggatgaagaatgtgatgtataatatgtgtattcaggtattagaagcacatttggatgaggtaatttttaaactaagggtctttacttaagattctttgtattggttgtattcatttttggtttataacttcatatatttgagcatagtaccttgcacaaagtagacctcaataattattaagttgaatcaaagctatgaaggcaatatccaactgcatctacaatataacttctcaaccccctagcctatttcatgcttctagcccccttgtattcttctaacaaaatttccagaagctggaccaccatttcaggatacttgggcttttcctagagtgacagacaaggagggggaatttcacatctttatattttctgtgaattcatctgcctccaattttataacactgactttgtgttacaaagaatttaatattgtaatgagcaaataagaaaaattagaaagagttctttgactcctggaagtacctgtatctttagctaagtagccctaggatgtacattaatattataccatctgaagcatatctttgtaaattaaataaacaagagacagaaaaattggcatatgatgtggttttaggttgcagcttcagtgtctgaaggtaattggcttttcagctttgttttatatccagtttgatttgtgaaagaatccttaggccttgactaggactcctctgttactatttgggagccagttggtgcagaaaagggacagtttctttttgctcctttggcgagaaggaatatactaagcaggtggtggaagtaaacctcagattgattgaatctgaggagcttcttacagtagctccccccggagtgctcttgacattttgggtatgccactttttcattgttcagtactttcccacatactacaggacatttataggtccttcacccacaaaatgccatttgagcctgcaaatcctcgtaacagccaaaaaatgcacagcatattttcagatgccccttagactgctaatactacctctggttgaaaaccactatcagggaaaatatttctaatccctgcctctgtaataccatattctgtacttttcttcctattttactctgccatgccctcatgttttcattgttatctctttttcatctttcatctttactaggcaataagaatcttagggatcacagattgactcttggctgggtgcggtagctcacacctataatcccagcacttgagaggccaaggtgggcggatcacttgagctcgggagttcgagaccagcctgggcaacatggtgaaactccatctccaccaaaaatacaaaaaattagccaagcgtggtggcatgccccgaagtcccagctacttggcaggctgaagtgggaggatcacttgagcccgggaggcagaggctgcagtgagctgagatcatgccactgtactgcagcctgagtgacagagtgagaccctgtctcagttaaaaaaaaaaaaaaaaaaagattgactcctcctctttaaattttggaggaatgtatttgtgaggtcatgatgaaaattaagcatttagtctggcagtcatctgggatgagtagttaaaaccctgcgttctaggccagtgagactcaaacgtaacttgacatagtttttattctcagtcttagagtaggtttaataactaacaaacaaagattacaatttcaaagcacataaaaaccaatgttttaaaatctctttagccactaagaattaattttcaaaatactgagtaattgtttcattgaaaagtgagctgtttaacggggcacagtggcacatgcctgttagtcccagctccttgggaggcagaggttacagtgagccgagatagcaccactgcactgcaacctaggcgacagagcgagactctgtctcca

SEQ ID NO: 376198 - DNA, 3908 bp, Homo sapiens
  misc_feature (846)..(846): n is a, c, g, or t
taaatttagcatagtaactacagtattagaacttcaaatcacatagattttaatggtatcaatgacaaacagctcttaactaccaaaaacttttccagattaaattcttctagcaggaaatttgagagtcatttgaagaatagtttaatatttagcttagggttttaaaccgccagtcttagcctatgggttcctcagttaatcattagcaacagtaattgtctctgtgtctggtacttggtgtcttaaaatgcagataatttttcttctcaaccctctagaagtgaagctggacaaggtttcatgctgttgctgcttagaaaagagctttgaactacaggaacgcaatgtgggactaaagagcaagatccagaagtgggatgagtcatgcaactcagaggacagtagtgaaggggcagtgaggaatcgacagagggtctgggggcaatacaaagcctaaaatagctaaaataattattagctaaggggctgtactttggacttacagcaaggctagcaacattaccaagggctttctccaatacaaagtattttattttttataaagggtcaatgtagtttctatatatggcagtcattgagtaaactctcttctcagctttaaaacattcttccttgccagccacaattacaggccattttataatcacttcctcctccagcctcaaaactgtccctgttccctgcttcctttccccctagattgaccaactacatatggtagatcatcaaacccaagatttgtcagggggcgggggcaggggaggtggacggtgaatgaggaaagattattattaagctactgctcatgcctcaatgaagcantaaagaatgacataaccacatgacaaacatacttaaattcaaattctggctttgccagtgtcacttcagaatataattcttctgagtctgtttcctaatgtacaaaaatggggacagtgatttcaatctagtagaatttttgcaagggtagatttagtgaggtgatgtgtatgggatagcattcaatagtgcctggtacatagtaaacacccaaatatttttattttgtttttaacttgtttccattggtttagtacttgcttacctttaggatgtatatgtgtgtgtgtgtgtatgtgtacatgttatggagaaatggtcataagatctgaacaacaaaagtatgtttactacttagcaaacatgtctgttggacaggttctgctaacataatgagagtgcatttgtacattcaggtagctaagacttaacaaatctaaaaattccttacttcaaaagttcagctatttaaagtgtttggttcacaattaaaggagattgtgttttaaacaatacatactgtactttttaaaggttgtattagcacatgcaaacagttcaccttaaaaaaacagaatgagtcataaggagtcagacatgccattaatcagctcttaattatcttccataaaagagggaaggaaaaaaatagagataacacgaatctgtgtataatccaaaaggttctctgtgacttggaatgaagccagaaaaagaatctcattttgtttcacacactggcacctggtatggagatcaacagttgctcaaaggaattttaaataattataatgtgttaatagataattaattgggaattgattctgcaaggcaaagtcaaacatttgttttataattgtgcagttcttgcaagagatcacctatactttttttcccccatcaggtataatgggtctctcccaaatggcgatagaggaaggaggaaaagtaggtttgctttgtttaaaagacctaaggcaaatggggtgaagcccagcactgtgcatattgcttgtactcctcaggctgcaaaggtaaaaaaaaaaaaaaaaaagctacataaattaacttggagaatttgaaagacttttatgtgttgtttgtattctctagcattccccttacatttctatttcagaaattgccttttgtttggattggagaagagactttggagacatggtatttgaagagctgccatatggaaggggaattggacttttaaaaaaaaaatgacaaaccaggatcagtgggtggaaattagaaggaaacactctgtttccttattaaaagaggtgggatgggggacagggctttatctagtacttagaattatgcagctgtctgccctgagaagtgggaagttcccactctgttactagaggggtctccctggactggatgaagaatgtgatgtataatatgtgtattcaggtattagaagcacatttggatgaggtaatttttaaactaagggtctttacttaagattctttgtattggttgtattcatttttggtttataacttcatatatttgagcatagtaccttgcacaaagtagacctcaataattattaagttgaatcaaagctatgaaggcaatatccaactgcatctacaatataacttctcaaccccctagcctatttcatgcttctagcccccttgtattcttctaacaaaatttccagaagctggaccaccatttcaggatacttgggcttttcctagagtgacagacaaggagggggaatttcacatctttatattttctgtgaattcatctgcctccaattttataacactgactttgtgttacaaagaatttaatattgtaatgagcaaataagaaaaattagaaagagttctttgactcctggaagtacctgtatctttagctaagtagccctaggatgtacattaatattataccatctgaagcatatctttgtaaattaaataaacaagagacagaaaaattggcatatgatgtggttttaggttgcagcttcagtgtctgaaggtaattggcttttcagctttgttttatatccagtttgatttgtgaaagaatccttaggccttgactaggactcctctgttactatttgggagccagttggtgcagaaaagggacagtttctttttgctcctttggcgagaaggaatatactaagcaggtggtggaagtaaacctcagattgattgaatctgaggagcttcttacagtagctccccccggagtgctcttgacattttgggtatgccactttttcattgttcagtactttcccacatactacaggacatttataggtccttcacccacaaaatgccatttgagcctgcaaatcctcgtaacagccaaaaaatgcacagcatattttcagatgccccttagactgctaatactacctctggttgaaaaccactatcagggaaaatatttctaatccctgcctctgtaataccatattctgtacttttcttcctattttactctgccatgccctcatgttttcattgttatctctttttcatctttcatctttactaggcaataagaatcttagggatcacagattgactcttggctgggtgcggtagctcacacctataatcccagcacttgagaggccaaggtgggcggatcacttgagctcgggagttcgagaccagcctgggcaacatggtgaaactccatctccaccaaaaatacaaaaaattagccaagcgtggtggcatgccccgaagtcccagctacttggcaggctgaagtgggaggatcacttgagcccgggagcgaggtacaggagccaatagacactgactgcactagcacagacgagacttgctcaaaaaaaaaaataaaactgagggggccggaccaatcgcctatggagcgatacattaatggcgcgttacaacgtggatggaaaactgcgtaccaactaatcgctgagacatctcttctgcagtgccgatacggtaatcggtaacttgtaacagcctgttaacattgcgaatggaatccttttataaagatgaccggagggtcgg

SEQ ID NO: 376199 - DNA, 3550 bp, Homo sapiens
ccccggctagacccctcccctccttgcgagtgtatgtcagtgacccagaggcggtgtgaggcggagggaccgtcggggggcgccgccgccgcctccactagcagcagcggcagcagccctagtcccgcggtgcggtcgaattggtccccagccctccgggagcgcaccacaaagcagccccaacgcctctccctgcgtccgcggctcctcagcgctcggctccgtggtcaacttcccctcgctgggctcggctggcgggcgcggagggcagcggcggaacggcgggctgtctgctcgcgctccccgcgcacaacacttcaccctctcgcctcgggtctcgggggccgctctgggatcccggccaccagcaattgtccggaaataatgcaaaaggtgtcccaaggctcctgaccagtgaacaaagatttgagaaagacagccaagctcatgttttctcctgatcaagaaaatcatccatctaaagcaccagtaaaatatggtgaactcattgtcttagggtataatgggtctctcccaaatggcgatagaggaaggaggaaaagtaggtttgctttgtttaaaagacctaaggcaaatggggtgaagcccagcactgtgcatattgcttgtactcctcaggctgcaaaggcaataagcaacaaagaccagcatagcatatcatatactttatctcgggcccagactgtggtggttgaatatactcatgacagcaacaccgatatgtttcagattggccggtcgactgaaagccccattgattttgtagtaactgacacggttcctggaagtcaaagtaattctgatacacagtcagtacaaagcactatatcaagatttgcctgcagaatcatatgtgaacggaatcctccctttacagcacggatttatgctgcaggatttgactcatcaaaaaacatctttcttggggagaaggctgccaaatggaagacatcagatggacagatggatggcttgaccactaatggtgttcttgtgatgcatccacgcaatgggttcacagaagactccaagcctggaatatggagagaaatatcggtgtgtggaaatgtatttagcctacgtgaaaccagatcggctcagcagagaggaaaaatggtggaaattgaaaccaatcagttacaagatggctcgttaattgacctctgtggtgcaacattgttatggcgtactgcagaaggcctttcccacactcctaccgtgaagcatttagaagctttaagacaggaaatcaatgcagcacgacctcagtgccctgtagggttcaacacactagcatttcctagtatgaagaggaaagacgttgtagatgaaaaacaaccatgggtatatctaaactgcggccatgtacatggctatcataactggggaaacaaagaagaacgtgatggaaaagatcgtgaatgtcctatgtgtaggtctgttggtccctatgttcctctgtggcttggatgtgaagctggattttatgtggacgccggccctccaacccatgcgtttagcccgtgtgggcatgtgtgttcagaaaagacaactgcctattggtcccagatcccacttcctcatggtactcatacttttcatgcagcctgtcccttttgtgcacatcagttggctggtgaacaaggctacatcagacttatttttcaaggacctctagactaacagaccattgtcttgcaggactacattataaatttataagctaagtgagttgggttttcgaacctgttgtccacgtcacagtttttctgctctggtcatttgcattaagatgaagaattttttaaaacatttataataaatagtagcaatttctgagcaaaaatctgggaaactcaagcaaaggaatttctgaaagtatcagtcttctgaattctgagttttgaaaatatattttgaggagaaaaagacatagtctaatttgatgccttccttttagtgtttttgaatcacctatcctcagtgctgaaattgttttgtataactgagggtactgttggttcaaactatgttagtttacagtttgttgcaaacattgtaaaatacagcgacatgtatattaacttttttctatttatctttattatagaaaataccttagaatgttcttgatagagtagcatggtaacgatggtgtcacacccttggtgtgaatggtagcttagtgagcaacctagctcaaggatttgcaaagttaggaagaaggacgagagagcctctctccccaccccaatctaaatatggaatttggtaaattagaatactttgtaatttgtaagaccaaattcatactaattacccgcgtgaaaggtgtttgtttttaacaacattgaagataatcaggaaagattttttcttaatgtttctctcgagcgtagtactataacaaaaacttaatgctaagaaacattttatatgctcctttggatatgcaatttaatctagattatctatttttctcccatgataactaatctgtttttagtatcagcagcatttggcaagtttattttttggatataaactgtggttcatctgttcactgtttctagaaaaaaatcattgccataagaaaaagtataaattagcaagaaaggagagtgacttgatttgcttttggaaaaagaaatgcttaattaattattctgtatttggccttattcgggcattaggaaatctagagatctaaagggttgaatgacaatagtgcccccgtttttagcagaccagccttaactctgggtttgaatcctaaggagattgccacagtgagacttaaggaaatgtttggttggcagatgagcaccaatgactgcagcgtggagtgacgcactgcatggtctgtttattctctaattccaatatgtcttttgcttccagaagcaagaaaagtttcttctctcccctccttcccacccttttttcaaaggcaccacaagtatagacagttgcactacatcaaatctttttttgacacttgtagaaaccagtacacttttagattagacagtatcttcttttaatattttgatttgttttcctttagtttgaaaagttgtataatacttaactgactgtagcaaagttttatatgtggtagcatacctttaatttatcctattacaaaactgttctgaattttcttttggtttttaaaaaacaaaacttgttgcttagaagccatgaattattttattttacttcaactgtcgaaacttccttgttttaaaaaatgatcatttgggttcactcaggaaatgcatgtcaggaaacttgtattataagtttattagttgtgatgtatcagtaactgctgttacccctttttcaaagaaatgtaattgattttgaagttttctagattgtcacatgctttgtgactaatgcaagaaagcaagtcctgtgttgtatttgttctagtcatttttattcaggctatatattgtagcttaatttttatttgcaattaatttatttaaactaagtaaatacttttcaaaatacataa

SEQ ID NO: 376200 - DNA, 3178 bp, Homo sapiens
agcctaggcaacagagcaagactctgtctttaaaaaaaaagaaagaaagttatgtttttattctgtaactgcttctaaatattcttcagtaccccattcaacccgagaaactactgtcacagctgacaggagttattaacctctctaaatttcagggggaaaatgtataaatatgtcatgtatttgataaatagttttcccttttttttaatgaaaagattatctgattggattgacctgcctactaatttttgctattaactttttcattcttaggcaataagcaacaaagaccagcatagcatatcatatactttatctcgggcccagactgtggtggttgaatatactcatgacagcaacaccgatatgtttcagattggccggtcgactgaaagccccattgattttgtagtaactgacacggttcctggaagtcaaagtaattctgatacacagtcagtacaaagcactatatcaagatttgcctgcagaatcatatgtgaacggaatcctccctttacagcacggatttatgctgcaggatttgactcatcaaaaaacatctttcttggggagaaggctgccaaatggaagacatcagatggacagatggatggcttgaccactaatggtgttcttgtgatgcatccacgcaatgggttcacagaagactccaagcctggaatatggagagaaatatcggtgtgtggaaatgtatttagcctacgtgaaaccagatcggctcagcagagaggaaaaatggtggaaattgaaaccaatcagttacaagatggctcgttaattgacctctgtggtgcaacattgttatggcgtactgcagaaggcctttcccacactcctaccgtgaagcatttagaagctttaagacaggaaatcaatgcagcacgacctcagtgccctgtagggttcaacacactagcatttcctagtatgaagaggaaagacgttgtagatgaaaaacaaccatgggtatatctaaactgcggccatgtacatggctatcataactggggaaacaaagaagaacgtgatggaaaagatcgtgaatgtcctatgtgtaggtctgttggtccctatgttcctctgtggcttggatgtgaagctggattttatgtggacgccggccctccaacccatgcgtttagcccgtgtgggcatgtgtgttcagaaaagacaactgcctattggtcccagatcccacttcctcatggtactcatacttttcatgcagcctgtcccttttgtgcacatcagttggctggtgaacaaggctacatcagacttatttttcaaggacctctagactaacagaccattgtcttgcaggactacattataaatttataagctaagtgagttgggttttcgaacctgttgtccacgtcacagtttttctgctctggtcatttgcattaagatgaagaattttttaaaacatttataataaatagtagcaatttctgagcaaaaatctgggaaactcaagcaaaggaatttctgaaagtatcagtcttctgaattctgagttttgaaaatatattttgaggagaaaaagacatagtctaatttgatgccttccttttagtgtttttgaatcacctatcctcagtgctgaaattgttttgtataactgagggtactgttggttcaaactatgttagtttacagtttgttgcaaacattgtaaaatacagcgacatgtatattaacttttttctatttatctttattatagaaaataccttagaatgttcttgatagagtagcatggtaacgatggtgtcacacccttggtgtgaatggtagcttagtgagcaacctagctcaaggatttgcaaagttaggaagaaggacgagagagcctctctccccaccccaatctaaatatggaatttggtaaattagaatactttgtaatttgtaagaccaaattcatactaattacccgcgtgaaaggtgtttgtttttaacaacattgaagataatcaggaaagattttttcttaatgtttctctcgagcgtagtactataacaaaaacttaatgctaagaaacattttatatgctcctttggatatgcaatttaatctagattatctatttttctcccatgataactaatctgtttttagtatcagcagcatttggcaagtttattttttggatataaactgtggttcatctgttcactgtttctagaaaaaaatcattgccataagaaaaagtataaattagcaagaaaggagagtgacttgatttgcttttggaaaaagaaatgcttaattaattattctgtatttggccttattcgggcattaggaaatctagagatctaaagggttgaatgacaatagtgcccccgtttttagcagaccagccttaactctgggtttgaatcctaaggagattgccacagtgagacttaaggaaatgtttggttggcagatgagcaccaatgactgcagcgtggagtgacgcactgcatggtctgtttattctctaattccaatatgtcttttgcttccagaagcaagaaaagtttcttctctcccctccttcccacccttttttcaaaggcaccacaagtatagacagttgcactacatcaaatctttttttgacacttgtagaaaccagtacacttttagattagacagtatcttcttttaatattttgatttgttttcctttagtttgaaaagttgtataatacttaactgactgtagcaaagttttatatgtggtagcatacctttaatttatcctattacaaaactgttctgaattttcttttggtttttaaaaaacaaaacttgttgcttagaagccatgaattattttattttacttcaactgtcgaaacttccttgttttaaaaaatgatcatttgggttcactcaggaaatgcatgtcaggaaacttgtattataagtttattagttgtgatgtatcagtaactgctgttacccctttttcaaagaaatgtaattgattttgaagttttctagattgtcacatgctttgtgactaatgcaagaaagcaagtcctgtgttgtatttgttctagtcatttttattcaggctatatattgtagcttaatttttatttgcaattaatttatttaaactaagtaaatacttttcaaaatacataa

SEQ ID NO: 376201 - DNA, 3753 bp, Homo sapiens
ccccggctagacccctcccctccttgcgagtgtatgtcagtgacccagaggcggtgtgaggcggagggaccgtcggggggcgccgccgccgcctccactagcagcagcggcagcagccctagtcccgcggtgcggtcgaattggtccccagccctccgggagcgcaccacaaagcagccccaacgcctctccctgcgtccgcggctcctcagcgctcggctccgtggtcaacttcccctcgctgggctcggctggcgggcgcggagggcagcggcggaacggcgggctgtctgctcgcgctccccgcgcacaacacttcaccctctcgcctcgggtctcgggggccgctctgggatcccggccaccagcaattgtccggaaataatgcaaaaggtgtcccaaggctcctgaccagtgaacaaagatttgagaaagacagccaagctcatgttttctcctgatcaagaaaatcatccatctaaagcaccagtaaaatatggtgaactcattgtcttagggtataatgggtctctcccaaatggcgatagaggaaggaggaaaagtaggtttgctttgtttaaaagacctaaggcaaatggggtgaagcccagcactgtgcatattgcttgtactcctcaggctgcaaaggcaataagcaacaaagaccagcatagcatatcatatactttatctcgggcccagactgtggtggttgaatatactcatgacagcaacaccgatatgtttcagattggccggtcgactgaaagccccattgattttgtagtaactgacacggttcctggaagtcaaagtaattctgatacacagtcagtacaaagcactatatcaagatttgcctgcagaatcatatgtgaacggaatcctccctttacagcacggatttatgctgcaggatttgactcatcaaaaaacatctttcttggggagaaggctgccaaatggaagacatcagatggacagatggatggcttgaccactaatggtgttcttgtgatgcatccacgcaatgggttcacagaagactccaagcctggaatatggagagaaatatcggtgtgtggaaatgtatttagcctacgtgaaaccagatcggctcagcagagaggaaaaatggtggaaattgaaaccaatcagttacaagatggctcgttaattgacctctgtggtgcaacattgttatggcgtactgcagaaggcctttcccacactcctaccgtgaagcatttagaagctttaagacaggaaatcaatgcagcacgacctcagtgccctgtagggttcaacacactagcatttcctagtatgaagaggaaagacgttgtagatgaaaaacaaccatgggtatatctaaactgcggccatgtacatggctatcataactggggaaacaaagaagaacgtgatggaaaagatcgtgaatgtcctatgtgtaggtctgttggtccctatgttcctctgtggcttggatgtgaagctggattttatgtggacgccggccctccaacccatgcgtttagcccgtgtgggcatgtgtgttcagaaaagacaactgcctattggtcccagatcccacttcctcatggtactcatacttttcatgcagcctgtcccttttgtgcacatcagttggctggtgaacaaggctacatcagacttatttttcaaggacctctagactaacagaccattgtcttgcaggactacattataaatttataagctaagtgagttgggttttcgaacctgttgtccacgtcacagtttttctgctctggtcatttgcattaagatgaagaattttttaaaacatttataataaatagtagcaatttctgagcaaaaatctgggaaactcaagcaaaggaatttctgaaagtatcagtcttctgaattctgagttttgaaaatatattttgaggagaaaaagacatagtctaatttgatgccttccttttagtgtttttgaatcacctatcctcagtgctgaaattgttttgtataactgagggtactgttggttcaaactatgttagtttacagtttgttgcaaacattgtaaaatacagcgacatgtatattaacttttttctatttatctttattatagaaaataccttagaatgttcttgatagagtagcatggtaacgatggtgtcacacccttggtgtgaatggtagcttagtgagcaacctagctcaaggatttgcaaagttaggaagaaggacgagagagcctctctccccaccccaatctaaatatggaatttggtaaattagaatactttgtaatttgtaagaccaaattcatactaattacccgcgtgaaaggtgtttgtttttaacaacattgaagataatcaggaaagattttttcttaatgtttctctcgagcgtagtactataacaaaaacttaatgctaagaaacattttatatgctcctttggatatgcaatttaatctagattatctatttttctcccatgataactaatctgtttttagtatcagcagcatttggcaagtttattttttggatataaactgtggttcatctgttcactgtttctagaaaaaaatcattgccataagaaaaagtataaattagcaagaaaggagagtgacttgatttgcttttggaaaaagaaatgcttaattaattattctgtatttggccttattcgggcattaggaaatctagagatctaaagggttgaatgacaatagtgcccccgtttttagcagaccagccttaactctgggtttgaatcctaaggagattgccacagtgagacttaaggaaatgtttggttggcagatgagcaccaatgactgcagcgtggagtgacgcactgcatggtctgtttattctctaattccaatatgtcttttgcttccagaagcaagaaaagtttcttctctcccctccttcccacccttttttcaaaggcaccacaagtatagacagttgcactacatcaaatctttttttgacacttgtagaaaccagtacacttttagattagacagtatcttcttttaatattttgatttgttttcctttagtttgaaaagttgtataatacttaactgactgtagcaaagttttatatgtggtagcatacctttaatttatcctattacaaaactgttctgaattttcttttggtttttaaaaaacaaaacttgttgcttagaagccatgaattattttattttacttcaactgtcgaaacttccttgttttaaaaaatgatcatttgggttcactcaggaaatgcatgtcaggaaacttgtattataagtttattagttgtgatgtatcagtaactgctgttacccctttttcaaagaaatgtaattgattttgaagttttctagattgtcacatgctttgtgactaatgcaagaaagcaagtcctgtgttgtatttgttctagtcatttttattcaggctatatattgtagcttaatttttatttgcaattaatttatttaaactaagtaaatacttttcaaaatacataattgaattcgtctctgtgagttcatttttgcataatcgagaatgagaaaccagaagtgaaaactgtgaacaactctattccacactccaaaaatactcatttgaaatagatgaagagtttgcatttaatgtaacactttaaagtatctggttcttttttaaaagcatctcttactaataaaggaactttgttagtggttgaata

SEQ ID NO: 376202 - DNA, 2927 bp, Homo sapiens
ccccggctagacccctcccctccttgcgagtgtatgtcagtgacccagaggcggtgtgaggcggagggaccgtcggggggcgccgccgccgcctccactagcagcagcggcagcagccctagtcccgcggtgcggtcgaattggtccccagccctccgggagcgcaccacaaagcagccccaacgcctctccctgcgtccgcggctcctcagcgctcggctccgtggtcaacttcccctcgctgggctcggctggcgggcgcggagggcagcggcggaacggcgggctgtctgctcgcgctccccgcgcacaacacttcaccctctcgcctcgggtctcgggggccgctctgggatcccggccaccagcaattgtccggaaataatgcaaaaggtgtcccaaggctcctgaccagtgaacaaagatttgagaaagacagccaagctcatgttttctcctgatcaagaaaatcatccatctaaagcaccagtaaaatatggtgaactcattgtcttagggtataatgggtctctcccaaatggcgatagaggaaggaggaaaagtaggtttgctttgtttaaaagacctaaggcaaatggggtgaagcccagcactgtgcatattgcttgtactcctcaggctgcaaaggtaaaaaaaaaaaaaaaaaagctacataaattaacttggagaatttgaaagacttttatgtgttgtttgtattctctagcattccccttacatttctatttcagaaattgccttttgtttggattggagaagagactttggagacatggtatttgaagagctgccatatggaaggggaattggacttttaaaaaaaaaatgacaaaccaggatcagtgggtggaaattagaaggaaacactctgtttccttattaaaagaggtgggatgggggacagggctttatctagtacttagaattatgcagctgtctgccctgagaagtgggaagttcccactctgttactagaggggtctccctggactggatgaagaatgtgatgtataatatgtgtattcaggtattagaagcacatttggatgaggtaatttttaaactaagggtctttacttaagattctttgtattggttgtattcatttttggtttataacttcatatatttgagcatagtaccttgcacaaagtagacctcaataattattaagttgaatcaaagctatgaaggcaatatccaactgcatctacaatataacttctcaaccccctagcctatttcatgcttctagcccccttgtattcttctaacaaaatttccagaagctggaccaccatttcaggatacttgggcttttcctagagtgacagacaaggagggggaatttcacatctttatattttctgtgaattcatctgcctccaattttataacactgactttgtgttacaaagaatttaatattgtaatgagcaaataagaaaaattagaaagagttctttgactcctggaagtacctgtatctttagctaagtagccctaggatgtacattaatattataccatctgaagcatatctttgtaaattaaataaacaagagacagaaaaattggcatatgatgtggttttaggttgcagcttcagtgtctgaaggtaattggcttttcagctttgttttatatccagtttgatttgtgaaagaatccttaggccttgactaggactcctctgttactatttgggagccagttggtgcagaaaagggacagtttctttttgctcctttggcgagaaggaatatactaagcaggtggtggaagtaaacctcagattgattgaatctgaggagcttcttacagtagctccccccggagtgctcttgacattttgggtatgccactttttcattgttcagtactttcccacatactacaggacatttataggtccttcacccacaaaatgccatttgagcctgcaaatcctcgtaacagccaaaaaatgcacagcatattttcagatgccccttagactgctaatactacctctggttgaaaaccactatcagggaaaatatttctaatccctgcctctgtaataccatattctgtacttttcttcctattttactctgccatgccctcatgttttcattgttatctctttttcatctttcatctttactaggcaataagaatcttagggatcacagattgactcttggctgggtgcggtagctcacacctataatcccagcacttgagaggccaaggtgggcggatcacttgagctcgggagttcgagaccagcctgggcaacatggtgaaactccatctccaccaaaaatacaaaaaattagccaagcgtggtggcatgccccgaagtcccagctacttggcaggctgaagtgggaggatcacttgagcccgggaggcagaggctgcagtgagctgagatcatgccactgtactgcagcctgagtgacagagtgagaccctgtctcagttaaaaaaaaaaaaaaaaaaagattgactcctcctctttaaattttggaggaatgtatttgtgaggtcatgatgaaaattaagcatttagtctggcagtcatctgggatgagtagttaaaaccctgcgttctaggccagtgagactcaaacgtaacttgacatagtttttattctcagtcttagagtaggtttaataactaacaaacaaagattacaatttcaaagcacataaaaaccaatgttttaaaatctctttagccactaagaattaattttcaaaatactgagtaattgtttcattgaaaagtgagctgtttaacggggcacagtggcacatgcctgttagtcccagctccttgggaggcagaggttacagtgagccgagatagcaccactgcactgcaacctaggcgacagagcgagactctgtctcca

SEQ ID NO: 376203 - DNA, 2086 bp, Homo sapiens
tgcccacgatgcaccgcgccagccccgaccgacggacgagactgacccggacttaggcgttccgcctggcccggcggcgaggaaaaaaggcagttttgaagcatttagtggcaaaaggggtaggagacggctgctgaagtgtctactacattcaggggacctggaaggcttccagatatccgcaatgaacaatgaaaagaaattgtgaaagaaggcgcttccctcaagccggaactaatgaactcctgggtcacgtggtgcgcacgcgccaaaggcacacgataaaggaaaacgcgggcttatcgtggcctttaaaatccggcttggtgagcttgggtcgcctctgaaggagaaccattttccatctctttcatagttttttcccccagtcagcgtggtagcggtattctccgcggcagtgacagtaattgtttttgcctctttagccaagacttccgccctcgatcaagatggtggttggacggccttcctaacctttacggggcctggcggtgctgacgcctgagctggtaggggtggagcaggtaggaaacagcaaatgcagaagctgctgcgcgggagtcggccatggactggaaagaagttcttcgtcggcgcctagcgacgcccaacacctgtccaaacaaaaaaaaaagtgaacaagaattaaaagatgaagaaatggatttatttacaaaatattactccgaatggaaaggaggtagaaaaaacacaaatgaattctataagaccattccccggttttattataggctgcctgctgaagatgaagtcttactacagaaattaagagaggaatcaagagctgtctttctacaaagaaaaagcagagaactgttagataatgaagaattacagaacttatggtttttgctggacaaacaccagacaccacctatgattgggagaggaagcgatgatcaattacgaaaactttttgaaggttggtgaaaaggctggagcaaagtgcaagcaatttttcacagcaaaagtctttgctaaactccttcatacagattcatatggaagaatttccatcatgcagttctttaattatgtcatgagaaaagtttggcttcatcaaacaagaataggactcagtttatatgatgtcgctgggcaggggtaccttcgggaatctgatttagaaaactacatattggaacttatccctacgttgccacaattagatggtctggaaaaatctttctactccttttatgtttgtacagcagttaggaagttcttcttctttttagatcctttaagaacaggaaagataaaaattcaagatattttagcatgcagcttcctagatgatttattggagctaagggatgaggaactgtccaaggagagtcaagaaacaaattggttttctgctccttctgccctaagagtttatggccagtacttgaatcttgataaagatcacaatggcatgctcagtaaagaagaactctcacgctatggaacagctaccatgaccaatgtcttcttagaccgtgttttccaggagtgtctcacttatgatggagaaatggactataagacctacttggactttgtccttgcattagaaaacagaaaggaacctgcagctctacaatatattttcaaactgcttgatattgagaacaaaggatacctgaatgtcttttcacttaattatttctttagggccatacaggaactaatgaaaatccatggacaagatcctgtttcatttcaagatgtcaaggatgaaatctttgacatggtaaaaccaaaggatcctttgaaaatctctcttcaggatttaatcaacagtaatcaaggagacacagtaaccaccattctaatcgatttgaatggcttctggacttacgagaacagagaggctcttgttgcaaatgacagtgaaaactctgcagaccttgatgatacatgatctctgaaagactagactgtcttatattatgagatacttgaatgctgcatgtaaagcctttaaagcaaaatcctcagaaatggtctaaataaaacacttgatatgcctagagaacacaaaaaatgttttggttac

SEQ ID NO: 376204 - DNA, 926 bp, Homo sapiens
  misc_feature (553)..(553): n is a, c, g, or t
  misc_feature (911)..(911): n is a, c, g, or t
gacgtgaacgtgtagatagtagttaatatgatttgccgaaacagataaaaaaaagtttcaggactataagacctacttggactttgtccttgcattagaaaacagaaaggaacctgcagctctacaatatattttcaaactgcttgatattgagaacaaaggatacctgaatgtcttttcacttaattatttctttagggccatacaggaactaatgaaaatccatggacaagatcctgtttcatttcaagatgtcaaggatgaaatctttgacatggtaaaaccaaaggatcctttgaaaatctctcttcaggatttaatcaacagtaatcaaggagacacagtaaccaccattctaatcgatttgaatggcttctggacttacgagaacagagaggctcttgttgcaaatgacagtgaaaactctgcagaccttgatgatacatgatctctgaaagactagactgtcttatattatgagatacttgaatgctgcatgtaaagcctttaaagcaaaatcctcagaaatggtctaaataaaacacttgcctcnttggcctaaaggtggagctctgcggccactacctttatcgagggtaaccacgatcctcattcatgactccttgcctacgtcgctcgttccgaccagcgcccattcccctttaatgacgaataccgctctccccacagccagggattcctcaggaataacctgtatgcaatggcctcctgtagcgcgaaacctgacaaagcccgttactagattaccaatacctcccccaccctgaccattccaccactcttttacatccacgtagtcatccccccgcttcgcattccactttttccccgataattacagatcatctttcgacccgcttggcactcatactatcaattctcttcgacgntaatctctaatcacg

SEQ ID NO: 376205 - DNA, 2421 bp, Homo sapiens
tgcccacgatgcaccgcgccagccccgaccgacggacgagactgacccggacttaggcgttccgcctggcccggcggcgaggaaaaaaggcagttttgaagcatttagtggcaaaaggggtaggagacggctgctgaagtgtctactacattcaggggacctggaaggcttccagatatccgcaatgaacaatgaaaagaaattgtgaaagaaggcgcttccctcaagccggaactaatgaactcctgggtcacgtggtgcgcacgcgccaaaggcacacgataaaggaaaacgcgggcttatcgtggcctttaaaatccggcttggtgagcttgggtcgcctctgaaggagaaccattttccatctctttcatagttttttcccccagtcagcgtggtagcggtattctccgcggcagtgacagtaattgtttttgcctctttagccaagacttccgccctcgatcaagatggtggttggacggccttcctaacctttacggggcctggcggtgctgacgcctgagctggtaggggtggagcaggtaggaaacagcaaatgcagaagctgctgcgcgggagtcggccatggactggaaagaagttcttcgtcggcgcctagcgacgcccaacacctgtccaaacaaaaaaaaaagtgaacaagaattaaaagatgaagaaatggatttatttacaaaatattactccgaatggaaaggaggtagaaaaaacacaaatgaattctataagaccattccccggttttattataggctgcctgctgaagatgaagtcttactacagaaattaagagaggaatcaagagctgtctttctacaaagaaaaagcagagaactgttagataatgaagaattacagaacttatggtttttgctggacaaacaccagacaccacctatgattgggagaggaagcgatgatcaattacgaaaactttttgaaggttggtgaaaaggctggagcaaagtgcaagcaatttttcacagcaaaagtctttgctaaactccttcatacagattcatatggaagaatttccatcatgcagttctttaattatgtcatgagaaaagtttggcttcatcaaacaagaataggactcagtttatatgatgtcgctgggcaggggtaccttcgggaatctgatttagaaaactacatattggaacttatccctacgttgccacaattagatggtctggaaaaatctttctactccttttatgtttgtacagcagttaggaagttcttcttctttttagatcctttaagaacaggaaagataaaaattcaagatattttagcatgcagcttcctagatgatttattggagctaagggatgaggaactgtccaaggagagtcaagaaacaaattggttttctgctccttctgccctaagagtttatggccagtacttgaatcttgataaagatcacaatggcatgctcagtaaagaagaactctcacgctatggaacagctaccatgaccaatgtcttcttagaccgtgttttccaggagtgtctcacttatgatggagaaatggactataagacctacttggactttgtccttgcattagaaaacagaaaggaacctgcagctctacaatatattttcaaactgcttgatattgagaacaaaggatacctgaatgtcttttcacttaattatttctttagggccatacaggaactaatgaaaatccatggacaagatcctgtttcatttcaagatgtcaaggatgaaatctttgacatggtaaaaccaaaggatcctttgaaaatctctcttcaggatttaatcaacagtaatcaaggagacacagtaaccaccattctaatcgatttgaatggcttctggacttacgagaacagagaggctcttgttgcaaatgacagtgaaaactctgcagaccttgatgatacatgatctctgaaagactagactgtcttatattatgagatacttgaatgctgcatgtaaagcctttaaagcaaaatcctcagaaatggtctaaataaaacacttggcctcgttggccaacagggggactttcagccgttacctttaagagggtaattatgatctcgttactgactctgcgtgcgacgacaattggcgagggtatattttctcaaggcgtttactgcttccccgatcaggtgttcgccgagataacatgtactaacagcctttaagccataccttaaacgcgtcgggtgggctttttagagacccgaccccagacttaaagatcacctaattacacgatgtttccgccggcctaagaaccagagagacagcgttcccacgtcagactaatgttcctcgttcacgtgtattatagtcgccgatgcaatcgtgacttattcggatgcgacgattcctatgtgcacatg

SEQ ID NO: 376206 - DNA, 2429 bp, Homo sapiens
  misc_feature (2056)..(2056): n is a, c, g, or t
  misc_feature (2414)..(2414): n is a, c, g, or t
tgcccacgatgcaccgcgccagccccgaccgacggacgagactgacccggacttaggcgttccgcctggcccggcggcgaggaaaaaaggcagttttgaagcatttagtggcaaaaggggtaggagacggctgctgaagtgtctactacattcaggggacctggaaggcttccagatatccgcaatgaacaatgaaaagaaattgtgaaagaaggcgcttccctcaagccggaactaatgaactcctgggtcacgtggtgcgcacgcgccaaaggcacacgataaaggaaaacgcgggcttatcgtggcctttaaaatccggcttggtgagcttgggtcgcctctgaaggagaaccattttccatctctttcatagttttttcccccagtcagcgtggtagcggtattctccgcggcagtgacagtaattgtttttgcctctttagccaagacttccgccctcgatcaagatggtggttggacggccttcctaacctttacggggcctggcggtgctgacgcctgagctggtaggggtggagcaggtaggaaacagcaaatgcagaagctgctgcgcgggagtcggccatggactggaaagaagttcttcgtcggcgcctagcgacgcccaacacctgtccaaacaaaaaaaaaagtgaacaagaattaaaagatgaagaaatggatttatttacaaaatattactccgaatggaaaggaggtagaaaaaacacaaatgaattctataagaccattccccggttttattataggctgcctgctgaagatgaagtcttactacagaaattaagagaggaatcaagagctgtctttctacaaagaaaaagcagagaactgttagataatgaagaattacagaacttatggtttttgctggacaaacaccagacaccacctatgattgggagaggaagcgatgatcaattacgaaaactttttgaaggttggtgaaaaggctggagcaaagtgcaagcaatttttcacagcaaaagtctttgctaaactccttcatacagattcatatggaagaatttccatcatgcagttctttaattatgtcatgagaaaagtttggcttcatcaaacaagaataggactcagtttatatgatgtcgctgggcaggggtaccttcgggaatctgatttagaaaactacatattggaacttatccctacgttgccacaattagatggtctggaaaaatctttctactccttttatgtttgtacagcagttaggaagttcttcttctttttagatcctttaagaacaggaaagataaaaattcaagatattttagcatgcagcttcctagatgatttattggagctaagggatgaggaactgtccaaggagagtcaagaaacaaattggttttctgctccttctgccctaagagtttatggccagtacttgaatcttgataaagatcacaatggcatgctcagtaaagaagaactctcacgctatggaacagctaccatgaccaatgtcttcttagaccgtgttttccaggagtgtctcacttatgatggagaaatggactataagacctacttggactttgtccttgcattagaaaacagaaaggaacctgcagctctacaatatattttcaaactgcttgatattgagaacaaaggatacctgaatgtcttttcacttaattatttctttagggccatacaggaactaatgaaaatccatggacaagatcctgtttcatttcaagatgtcaaggatgaaatctttgacatggtaaaaccaaaggatcctttgaaaatctctcttcaggatttaatcaacagtaatcaaggagacacagtaaccaccattctaatcgatttgaatggcttctggacttacgagaacagagaggctcttgttgcaaatgacagtgaaaactctgcagaccttgatgatacatgatctctgaaagactagactgtcttatattatgagatacttgaatgctgcatgtaaagcctttaaagcaaaatcctcagaaatggtctaaataaaacacttgcctcnttggcctaaaggtggagctctgcggccactacctttatcgagggtaaccacgatcctcattcatgactccttgcctacgtcgctcgttccgaccagcgcccattcccctttaatgacgaataccgctctccccacagccagggattcctcaggaataacctgtatgcaatggcctcctgtagcgcgaaacctgacaaagcccgttactagattaccaatacctcccccaccctgaccattccaccactcttttacatccacgtagtcatccccccgcttcgcattccactttttccccgataattacagatcatctttcgacccgcttggcactcatactatcaattctcttcgacgntaatctctaatcacg

SEQ ID NO: 376207 - DNA, 1838 bp, Homo sapiens
tgcccacgatgcaccgcgccagccccgaccgacggacgagactgacccggacttaggcgttccgcctggcccggcggcgaggaaaaaaggcagttttgaagcatttagtggcaaaaggggtaggagacggctgctgaagtgtctactacattcaggggacctggaaggcttccagatatccgcaatgaacaatgaaaagaaattgtgaaagaaggcgcttccctcaagccggaactaatgaactcctgggtcacgtggtgcgcacgcgccaaaggcacacgataaaggaaaacgcgggcttatcgtggcctttaaaatccggcttgccaagacttccgccctcgatcaagatggtggttggacggccttcctaacctttacggggcctggcggtgctgacgcctgagctggtaggggtggagcaggtaggaaacagcaaatgcagaagctgctgcgcgggagtcggccatggactggaaagaagttcttcgtcggcgcctagcgacgcccaacacctgtccaaacactgcctgctgaagatgaagtcttactacagaaattaagagaggaatcaagagctgtctttctacaaagaaaaagcagagaactgttagataatgaagaattacagaacttatggtttttgctggacaaacaccagacaccacctatgattgggagaggaagcgatgatcaattacgaaaactttttgaaggttggtgaaaaggctggagcaaagtgcaagcaatttttcacagcaaaagtctttgctaaactccttcatacagattcatatggaagaatttccatcatgcagttctttaattatgtcatgagaaaagtttggcttcatcaaacaagaataggactcagtttatatgatgtcgctgggcaggggtaccttcgggaatctgatttagaaaactacatattggaacttatccctacgttgccacaattagatggtctggaaaaatctttctactccttttatgtttgtacagcagttaggaagttcttcttctttttagatcctttaagaacaggaaagataaaaattcaagatattttagcatgcagcttcctagatgatttattggagctaagggatgaggaactgtccaaggagagtcaagaaacaaattggttttctgctccttctgccctaagagtttatggccagtacttgaatcttgataaagatcacaatggcatgctcagtaaagaagaactctcacgctatggaacagctaccatgaccaatgtcttcttagaccgtgttttccaggagtgtctcacttatgatggagaaatggactataagacctacttggactttgtccttgcattagaaaacagaaaggaacctgcagctctacaatatattttcaaactgcttgatattgagaacaaaggatacctgaatgtcttttcacttaattatttctttagggccatacaggaactaatgaaaatccatggacaagatcctgtttcatttcaagatgtcaaggatgaaatctttgacatggtaaaaccaaaggatcctttgaaaatctctcttcaggatttaatcaacagtaatcaaggagacacagtaaccaccattctaatcgatttgaatggcttctggacttacgagaacagagaggctcttgttgcaaatgacagtgaaaactctgcagaccttgatgatacatgatctctgaaagactagactgtcttatattatgagatacttgaatgctgcatgtaaagcctttaaagcaaaatcctcagaaatggtctaaataaaacacttgatatgcctagagaacacaaaaaatgttttggttac

SEQ ID NO: 376208 - DNA, 2107 bp, Homo sapiens
tgcccacgatgcaccgcgccagccccgaccgacggacgagactgacccggacttaggcgttccgcctggcccggcggcgaggaaaaaaggcagttttgaagcatttagtggcaaaaggggtaggagacggctgctgaagtgtctactacattcaggggacctggaaggcttccagatatccgcaatgaacaatgaaaagaaattgtgaaagaaggcgcttccctcaagccggaactaatgaactcctgggtcacgtggtgcgcacgcgccaaaggcacacgataaaggaaaacgcgggcttatcgtggcctttaaaatccggcttggtgagcttgggtcgcctctgaaggagaaccattttccatctctttcatagttttttcccccagtcagcgtggtagcggtattctccgcggcagtgacagtaattgtttttgcctctttagccaagacttccgccctcgatcaagatggtggttggacggccttcctaacctttacggggcctggcggtgctgacgcctgagctggtaggggtggagcaggtaggaaacagcaaatgcagaagctgctgcgcgggagtcggccatggactggaaagaagttcttcgtcggcgcctagcgacgcccaacacctgtccaaacaaaaaaaaaagtgaacaagaattaaaagatgaagaaatggatttatttacaaaatattactccgaatggaaaggaggtagaaaaaacacaaatgaattctataagaccattccccggttttattataggctgcctgctgaagatgaagtcttactacagaaattaagagaggaatcaagagctgtctttctacaaagaaaaagcagagaactgttagataatgaagaattacagaacttatggtttttgctggacaaacaccagacaccacctatgattgggagaggaagcgatgatcaattacgaaaactttttgaaggttggtgaaaaggctggagcaaagtgcaagcaatttttcacagcaaaagtctttgctaaactccttcatacagattcatatggaagaatttccatcatgcagttctttaattatgtcatgagaaaagtttggcttcatcaaacaagaataggactcagtttatatgatgtcgctgggcaggggtaccttcgggaatctgatttagaaaactacatattggaacttatccctacgttgccacaattagatggtctggaaaaatctttctactccttttatgtttgtacagcagttaggaagttcttcttctttttagatcctttaagaacaggaaagataaaaattcaagatattttagcatgcagcttcctagatgatttattggagctaagggatgaggaactgtccaaggagagtcaagaaacaaattggttttctgctccttctgccctaagagtttatggccagtacttgaatcttgataaagatcacaatggcatgctcagtaaagaagaactctcacgctatggaacagctaccatgaccaatgtcttcttagaccgtgttttccaggagtgtctcacttatgatggagaaatggactataagacctacttggactttgtccttgcattagaaaacagaaaggaacctgcagctctacaatatattttcaaactgcttgatattgagaacaaaggatacctgaatgtcttttcacttaattatttctttaggatttatttctattaaatacaggccatacaggaactaatgaaaatccatggacaagatcctgtttcatttcaagatgtcaaggatgaaatctttgacatggtaaaaccaaaggatcctttgaaaatctctcttcaggatttaatcaacagtaatcaaggagacacagtaaccaccattctaatcgatttgaatggcttctggacttacgagaacagagaggctcttgttgcaaatgacagtgaaaactctgcagaccttgatgatacatgatctctgaaagactagactgtcttatattatgagatacttgaatgctgcatgtaaagcctttaaagcaaaatcctcagaaatggtctaaataaaacacttgatatgcctagagaacacaaaaaatgttttggttac

SEQ ID NO: 376209 - DNA, 1675 bp, Homo sapiens
tgcccacgatgcaccgcgccagccccgaccgacggacgagactgacccggacttaggcgttccgcctggcccggcggcgaggaaaaaaggcagttttgaagcatttagtggcaaaaggggtaggagacggctgctgaagtgtctactacattcaggggacctggaaggcttccagatatccgcaatgaacaatgaaaagaaattgtgaaagaaggcgcttccctcaagccggaactaatgaactcctgggtcacgtggtgcgcacgcgccaaaggcacacgataaaggaaaacgcgggcttatcgtggcctttaaaatccggcttggtgagcttgggtcgcctctgaaggagaaccattttccatctctttcatagttttttcccccagtcagcgtggtagcggtattctccgcggcagtgacagtaattgtttttgcctctttagccaagacttccgccctcgatcaagatggtggttggacggccttcctaacctttacggggcctggcggtgctgacgcctgagctggtaggggtggagcaggtaggaaacagcaaatgcagaagctgctgcgcgggagtcggccatggactggaaagaagttcttcgtcggcgcctagcgacgcccaacacctgtccaaacactgcctgctgaagatgaagtcttactacagaaattaagagaggaatcaagagctgtctttctacaaagaaaaagcagagaactgttagataatgaagaattacaggatttagaaaactacatattggaacttatccctacgttgccacaattagatggtctggaaaaatctttctactccttttatgtttgtacagcagttaggaagttcttcttctttttagatcctttaagaacaggaaagataaaaattcaagatattttagcatgcagcttcctagatgatttattggagctaagggatgaggaactgtccaaggagagtcaagaaacaaattggttttctgctccttctgccctaagagtttatggccagtacttgaatcttgataaagatcacaatggcatgctcagtaaagaagaactctcacgctatggaacagctaccatgaccaatgtcttcttagaccgtgttttccaggagtgtctcacttatgatggagaaatggactataagacctacttggactttgtccttgcattagaaaacagaaaggaacctgcagctctacaatatattttcaaactgcttgatattgagaacaaaggatacctgaatgtcttttcacttaattatttctttagggccatacaggaactaatgaaaatccatggacaagatcctgtttcatttcaagatgtcaaggatgaaatctttgacatggtaaaaccaaaggatcctttgaaaatctctcttcaggatttaatcaacagtaatcaaggagacacagtaaccaccattctaatcgatttgaatggcttctggacttacgagaacagagaggctcttgttgcaaatgacagtgaaaactctgcagaccttgatgatacatgatctctgaaagactagactgtcttatattatgagatacttgaatgctgcatgtaaagcctttaaagcaaaatcctcagaaatggtctaaataaaacacttgatatgcctagagaacacaaaaaatgttttggttac

SEQ ID NO: 376210 - DNA, 1858 bp, Homo sapiens
tgcccacgatgcaccgcgccagccccgaccgacggacgagactgacccggacttaggcgttccgcctggcccggcggcgaggaaaaaaggcagttttgaagcatttagtggcaaaaggggtaggagacggctgctgaagtgtctactacattcaggggacctggaaggcttccagatatccgcaatgaacaatgaaaagaaattgtgaaagaaggcgcttccctcaagccggaactaatgaactcctgggtcacgtggtgcgcacgcgccaaaggcacacgataaaggaaaacgcgggcttatcgtggcctttaaaatccggcttggtgagcttgggtcgcctctgaaggagaaccattttccatctctttcatagttttttcccccagtcagcgtggtagcggtattctccgcggcagtgacagtaattgtttttgcctctttagccaagacttccgccctcgatcaagatggtggttggacggccttcctaacctttacggggcctggcggtgctgacgcctgagctggtaggggtggagcaggtaggaaacagcaaatgcagaagctgctgcgcgggagtcggccatggactggaaagaagttcttcgtcggcgcctagcgacgcccaacacctgtccaaacactgcctgctgaagatgaagtcttactacagaaattaagagaggaatcaagagctgtctttctacaaagaaaaagcagagaactgttagataatgaagaattacagaacttatggtttttgctggacaaacaccagacaccacctatgattgggagaggaagcgatgatcaattacgaaaactttttgaaggcaatttttcacagcaaaagtctttgctaaactccttcatacagattcatatggaagaatttccatcatgcagttctttaattatgtcatgagaaaaggatttagaaaactacatattggaacttatccctacgttgccacaattagatggtctggaaaaatctttctactccttttatgtttgtacagcagttaggaagttcttcttctttttagatcctttaagaacaggaaagataaaaattcaagatattttagcatgcagcttcctagatgatttattggagctaagggatgaggaactgtccaaggagagtcaagaaacaaattggttttctgctccttctgccctaagagtttatggccagtacttgaatcttgataaagatcacaatggcatgctcagtaaagaagaactctcacgctatggaacagctaccatgaccaatgtcttcttagaccgtgttttccaggagtgtctcacttatgatggagaaatggactataagacctacttggactttgtccttgcattagaaaacagaaaggaacctgcagctctacaatatattttcaaactgcttgatattgagaacaaaggatacctgaatgtcttttcacttaattatttctttagggccatacaggaactaatgaaaatccatggacaagatcctgtttcatttcaagatgtcaaggatgaaatctttgacatggtaaaaccaaaggatcctttgaaaatctctcttcaggatttaatcaacagtaatcaaggagacacagtaaccaccattctaatcgatttgaatggcttctggacttacgagaacagagaggctcttgttgcaaatgacagtgaaaactctgcagaccttgatgatacatgatctctgaaagactagactgtcttatattatgagatacttgaatgctgcatgtaaagcctttaaagcaaaatcctcagaaatggtctaaataaaacacttgatatgcctagagaacacaaaaaatgttttggttac

SEQ ID NO: 376211 - DNA, 1269 bp, Homo sapiens
tatatgtattggttcatatttgcatctgttacctttgggaagctgcatcagaagttgataatacaagttacttaacctttggggagaagaaataggtgagaggctttttaatcaatatctttgttccctttgaatttggaactatgtagaatttactacttttcaaaaatgctaaaacttaaattagaaacaaaatttaatgtaaaatagttttaccactaaaatagtcatgcatttatttctttatcaatatagtattaatgctgaataatttttagtaatgaaattctaatatctaatgaatcaagactggacatttaacactttattttgttttattttcaggatttagaaaactacatattggaacttatccctacgttgccacaattagatggtctggaaaaatctttctactccttttatgtttgtacagcagttaggaagttcttcttctttttagatcctttaagaacaggaaagataaaaattcaagatattttagcatgcagcttcctagatgatttattggagctaagggatgaggaactgtccaaggagagtcaagaaacaaattggttttctgctccttctgccctaagagtttatggccagtacttgaatcttgataaagatcacaatggcatgctcagtaaagaagaactctcacgctatggaacagctaccatgaccaatgtcttcttagaccgtgttttccaggagtgtctcacttatgatggagaaatggactataagacctacttggactttgtccttgcattagaaaacagaaaggaacctgcagctctacaatatattttcaaactgcttgatattgagaacaaaggatacctgaatgtcttttcacttaattatttctttagggccatacaggaactaatgaaaatccatggacaagatcctgtttcatttcaagatgtcaaggatgaaatctttgacatggtaaaaccaaaggatcctttgaaaatctctcttcaggatttaatcaacagtaatcaaggagacacagtaaccaccattctaatcgatttgaatggcttctggacttacgagaacagagaggctcttgttgcaaatgacagtgaaaactctgcagaccttgatgatacatgatctctgaaagactagactgtcttatattatgagatacttgaatgctgcatgtaaagcctttaaagcaaaatcctcagaaatggtctaaataaaacacttgatatgcctagagaacacaaaaaatgttttggttac

SEQ ID NO: 376212 - DNA, 1406 bp, Homo sapiens
tgcccacgatgcaccgcgccagccccgaccgacggacgagactgacccggacttaggcgttccgcctggcccggcggcgaggaaaaaaggcagttttgaagcatttagtggcaaaaggggtaggagacggctgctgaagtgtctactacattcaggggacctggaaggcttccagatatccgcaatgaacaatgaaaagaaattgtgaaagaaggcgcttccctcaagccggaactaatgaactcctgggtcacgtggtgcgcacgcgccaaaggcacacgataaaggaaaacgcgggcttatcgtggcctttaaaatccggcttggtgagcttgggtcgcctctgaaggagaaccattttccatctctttcatagttttttcccccagtcagcgtggtagcggtattctccgcggcagtgacagtaattgtttttgcctctttagccaagacttccgccctcgatcaagatggtggttggacggccttcctaacctttacggggcctggcggtgctgacgcctgagctggtaggggtggagcaggtaggaaacagcaaatgcagaagctgctgcgcgggagtcggccatggactggaaagaagttcttcgtcggcgcctagcgacgcccaacacctgtccaaacaaaaaaaaaagtgaacaagaattaaaagatgaagaaatggatttatttacaaaatattactccgaatggaaaggaggtagaaaaaacacaaatgaattctataagaccattccccggttttattataggctgcctgctgaagatgaagtcttactacagaaattaagagaggaatcaagagctgtctttctacaaagaaaaagcagagaactgttagataatgaagaattacagaacttatggtttttgctggacaaacaccagacaccacctatgattgggagaggaagcgatgatcaattacgaaaactttttgaaggttggtgaaaaggctggagcaaagtgcaagcaatttttcacagcaaaagtctttgctaaactccttcatacagattcatatggaagaatttccatcatgcagttctttaattatgtcatgagaaaagtttggcttcatcaaacaagaataggactcagtttatatgatgtcgctgggcaggggtaccttcgggaatctgatttagaaaactacatattggaacttatccctacgttgccacaattagatggtctggaaaaatctttctactccttttatgtttgtacagcagttaggaagttcttcttctttttagatcctttaagaacaggtaaaagaaaatcttatctaacttagatattatgaggatattattatatctaaatctcaataactagagaaaactcttgaaaaatatcatttattttcctgtcactgccat

SEQ ID NO: 376213 - DNA, 1330 bp, Homo sapiens
tgcccacgatgcaccgcgccagccccgaccgacggacgagactgacccggacttaggcgttccgcctggcccggcggcgaggaaaaaaggcagttttgaagcatttagtggcaaaaggggtaggagacggctgctgaagtgtctactacattcaggggacctggaaggcttccagatatccgcaatgaacaatgaaaagaaattgtgaaagaaggcgcttccctcaagccggaactaatgaactcctgggtcacgtggtgcgcacgcgccaaaggcacacgataaaggaaaacgcgggcttatcgtggcctttaaaatccggcttggtgagcttgggtcgcctctgaaggagaaccattttccatctctttcatagttttttcccccagtcagcgtggtagcggtattctccgcggcagtgacagtaattgtttttgcctctttagccaagacttccgccctcgatcaagatggtggttggacggccttcctaacctttacggggcctggcggtgctgacgcctgagctggtaggggtggagcaggtaggaaacagcaaatgcagaagctgctgcgcgggagtcggccatggactggaaagaagttcttcgtcggcgcctagcgacgcccaacacctgtccaaacaaaaaaaaaagtgaacaagaattaaaagatgaagaaatggatttatttacaaaatattactccgaatggaaaggaggtagaaaaaacacaaatgaattctataagaccattccccggttttattataggctgcctgctgaagatgaagtcttactacagaaattaagagaggaatcaagagctgtctttctacaaagaaaaagcagagaactgttagataatgaagaattacaggtaagaacaaagcaaaaagttgctttagatgttaaccatttctcatttgtgctacttaaatcatgcaggatttcttggtgcctaatggagtccgtactacagagtggtactacataggctctgaagcagcagttcccaccagaagcagccgctgagtttgcatgggtcatgtaccccaaacatagtgttgtttgttatttttgtttaaggccctaggtgattctaatgtgcagccaaggttgagaaccactgctgtagggtcagactacagaggttcaaatcccagccctgctatatgactttaggcaatggacttaacatctctgtgcttcgattatcatctctaaagtagggatagctaactatatcatagagatgtggattaaagaggcagtgtatatcaaaagcttagtaggcactcaataaatgttatttttattgttagtaatca

SEQ ID NO: 376214 - DNA, 515 bp, Homo sapiens
agagaaaaggaaactgcctgttaaatggaaaagaaaaaaagtagaacaaaaaattaacataagcccaagtggcagccctcaattttattcctctgtacttcagtggatgcaaacagccctgaattttggatcactatgtgtgatagaaattaagtggatcaaatttcattgtatttttttttctcttgcaggatgaaatctttgacatggtaaaaccaaaggatcctttgaaaatctctcttcaggatttaatcaacagtaatcaaggagacacagtaaccaccattctaatcgatttgaatggcttctggacttacgagaacagagaggctcttgttgcaaatgacagtgaaaactctgcagaccttgatgatacatgatctctgaaagactagactgtcttatattatgagatacttgaatgctgcatgtaaagcctttaaagcaaaatcctcagaaatggtctaaataaaacacttgatatgcctagagaacacaaaaaatgttttggttac

SEQ ID NO: 376215 - DNA, 210 bp, Homo sapiens
gtgaacaagaattaaaagatgaagaaatggatttatttacaaaatattactccgaatggaaaggaggtagaaaaaacacaaatgaattctataagaccattccccggttttattatagggtaagtagtgtctaatcaaatgtcctgcagagtttaaaaatgaaatataatttttggcaaggcagggtggctcatacctgtaatcccaaca

SEQ ID NO: 376216 - DNA, 325 bp, Homo sapiens
taagtgaaacagcccagagactatggccttcatgatgggtttttttggctgtttctagcccaagggtttttctgatcaagattgcaaaggtagctgatagtattacacataggccactaccctaatcataacatgaatagtttgaaaatcaaaatattaaccaagaaaaaactttttgttagtctattcttctgattaaaattttattgtggtcataagtgtctttattatttttcttcccaaggccagtacttgaatcttgataaagatcacaatggcatgctcagtaaagaagaactctcacgctatggaacagctaccatga

SEQ ID NO: 376217 - DNA, 1966 bp, Homo sapiens
tgcccacgatgcaccgcgccagccccgaccgacggacgagactgacccggacttaggcgttccgcctggcccggcggcgaggaaaaaaggcagttttgaagcatttagtggcaaaaggggtaggagacggctgctgaagtgtctactacattcaggggacctggaaggcttccagatatccgcaatgaacaatgaaaagaaattgtgaaagaaggcgcttccctcaagccggaactaatgaactcctgggtcacgtggtgcgcacgcgccaaaggcacacgataaaggaaaacgcgggcttatcgtggcctttaaaatccggcttgccaagacttccgccctcgatcaagatggtggttggacggccttcctaacctttacggggcctggcggtgctgacgcctgagctggtaggggtggagcaggtaggaaacagcaaatgcagaagctgctgcgcgggagtcggccatggactggaaagaagttcttcgtcggcgcctagcgacgcccaacacctgtccaaacaaaaaaaaaagtgaacaagaattaaaagatgaagaaatggatttatttacaaaatattactccgaatggaaaggaggtagaaaaaacacaaatgaattctataagaccattccccggttttattataggctgcctgctgaagatgaagtcttactacagaaattaagagaggaatcaagagctgtctttctacaaagaaaaagcagagaactgttagataatgaagaattacagaacttatggtttttgctggacaaacaccagacaccacctatgattgggagaggaagcgatgatcaattacgaaaactttttgaaggttggtgaaaaggctggagcaaagtgcaagcaatttttcacagcaaaagtctttgctaaactccttcatacagattcatatggaagaatttccatcatgcagttctttaattatgtcatgagaaaagtttggcttcatcaaacaagaataggactcagtttatatgatgtcgctgggcaggggtaccttcgggaatctgatttagaaaactacatattggaacttatccctacgttgccacaattagatggtctggaaaaatctttctactccttttatgtttgtacagcagttaggaagttcttcttctttttagatcctttaagaacaggaaagataaaaattcaagatattttagcatgcagcttcctagatgatttattggagctaagggatgaggaactgtccaaggagagtcaagaaacaaattggttttctgctccttctgccctaagagtttatggccagtacttgaatcttgataaagatcacaatggcatgctcagtaaagaagaactctcacgctatggaacagctaccatgaccaatgtcttcttagaccgtgttttccaggagtgtctcacttatgatggagaaatggactataagacctacttggactttgtccttgcattagaaaacagaaaggaacctgcagctctacaatatattttcaaactgcttgatattgagaacaaaggatacctgaatgtcttttcacttaattatttctttagggccatacaggaactaatgaaaatccatggacaagatcctgtttcatttcaagatgtcaaggatgaaatctttgacatggtaaaaccaaaggatcctttgaaaatctctcttcaggatttaatcaacagtaatcaaggagacacagtaaccaccattctaatcgatttgaatggcttctggacttacgagaacagagaggctcttgttgcaaatgacagtgaaaactctgcagaccttgatgatacatgatctctgaaagactagactgtcttatattatgagatacttgaatgctgcatgtaaagcctttaaagcaaaatcctcagaaatggtctaaataaaacacttgatatgcctagagaacacaaaaaatgttttggttac

SEQ ID NO: 376218 - DNA, 1958 bp, Homo sapiens
tgcccacgatgcaccgcgccagccccgaccgacggacgagactgacccggacttaggcgttccgcctggcccggcggcgaggaaaaaaggcagttttgaagcatttagtggcaaaaggggtaggagacggctgctgaagtgtctactacattcaggggacctggaaggcttccagatatccgcaatgaacaatgaaaagaaattgtgaaagaaggcgcttccctcaagccggaactaatgaactcctgggtcacgtggtgcgcacgcgccaaaggcacacgataaaggaaaacgcgggcttatcgtggcctttaaaatccggcttggtgagcttgggtcgcctctgaaggagaaccattttccatctctttcatagttttttcccccagtcagcgtggtagcggtattctccgcggcagtgacagtaattgtttttgcctctttagccaagacttccgccctcgatcaagatggtggttggacggccttcctaacctttacggggcctggcggtgctgacgcctgagctggtaggggtggagcaggtaggaaacagcaaatgcagaagctgctgcgcgggagtcggccatggactggaaagaagttcttcgtcggcgcctagcgacgcccaacacctgtccaaacactgcctgctgaagatgaagtcttactacagaaattaagagaggaatcaagagctgtctttctacaaagaaaaagcagagaactgttagataatgaagaattacagaacttatggtttttgctggacaaacaccagacaccacctatgattgggagaggaagcgatgatcaattacgaaaactttttgaaggttggtgaaaaggctggagcaaagtgcaagcaatttttcacagcaaaagtctttgctaaactccttcatacagattcatatggaagaatttccatcatgcagttctttaattatgtcatgagaaaagtttggcttcatcaaacaagaataggactcagtttatatgatgtcgctgggcaggggtaccttcgggaatctgatttagaaaactacatattggaacttatccctacgttgccacaattagatggtctggaaaaatctttctactccttttatgtttgtacagcagttaggaagttcttcttctttttagatcctttaagaacaggaaagataaaaattcaagatattttagcatgcagcttcctagatgatttattggagctaagggatgaggaactgtccaaggagagtcaagaaacaaattggttttctgctccttctgccctaagagtttatggccagtacttgaatcttgataaagatcacaatggcatgctcagtaaagaagaactctcacgctatggaacagctaccatgaccaatgtcttcttagaccgtgttttccaggagtgtctcacttatgatggagaaatggactataagacctacttggactttgtccttgcattagaaaacagaaaggaacctgcagctctacaatatattttcaaactgcttgatattgagaacaaaggatacctgaatgtcttttcacttaattatttctttagggccatacaggaactaatgaaaatccatggacaagatcctgtttcatttcaagatgtcaaggatgaaatctttgacatggtaaaaccaaaggatcctttgaaaatctctcttcaggatttaatcaacagtaatcaaggagacacagtaaccaccattctaatcgatttgaatggcttctggacttacgagaacagagaggctcttgttgcaaatgacagtgaaaactctgcagaccttgatgatacatgatctctgaaagactagactgtcttatattatgagatacttgaatgctgcatgtaaagcctttaaagcaaaatcctcagaaatggtctaaataaaacacttgatatgcctagagaacacaaaaaatgttttggttac

SEQ ID NO: 376219 - DNA, 1972 bp, Homo sapiens
tgcccacgatgcaccgcgccagccccgaccgacggacgagactgacccggacttaggcgttccgcctggcccggcggcgaggaaaaaaggcagttttgaagcatttagtggcaaaaggggtaggagacggctgctgaagtgtctactacattcaggggacctggaaggcttccagatatccgcaatgaacaatgaaaagaaattgtgaaagaaggcgcttccctcaagccggaactaatgaactcctgggtcacgtggtgcgcacgcgccaaaggcacacgataaaggaaaacgcgggcttatcgtggcctttaaaatccggcttggtgagcttgggtcgcctctgaaggagaaccattttccatctctttcatagttttttcccccagtcagcgtggtagcggtattctccgcggcagtgacagtaattgtttttgcctctttagccaagacttccgccctcgatcaagatggtggttggacggccttcctaacctttacggggcctggcggtgctgacgcctgagctggtaggggtggagcaggtaggaaacagcaaatgcagaagctgctgcgcgggagtcggccatggactggaaagaagttcttcgtcggcgcctagcgacgcccaacacctgtccaaacaaaaaaaaaagtgaacaagaattaaaagatgaagaaatggatttatttacaaaatattactccgaatggaaaggaggtagaaaaaacacaaatgaattctataagaccattccccggttttattataggctgcctgctgaagatgaagtcttactacagaaattaagagaggaatcaagagctgtctttctacaaagaaaaagcagagaactgttagataatgaagaattacaggcaatttttcacagcaaaagtctttgctaaactccttcatacagattcatatggaagaatttccatcatgcagttctttaattatgtcatgagaaaagtttggcttcatcaaacaagaataggactcagtttatatgatgtcgctgggcaggggtaccttcgggaatctgatttagaaaactacatattggaacttatccctacgttgccacaattagatggtctggaaaaatctttctactccttttatgtttgtacagcagttaggaagttcttcttctttttagatcctttaagaacaggaaagataaaaattcaagatattttagcatgcagcttcctagatgatttattggagctaagggatgaggaactgtccaaggagagtcaagaaacaaattggttttctgctccttctgccctaagagtttatggccagtacttgaatcttgataaagatcacaatggcatgctcagtaaagaagaactctcacgctatggaacagctaccatgaccaatgtcttcttagaccgtgttttccaggagtgtctcacttatgatggagaaatggactataagacctacttggactttgtccttgcattagaaaacagaaaggaacctgcagctctacaatatattttcaaactgcttgatattgagaacaaaggatacctgaatgtcttttcacttaattatttctttagggccatacaggaactaatgaaaatccatggacaagatcctgtttcatttcaagatgtcaaggatgaaatctttgacatggtaaaaccaaaggatcctttgaaaatctctcttcaggatttaatcaacagtaatcaaggagacacagtaaccaccattctaatcgatttgaatggcttctggacttacgagaacagagaggctcttgttgcaaatgacagtgaaaactctgcagaccttgatgatacatgatctctgaaagactagactgtcttatattatgagatacttgaatgctgcatgtaaagcctttaaagcaaaatcctcagaaatggtctaaataaaacacttgatatgcctagagaacacaaaaaatgttttggttac

SEQ ID NO: 376220 - DNA, 1975 bp, Homo sapiens
tgcccacgatgcaccgcgccagccccgaccgacggacgagactgacccggacttaggcgttccgcctggcccggcggcgaggaaaaaaggcagttttgaagcatttagtggcaaaaggggtaggagacggctgctgaagtgtctactacattcaggggacctggaaggcttccagatatccgcaatgaacaatgaaaagaaattgtgaaagaaggcgcttccctcaagccggaactaatgaactcctgggtcacgtggtgcgcacgcgccaaaggcacacgataaaggaaaacgcgggcttatcgtggcctttaaaatccggcttggtgagcttgggtcgcctctgaaggagaaccattttccatctctttcatagttttttcccccagtcagcgtggtagcggtattctccgcggcagtgacagtaattgtttttgcctctttagccaagacttccgccctcgatcaagatggtggttggacggccttcctaacctttacggggcctggcggtgctgacgcctgagctggtaggggtggagcaggtaggaaacagcaaatgcagaagctgctgcgcgggagtcggccatggactggaaagaagttcttcgtcggcgcctagcgacgcccaacacctgtccaaacaaaaaaaaaagtgaacaagaattaaaagatgaagaaatggatttatttacaaaatattactccgaatggaaaggaggtagaaaaaacacaaatgaattctataagaccattccccggttttattataggctgcctgctgaagatgaagtcttactacagaaattaagagaggaatcaagagctgtctttctacaaagaaaaagcagagaactgttagataatgaagaattacagaacttatggtttttgctggacaaacaccagacaccacctatgattgggagaggaagcgatgatcaattacgaaaactttttgaaggttggtgaaaaggctggagcaaagtgcaagcaatttttcacagcaaaagtctttgctaaactccttcatacagattcatatggaagaatttccatcatgcagttctttaattatgtcatgagaaaagtttggcttcatcaaacaagaataggactcagtttatatgatgtcgctgggcaggggtaccttcgggaatctgatttagaaaactacatattggaacttatccctacgttgccacaattagatggtctggaaaaatctttctactccttttatgtttgtacagcagttaggaagttcttcttctttttagatcctttaagaacaggaaagataaaaattcaagatattttagcatgcagcttcctagatgatttattggagctaagggatgaggaactgtccaaggagagtcaagaaacaaattggttttctgctccttctgccctaagagtttatggccagtacttgaatcttgataaagatcacaatggcatgctcagtaaagaagaactctcacgctatggaacagctaccatgaccaatgtcttcttagaccgtgttttccaggagtgtctcacttatgatggagaaatggactataagacctacttggactttgtccttgcattagaaaacagaaaggaacctgcagctctacaatatattttcaaactgcttgatattgagaacaaaggatacctgaatgtcttttcacttaattatttctttagggccatacaggaactaatgaaaatccatggacaagatcctgtttcatttcaagatgtcaaggatgaaatctttgacatggtaaaaccaaaggatcctttgaaaatctctcttcaggatttaatcaacagtaatcaaggagacacagtaaccaccattctaatcgatttgaatggcttctggacttacgagaacagactttaaagcaaaatcctcagaaatggtctaaataaaacacttgatatgcctagagaacacaaaaaatgttttggttac

SEQ ID NO: 376221 - DNA, 1705 bp, Homo sapiens
tgcccacgatgcaccgcgccagccccgaccgacggacgagactgacccggacttaggcgttccgcctggcccggcggcgaggaaaaaaggcagttttgaagcatttagtggcaaaaggggtaggagacggctgctgaagtgtctactacattcaggggacctggaaggcttccagatatccgcaatgaacaatgaaaagaaattgtgaaagaaggcgcttccctcaagccggaactaatgaactcctgggtcacgtggtgcgcacgcgccaaaggcacacgataaaggaaaacgcgggcttatcgtggcctttaaaatccggcttgccaagacttccgccctcgatcaagatggtggttggacggccttcctaacctttacggggcctggcggtgctgacgcctgagctggtaggggtggagcaggtaggaaacagcaaatgcagaagctgctgcgcgggagtcggccatggactggaaagaagttcttcgtcggcgcctagcgacgcccaacacctgtccaaacactgcctgctgaagatgaagtcttactacagaaattaagagaggaatcaagagctgtctttctacaaagaaaaagcagagaactgttagataatgaagaattacagaacttatggtttttgctggacaaacaccagacaccacctatgattgggagaggaagcgatgatcaattacgaaaactttttgaaggttggtgaaaaggctggagcaaagtgcaagcaatttttcacagcaaaagtctttgctaaactccttcatacagattcatatggaagaatttccatcatgcagttctttaattatgtcatgagaaaagtttggcttcatcaaacaagaataggactcagtttatatgatgtcgctgggcaggggtaccttcgggaatctgaaagataaaaattcaagatattttagcatgcagcttcctagatgatttattggagctaagggatgaggaactgtccaaggagagtcaagaaacaaattggttttctgctccttctgccctaagagtttatggccagtacttgaatcttgataaagatcacaatggcatgctcagtaaagaagaactctcacgctatggaacagctaccatgaccaatgtcttcttagaccgtgttttccaggagtgtctcacttatgatggagaaatggactataagacctacttggactttgtccttgcattagaaaacagaaaggaacctgcagctctacaatatattttcaaactgcttgatattgagaacaaaggatacctgaatgtcttttcacttaattatttctttagggccatacaggaactaatgaaaatccatggacaagatcctgtttcatttcaagatgtcaaggatgaaatctttgacatggtaaaaccaaaggatcctttgaaaatctctcttcaggatttaatcaacagtaatcaaggagacacagtaaccaccattctaatcgatttgaatggcttctggacttacgagaacagagaggctcttgttgcaaatgacagtgaaaactctgcagaccttgatgatacatgatctctgaaagactagactgtcttatattatgagatacttgaatgctgcatgtaaagcctttaaagcaaaatcctcagaaatggtctaaataaaacacttgatatgcctagagaacacaaaaaatgttttggttac

SEQ ID NO: 376222 - DNA, 1519 bp, Homo sapiens
tgcccacgatgcaccgcgccagccccgaccgacggacgagactgacccggacttaggcgttccgcctggcccggcggcgaggaaaaaaggcagttttgaagcatttagtggcaaaaggggtaggagacggctgctgaagtgtctactacattcaggggacctggaaggcttccagatatccgcaatgaacaatgaaaagaaattgtgaaagaaggcgcttccctcaagccggaactaatgaactcctgggtcacgtggtgcgcacgcgccaaaggcacacgataaaggaaaacgcgggcttatcgtggcctttaaaatccggcttggtgagcttgggtcgcctctgaaggagaaccattttccatctctttcatagttttttcccccagtcagcgtggtagcggtattctccgcggcagtgacagtaattgtttttgcctctttagccaagacttccgccctcgatcaagatggtggttggacggccttcctaacctttacggggcctggcggtgctgacgcctgagctggtaggggtggagcaggtaggaaacagcaaatgcagaagctgctgcgcgggagtcggccatggactggaaagaagttcttcgtcggcgcctagcgacgcccaacacctgtccaaacaaaaaaaaaagtgaacaagaattaaaagatgaagaaatggatttatttacaaaatattactccgaatggaaaggaggtagaaaaaacacaaatgaattctataagaccattccccggttttattataggctgcctgctgaagatgaagtcttactacagaaattaagagaggaatcaagagctgtctttctacaaagaaaaagcagagaactgttagataatgaagaattacagaacttatggtttttgctggacaaacaccagacaccacctatgattgggagaggaagcgatgatcaattacgaaaactttttgaaggttggtgaaaaggctggagcaaagtgcaagtaagaataatataattaacaaaagaatgtgttatgttaagcattttaaatgcctcaaatattggctgggcacagtggctcacacctgtaatcccagcagttttggaggctgaggtgagaggattgcttgagctggggtgtttgaggccagcctgggcaacttagggagatcttgtctctactaaaaaaattatctgggtgtgggggcgtacacctgtagctactccggaggctgaggtgggagaattgcttgagcccgggaggatgagctgtgattaagccactgcactccagcctgggcgatagagcaagaccttacctttaaaaaaaataaacaaatcctcaaatattaaatgaagtaaatggaatgacatttgagtccatttaagttactaattaaatttaataaaattatttacagtcaaaaaatcacattggtatgaagttattaaaataaataatatagccagaagtgctgggattacaggcaagagccactgcgcctggccaaatctccatttctttt

SEQ ID NO: 376223 - DNA, 840 bp, Homo sapiens
tgcccacgatgcaccgcgccagccccgaccgacggacgagactgacccggacttaggcgttccgcctggcccggcggcgaggaaaaaaggcagttttgaagcatttagtggcaaaaggggtaggagacggctgctgaagtgtctactacattcaggggacctggaaggcttccagatatccgcaatgaacaatgaaaagaaattgtgaaagaaggcgcttccctcaagccggaactaatgaactcctgggtcacgtggtgcgcacgcgccaaaggcacacgataaaggaaaacgcgggcttatcgtggcctttaaaatccggcttggtgagcttgggtcgcctctgaaggagaaccattttccatctctttcatagttttttcccccagtcagcgtggtagcggtattctccgcggcagtgacagtaattgtttttgcctctttagccaagacttccgccctcgatcaagatggtggttggacggccttcctaacctttacggggcctggcggtgctgacgcctgagctggtaggggtggagcaggtaggaaacagcaaatgcagaagctgctgcgcgggagtcggccatggactggaaagaagttcttcgtcggcgcctagcgacgcccaacacctgtccaaacaaaaaaaaaagtgaacaagaattaaaagatgaagaaatggatttatttacaaaatattactccgaatggaaaggaggtagaaaaaacacaaatgaattctataagaccattccccggttttattataggggaggcatgagacatcaatcaaatacatttgagaaatacattggtttgatccagaaaggtgggaca

SEQ ID NO: 376224 - DNA, 3555 bp, Homo sapiens
gctcactgctggtgttgcctcttggaacctcggcagtttctgctttcgcacctgcagggtttagtctccgggactgcttgggaggacacctggaatgccgaaggcaggactacacaccgggcgaatccaccagcgccaccaagcccttgaaaacccgaggccgccgcgcgactccatttcccagcgccccgcgcggcaggggcttggacgttgccaaggagaccggtagtggccccgcctccacgcagggaaacaggcgggaaccacgtgacccggaaggctgtacgcaagcgtccgcggcgcgcactgggccaatgagaaccgaagggctggacttccggcggtgggactgtcacttcgccgcccgcgtcaggccacaccggtggtctgggctggggaccgcgggtcgggtccggtttccagggggttcctggtgctcgaggctggcggcgaggaaggaccagatggcctttgaggatgtggctgtgtacttctcccaggaggagtgggggctcctggacacagcccagagggccctgtaccgccgcgtgatgctagacaacttcgcacttgtggcctcgctgggactctccacctctcgacctcgtgtggtcatccaactggagcgtggcgaggagccctgggttcccagtggaacggacacaaccctgtccaggaccacctacaggaggcgcaaccctggttcctggagtttgacagaggatagagatgtttctggagaatggccacgagctttcccagataccccacctgggatgactactagcgtcttccctgttgccggtgcctgccacagtgtaaaaagcctgcagagacaacggggtgcctccccatctcgggagagaaaacccacgggggtgtcggtgatctactgggagaggctcctgctaggctcaggcagtgggcaagccagcgtcagcctgcgactgacctccccgcttaggcctcccgagggcgtccggcttagggaaaagacactcacagagcatgcgttgctggggaggcagcccaggacgcctgagcggcagaaaccatgtgcacaggaggtccctgggagaacctttgggagcgcccaggacctggaggctgccggcggtcggggacatcaccgaatgggtgcagtttggcaggagcctcatagactcctcggtggccaggagccctcgacctgggacgagctgggcgaggctcttcacgctggggagaagtccttcgaatgcagggcgtgcagcaaagtgttcgtgaagagctccgacctcctcaagcacctacgcacccacaccggggagcggccctacgagtgcgcccagtgcggcaaggccttcagccagacgtcgcacttgacgcagcaccagcgcatccacagcggcgagacgccctacgcgtgccccgtgtgcggcaaggccttccggcatagctcctcgctggtgcggcaccagcgcatccacacggccgagaagtccttccgctgctccgagtgcggcaaggccttcagccacggctccaacctcagccagcaccgcaagatccacgcgggtgggcgtccttatgcttgcgcacagtgtggccgccgcttctgccgcaactcgcacctgatccagcacgagcgtacgcacacaggcgagaagcccttcgtgtgcgcgctctgcggtgctgccttcagccagggctcctcgctctttaagcaccagcgcgtgcacacaggcgagaagcccttcgcctgcccacagtgcggccgcgcctttagccacagctccaacctcacccagcaccagctcctgcacacgggcgagcggcccttccgctgcgtggactgtggcaaggccttcgccaagggcgccgtgctgctcagccaccggcgcattcacacgggcgagaagcccttcgtgtgtacgcagtgtggccgcgccttccgtgagcgcccggccctcttccaccaccagaggatccataccggcgagaagaccgtccggcgatccagggccagcctgcacccccaggccaggtctgttgccggggcatcatcagaaggtgcgccagcgaaggaaaccgagcccactcccgcctcgggcccagccgccgtctcgcagccagcggaggtctgaggtcacaggttgcagccctggccttctgtgaatcccttccacagctaaagggcatatgtcctctgcagatccacagcagagaaaaagtcccgtgcttgctagtcagggacaagggaggccctttggctgtgatttcatttgcacgtggggacaggatttgccagttcacccacagatcacacctccatccccaaagaggtagcactgcagcaacatcagggggaggacgtggtggctgaactctagtggggccgagactattcagagccagtaggaggccgacagtcacagcactgcactgtggtgcggcttcatgtgatatgacagtggatgctaaggtgagagggatgcaggcatgggttgggggtggcccagagaaacttatgacagctgtacacaaactggccgctggagagatgcccgctgagggtattctcccctcaacccactgcctctgttcatccaagacttcctaggggccagcctagcagacaagagaccacaagggactggggatcagggtctgggctctgtcagccgccacctctgggaaagagaaaaggtttgggtccactgaacatcatgtttgtagacgctgacaggtggggtcctaatgagagccaacacatgctcactgccagctcctgtcctgagtactgggaagtttctcctgaagccctgtgagatggctctgtggctggtatcccgacttggaagatgaggaaactgaggcacacggcctggcctggcttcacacacatagccgactcaggagagggatgcccatgggggaacatgtgactctcagcattggaaggacagagctaggatgatggctttccggtggcactcgttcaggtttttgcccaagtctcagcttggccaaggcctgtcactgactggtttaccaaagtcgatgtgaggaggaggctttatacctgaggggatgatgttaacttcagacaagatggagctgctcacttttgccgggtttggtggccacttcacccccaaccctgtctcacccccattatccctcctcaattggaggctggacagagctgaataggaaagacttgctattgcctaaggctatgtgtgacaccctcctgaggacctccccaccccagtgtaatggcccttcatggcagggacagaaaggtggactgggggccatttgcttcctgtggccttcagcagaccaggccctgtccctacctggagcctcacctccaaggaaattcatgttctccttaatggaaaaaaaaaaaaaaaaaagactaccatctgcaactcagagtaggtgttgcagtttcctgtacagcagtttggacctccagagcacagcctcttgtccctactccagagcatggttcagtcttaatagcagttcaagagcttctctgataaaggtttctttttaaacatt

SEQ ID NO: 376225 - DNA, 671 bp, Homo sapiens
tcttaaaacatgagatgtttatgcaatttttattttttttagctcatcagctgttattagtgttaatgtattttatgtgttgcccaagacaattcttcttccaatgtggcccagggaagccaaaagattggataacccagccttagaccatggctgtctcttcctccctgctcttttaggaccagatggcctttgaggatgtggctgtgtacttctcccaggaggagtgggggctcctggacacagcccagagggccctgtaccgccgcgtgatgctagacaacttcgcacttgtggcctcgctgggtaaggtcctagatactccatgaaatgggcaactgataacaagctgactggccagggctgccccctcacctccctggtggctgacgagcaggcctataccttgcagccaggagccatgtggaataggggtctggtcctatagacatgcagtctggttggctcaaccactccctgtggcgctgtccggctgtggcctctccgagccttggctcagtccccttcctttggtgccctgggcacagttgctgccctggggatgaatgagctattcctgtctgtttccgtgaagccctgactcctgccctctgtttggaggtgggttatcttgagctggggctggactctaacctgcacctcctcctcac

SEQ ID NO: 376226 - DNA, 426 bp, Homo sapiens
atggcatgtagtgaggacatgaatttccttggaggtgaggctccaggtagggacagagctgaataggaaagacttgctattgcctaaggctatgtgtgacaccctcctgaggacctccccaccccagtgtaatggcccttcatggcagggacagaaaggtggactgggggccatttgcttcctgtggccttcagcagaccaggccctgtccctacctggagcctcacctccaaggaaattcatgttctccttaatggaaaaaaaaaaaaaaaaaagactaccatctgcaactcagagtaggtgttgcagtttcctgtacagcagtttggacctccagagcacagcctcttgtccctactccagagcatggttcagtcttaatagcagttcaagagcttctctgataaaggtttctttttaaacatt

SEQ ID NO: 376227 - DNA, 3109 bp, Homo sapiens
tcttaaaacatgagatgtttatgcaatttttattttttttagctcatcagctgttattagtgttaatgtattttatgtgttgcccaagacaattcttcttccaatgtggcccagggaagccaaaagattggataacccagccttagaccatggctgtctcttcctccctgctcttttaggaccagatggcctttgaggatgtggctgtgtacttctcccaggaggagtgggggctcctggacacagcccagagggccctgtaccgccgcgtgatgctagacaacttcgcacttgtggcctcgctgggactctccacctctcgacctcgtgtggtcatccaactggagcgtggcgaggagccctgggttcccagtggaacggacacaaccctgtccaggaccacctacaggaggcgcaaccctggttcctggagtttgacagaggatagagatgtttctggagaatggccacgagctttcccagataccccacctgggatgactactagcgtcttccctgttgccggtgcctgccacagtgtaaaaagcctgcagagacaacggggtgcctccccatctcgggagagaaaacccacgggggtgtcggtgatctactgggagaggctcctgctaggctcaggcagtgggcaagccagcgtcagcctgcgactgacctccccgcttaggcctcccgagggcgtccggcttagggaaaagacactcacagagcatgcgttgctggggaggcagcccaggacgcctgagcggcagaaaccatgtgcacaggaggtccctgggagaacctttgggagcgcccaggacctggaggctgccggcggtcggggacatcaccgaatgggtgcagtttggcaggagcctcatagactcctcggtggccaggagccctcgacctgggacgagctgggcgaggctcttcacgctggggagaagtccttcgaatgcagggcgtgcagcaaagtgttcgtgaagagctccgacctcctcaagcacctacgcacccacaccggggagcggccctacgagtgcgcccagtgcggcaaggccttcagccagacgtcgcacttgacgcagcaccagcgcatccacagcggcgagacgccctacgcgtgccccgtgtgcggcaaggccttccggcatagctcctcgctggtgcggcaccagcgcatccacacggccgagaagtccttccgctgctccgagtgcggcaaggccttcagccacggctccaacctcagccagcaccgcaagatccacgcgggtgggcgtccttatgcttgcgcacagtgtggccgccgcttctgccgcaactcgcacctgatccagcacgagcgtacgcacacaggcgagaagcccttcgtgtgcgcgctctgcggtgctgccttcagccagggctcctcgctctttaagcaccagcgcgtgcacacaggcgagaagcccttcgcctgcccacagtgcggccgcgcctttagccacagctccaacctcacccagcaccagctcctgcacacgggcgagcggcccttccgctgcgtggactgtggcaaggccttcgccaagggcgccgtgctgctcagccaccggcgcattcacacgggcgagaagcccttcgtgtgtacgcagtgtggccgcgccttccgtgagcgcccggccctcttccaccaccagaggatccataccggcgagaagaccgtccggcgatccagggccagcctgcacccccaggccaggtctgttgccggggcatcatcagaaggtgcgccagcgaaggaaaccgagcccactcccgcctcgggcccagccgccgtctcgcagccagcggaggtctgaggtcacagatcacacctccatccccaaagaggtagcactgcagcaacatcagggggaggacgtggtggctgaactctagtggggccgagactattcagagccagtaggaggccgacagtcacagcactgcactgtggtgcggcttcatgtgatatgacagtggatgctaaggtgagagggatgcaggcatgggttgggggtggcccagagaaacttatgacagctgtacacaaactggccgctggagagatgcccgctgagggtattctcccctcaacccactgcctctgttcatccaagacttcctaggggccagcctagcagacaagagaccacaagggactggggatcagggtctgggctctgtcagccgccacctctgggaaagagaaaaggtttgggtccactgaacatcatgtttgtagacgctgacaggtggggtcctaatgagagccaacacatgctcactgccagctcctgtcctgagtactgggaagtttctcctgaagccctgtgagatggctctgtggctggtatcccgacttggaagatgaggaaactgaggcacacggcctggcctggcttcacacacatagccgactcaggagagggatgcccatgggggaacatgtgactctcagcattggaaggacagagctaggatgatggctttccggtggcactcgttcaggtttttgcccaagtctcagcttggccaaggcctgtcactgactggtttaccaaagtcgatgtgaggaggaggctttatacctgaggggatgatgttaacttcagacaagatggagctgctcacttttgccgggtttggtggccacttcacccccaaccctgtctcacccccattatccctcctcaattggaggctggacagagctgaataggaaagacttgctattgcctaaggctatgtgtgacaccctcctgaggacctccccaccccagtgtaatggcccttcatggcagggacagaaaggtggactgggggccatttgcttcctgtggccttcagcagaccaggccctgtccctacctggagcctcacctccaaggaaattcatgttctccttaatggaaaaaaaaaaaaaaaaaagactaccatctgcaactcagagtaggtgttgcagtttcctgtacagcagtttggacctccagagcacagcctcttgtccctactccagagcatggttcagtcttaatagcagttcaagagcttctctgataaaggtttctttttaaacatt

SEQ ID NO: 376228 - DNA, 2476 bp, Homo sapiens
gctcactgctggtgttgcctcttggaacctcggcagtttctgctttcgcacctgcagggtttagtctccgggactgcttgggaggacacctggaatgccgaaggcaggactacacaccgggcgaatccaccagcgccaccaagcccttgaaaacccgaggccgccgcgcgactccatttcccagcgccccgcgcggcaggggcttggacgttgccaaggagaccggtagtggccccgcctccacgcagggaaacaggcgggaaccacgtgacccggaaggctgtacgcaagcgtccgcggcgcgcactgggccaatgagaaccgaagggctggacttccggcggtgggactgtcacttcgccgcccgcgtcaggccacaccggtggtctgggctggggaccgcgggtcgggtccggtttccagggggttcctggtgctcgaggctggcggcgaggaaggaccagatggcctttgaggatgtggctgtgtacttctcccaggaggagtgggggctcctggacacagcccagagggccctgtaccgccgcgtgatgctagacaacttcgcacttgtggcctcgctgggactctccacctctcgacctcgtgtggtcatccaactggagcgtggcgaggagccctgggttcccagtggaacggacacaaccctgtccaggaccacctacaggaggcgcaaccctgctcacccagcaccagctcctgcacacgggcgagcggcccttccgctgcgtggactgtggcaaggccttcgccaagggcgccgtgctgctcagccaccggcgcattcacacgggcgagaagcccttcgtgtgtacgcagtgtggccgcgccttccgtgagcgcccggccctcttccaccaccagaggatccataccggcgagaagaccgtccggcgatccagggccagcctgcacccccaggccaggtctgttgccggggcatcatcagaaggtgcgccagcgaaggaaaccgagcccactcccgcctcgggcccagccgccgtctcgcagccagcggaggtctgaggtcacaggttgcagccctggccttctgtgaatcccttccacagctaaagggcatatgtcctctgcagatccacagcagagaaaaagtcccgtgcttgctagtcagggacaagggaggccctttggctgtgatttcatttgcacgtggggacaggatttgccagttcacccacagatcacacctccatccccaaagaggtagcactgcagcaacatcagggggaggacgtggtggctgaactctagtggggccgagactattcagagccagtaggaggccgacagtcacagcactgcactgtggtgcggcttcatgtgatatgacagtggatgctaaggtgagagggatgcaggcatgggttgggggtggcccagagaaacttatgacagctgtacacaaactggccgctggagagatgcccgctgagggtattctcccctcaacccactgcctctgttcatccaagacttcctaggggccagcctagcagacaagagaccacaagggactggggatcagggtctgggctctgtcagccgccacctctgggaaagagaaaaggtttgggtccactgaacatcatgtttgtagacgctgacaggtggggtcctaatgagagccaacacatgctcactgccagctcctgtcctgagtactgggaagtttctcctgaagccctgtgagatggctctgtggctggtatcccgacttggaagatgaggaaactgaggcacacggcctggcctggcttcacacacatagccgactcaggagagggatgcccatgggggaacatgtgactctcagcattggaaggacagagctaggatgatggctttccggtggcactcgttcaggtttttgcccaagtctcagcttggccaaggcctgtcactgactggtttaccaaagtcgatgtgaggaggaggctttatacctgaggggatgatgttaacttcagacaagatggagctgctcacttttgccgggtttggtggccacttcacccccaaccctgtctcacccccattatccctcctcaattggaggctggacagagctgaataggaaagacttgctattgcctaaggctatgtgtgacaccctcctgaggacctccccaccccagtgtaatggcccttcatggcagggacagaaaggtggactgggggccatttgcttcctgtggccttcagcagaccaggccctgtccctacctggagcctcacctccaaggaaattcatgttctccttaatggaaaaaaaaaaaaaaaaaagactaccatctgcaactcagagtaggtgttgcagtttcctgtacagcagtttggacctccagagcacagcctcttgtccctactccagagcatggttcagtcttaatagcagttcaagagcttctctgataaaggtttctttttaaacatt

SEQ ID NO: 376229 - DNA, 3272 bp, Homo sapiens
gctcactgctggtgttgcctcttggaacctcggcagtttctgctttcgcacctgcagggtttagtctccgggactgcttgggaggacacctggaatgccgaaggcaggactacacaccgggcgaatccaccagcgccaccaagcccttgaaaacccgaggccgccgcgcgactccatttcccagcgccccgcgcggcaggggcttggacgttgccaaggagaccggtagtggccccgcctccacgcagggaaacaggcgggaaccacgtgacccggaaggctgtacgcaagcgtccgcggcgcgcactgggccaatgagaaccgaagggctggacttccggcggtgggactgtcacttcgccgcccgcgtcaggccacaccggtggtctgggctggggaccgcgggtcgggtccggtttccagggggttcctggtgctcgaggctggcggcgaggaaggaccagatggcctttgaggatgtggctgtgtacttctcccaggaggagtgggggctcctggacacagcccagagggccctgtaccgccgcgtgatgctagacaacttcgcacttgtggcctcgctgggactctccacctctcgacctcgtgtggtcatccaactggagcgtggcgaggagccctgggttcccagtggaacggacacaaccctgtccaggaccacctacaggaggcgcaaccctggttcctggagtttgacagaggatagagatgtttctggagaatggccacgagctttcccagataccccacctgggatgactactagcgtcttccctgttgccggtgcctgccacagtgtaaaaagcctgcagagacaacggggtgcctccccatctcgggagagaaaacccacgggggtgtcggtgatctactgggagaggctcctgctaggctcaggcagtgggcaagccagcgtcagcctgcgactgacctccccgcttaggcctcccgagggcgtccggcttagggaaaagacactcacagagcatgcgttgctggggaggcagcccaggacgcctgagcggcagaaaccatgtgcacaggaggtccctgggagaacctttgggagcgcccaggacctggaggctgccggcggtcggggacatcaccgaatgggtgcagtttggcaggagcctcatagactcctcggtggccaggagccctcgacctgggacgagctgggcgaggctcttcacgctggggagaagtccttcgaatgcagggcgtgcagcaaagtgttcgtgaagagctccgacctcctcaagcacctacgcacccacaccggggagcggccctacgagtgcgcccagtgcggcaaggccttcagccagacgtcgcacttgacgcagcaccagcgcatccacagcggcgagacgccctacgcgtgccccgtgtgcggcaaggccttccggcatagctcctcgctggtgcggcaccagcgcatccacacggccgagaagtccttccgctgctccgagtgcggcaaggccttcagccacggctccaacctcagccagcaccgcaagatccacgcgggtgggcgtccttatgcttgcgcacagtgtggccgccgcttctgccgcaactcgcacctgatccagcacgagcgtacgcacacaggcgagaagcccttcgtgtgcgcgctctgcggtgctgccttcagccagggctcctcgctctttaagcaccagcgcgtgcacacaggcgagaagcccttcgcctgcccacagtgcggccgcgcctttagccacagctccaacctcacccagcaccagctcctgcacacgggcgagcggcccttccgctgcgtggactgtggcaaggccttcgccaagggcgccgtgctgctcagccaccggcgcattcacacgggcgagaagcccttcgtgtgtacgcagtgtggccgcgccttccgtgagcgcccggccctcttccaccaccagaggatccataccggcgagaagaccgtccggcgatccagggccagcctgcacccccaggccaggtctgttgccggggcatcatcagaaggtgcgccagcgaaggaaaccgagcccactcccgcctcgggcccagccgccgtctcgcagccagcggaggtctgaggtcacaggttgcagccctggccttctgtgaatcccttccacagctaaagggcatatgtcctctgcagatccacagcagagaaaaagtcccgtgcttgctagtcagggacaagggaggccctttggctgtgatttcatttgcacgtggggacaggatttgccagttcacccacagatcacacctccatccccaaagaggtagcactgcagcaacatcagggggaggacgtggtggctgaactctagtggggccgagactattcagagccagtaggaggccgacagtcacagcactgcactgtggtgcggcttcatgtgatatgacagtggatgctaaggtgagagggatgcaggcatgggttgggggtggcccagagaaacttatgacagctgtacacaaactggccgctggagagatgcccgctgagggtattctcccctcaacccactgcctctgttcatccaagacttcctaggggccagcctagcagacaagagaccacaagggactggggatcagggtctgggctctgtcagccgccacctctgggaaagagaaaaggtttgggtccactgaacatcatgtttgtagacgctgacaggtggggtcctaatgagagccaacacatgctcactgccagctcctgtcctgagtactgggaagtttctcctgaagccctgtgagatggctctgtggctggtatcccgacttggaagatgaggaaactgaggcacacggcctggcctggcttcacacacatagccgactcaggagagggatgcccatgggggaacatgtgactctcagcattggaaggacagagctaggatgatggctttccggtggcactcgttcaggtttttgcccaagtctcagcttggccaaggcctgtcactgactggtttaccaaagtcgatgtgaggaggaggctttatacctgaggggatgatgttaacttcagacaagatggagctgctcacttgcggttggggccttacccactgttacccatatctctcatggggcgggaggctgtgaaattgttggtcagggtggggctccggggccccccggtggcttcgggggcaagggggggcttctggttagcgggcgggggcccgggtgttgaaaaacccccgtggggg

SEQ ID NO: 376230 - DNA, 3442 bp, Homo sapiens
gctcactgctggtgttgcctcttggaacctcggcagtttctgctttcgcacctgcagggtttagtctccgggactgcttgggaggacacctggaatgccgaaggcaggactacacaccgggcgaatccaccagcgccaccaagcccttgaaaacccgaggccgccgcgcgactccatttcccagcgccccgcgcggcaggggcttggacgttgccaaggagaccggtagtggccccgcctccacgcagggaaacaggcgggaaccacgtgacccggaaggctgtacgcaagcgtccgcggcgcgcactgggccaatgagaaccgaagggctggacttccggcggtgggactgtcacttcgccgcccgcgtcaggccacaccggtggtctgggctggggaccgcgggtcgggtccggtttccagggggttcctggtgctcgaggctggcggcgaggaaggaccagatggcctttgaggatgtggctgtgtacttctcccaggaggagtgggggctcctggacacagcccagagggccctgtaccgccgcgtgatgctagacaacttcgcacttgtggcctcgctgggactctccacctctcgacctcgtgtggtcatccaactggagcgtggcgaggagccctgggttcccagtggaacggacacaaccctgtccaggaccacctacaggaggcgcaaccctggttcctggagtttgacagaggatagagatgtttctggagaatggccacgagctttcccagataccccacctgggatgactactagcgtcttccctgttgccggtgcctgccacagtgtaaaaagcctgcagagacaacggggtgcctccccatctcgggagagaaaacccacgggggtgtcggtgatctactgggagaggctcctgctaggctcaggcagtgggcaagccagcgtcagcctgcgactgacctccccgcttaggcctcccgagggcgtccggcttagggaaaagacactcacagagcatgcgttgctggggaggcagcccaggacgcctgagcggcagaaaccatgtgcacaggaggtccctgggagaacctttgggagcgcccaggacctggaggctgccggcggtcggggacatcaccgaatgggtgcagtttggcaggagcctcatagactcctcggtggccaggagccctcgacctgggacgagctgggcgaggctcttcacgctggggagaagtccttcgaatgcagggcgtgcagcaaagtgttcgtgaagagctccgacctcctcaagcacctacgcacccgtgtgcggcaaggccttccggcatagctcctcgctggtgcggcaccagcgcatccacacggccgagaagtccttccgctgctccgagtgcggcaaggccttcagccacggctccaacctcagccagcaccgcaagatccacgcgggtgggcgtccttatgcttgcgcacagtgtggccgccgcttctgccgcaactcgcacctgatccagcacgagcgtacgcacacaggcgagaagcccttcgtgtgcgcgctctgcggtgctgccttcagccagggctcctcgctctttaagcaccagcgcgtgcacacaggcgagaagcccttcgcctgcccacagtgcggccgcgcctttagccacagctccaacctcacccagcaccagctcctgcacacgggcgagcggcccttccgctgcgtggactgtggcaaggccttcgccaagggcgccgtgctgctcagccaccggcgcattcacacgggcgagaagcccttcgtgtgtacgcagtgtggccgcgccttccgtgagcgcccggccctcttccaccaccagaggatccataccggcgagaagaccgtccggcgatccagggccagcctgcacccccaggccaggtctgttgccggggcatcatcagaaggtgcgccagcgaaggaaaccgagcccactcccgcctcgggcccagccgccgtctcgcagccagcggaggtctgaggtcacaggttgcagccctggccttctgtgaatcccttccacagctaaagggcatatgtcctctgcagatccacagcagagaaaaagtcccgtgcttgctagtcagggacaagggaggccctttggctgtgatttcatttgcacgtggggacaggatttgccagttcacccacagatcacacctccatccccaaagaggtagcactgcagcaacatcagggggaggacgtggtggctgaactctagtggggccgagactattcagagccagtaggaggccgacagtcacagcactgcactgtggtgcggcttcatgtgatatgacagtggatgctaaggtgagagggatgcaggcatgggttgggggtggcccagagaaacttatgacagctgtacacaaactggccgctggagagatgcccgctgagggtattctcccctcaacccactgcctctgttcatccaagacttcctaggggccagcctagcagacaagagaccacaagggactggggatcagggtctgggctctgtcagccgccacctctgggaaagagaaaaggtttgggtccactgaacatcatgtttgtagacgctgacaggtggggtcctaatgagagccaacacatgctcactgccagctcctgtcctgagtactgggaagtttctcctgaagccctgtgagatggctctgtggctggtatcccgacttggaagatgaggaaactgaggcacacggcctggcctggcttcacacacatagccgactcaggagagggatgcccatgggggaacatgtgactctcagcattggaaggacagagctaggatgatggctttccggtggcactcgttcaggtttttgcccaagtctcagcttggccaaggcctgtcactgactggtttaccaaagtcgatgtgaggaggaggctttatacctgaggggatgatgttaacttcagacaagatggagctgctcacttttgccgggtttggtggccacttcacccccaaccctgtctcacccccattatccctcctcaattggaggctggacagagctgaataggaaagacttgctattgcctaaggctatgtgtgacaccctcctgaggacctccccaccccagtgtaatggcccttcatggcagggacagaaaggtggactgggggccatttgcttcctgtggccttcagcagaccaggccctgtccctacctggagcctcacctccaaggaaattcatgttctccttaatggaaaaaaaaaaaaaaaaaagactaccatctgcaactcagagtaggtgttgcagtttcctgtacagcagtttggacctccagagcacagcctcttgtccctactccagagcatggttcagtcttaatagcagttcaagagcttctctgataaaggtttctttttaaacatt

SEQ ID NO: 376231 - DNA, 3388 bp, Homo sapiens
gctcactgctggtgttgcctcttggaacctcggcagtttctgctttcgcacctgcagggtttagtctccgggactgcttgggaggacacctggaatgccgaaggcaggactacacaccgggcgaatccaccagcgccaccaagcccttgaaaacccgaggccgccgcgcgactccatttcccagcgccccgcgcggcaggggcttggacgttgccaaggagaccggtagtggccccgcctccacgcagggaaacaggcgggaaccacgtgacccggaaggctgtacgcaagcgtccgcggcgcgcactgggccaatgagaaccgaagggctggacttccggcggtgggactgtcacttcgccgcccgcgtcaggccacaccggtggtctgggctggggaccgcgggtcgggtccggtttccagggggttcctggtgctcgaggctggcggcgaggaaggaccagatggcctttgaggatgtggctgtgtacttctcccaggaggagtgggggctcctggacacagcccagagggccctgtaccgccgcgtgatgctagacaacttcgcacttgtggcctcgctgggactctccacctctcgacctcgtgtggtcatccaactggagcgtggcgaggagccctgggttcccagtggaacggacacaaccctgtccaggaccacctacaggaggcgcaaccctggttcctggagtttgacagaggatagagatgtttctggagaatggccacgagctttcccagataccccacctgggatgactactagcgtcttccctgttgccggtgcctgccacagtgtaaaaagcctgcagagacaacggggtgcctccccatctcgggagagaaaacccacgggggtgtcggtgatctactgggagaggctcctgctaggctcaggcagtgggcaagccagcgtcagcctgcgactgacctccccgcttaggcctcccgagggcgtccggcttagggaaaagacactcacagagcatgcgttgctggggaggcagcccaggacgcctgagcggcagaaaccatgtgcacaggaggtccctgggagaacctttgggagcgcccaggacctggaggctgccggcggtcggggacatcaccgaatgggtgcagtttggcaggagcctcatagactcctcggtggccaggagccctcgacctgggacgagctgggcgaggctcttcacgctggggagaagtccttcgaatgcagggcgtgcagcaaagtgttcgtgaagagctccgacctcctcaagcacctacgcacccacaccggggagcggccctacgagtgcgcccagtgcggcaaggccttcagccagacgtcgcacttgacgcagcaccagcgcatccacagcggcgagacgccctacgcgtgccccgtgtgcggcaaggccttccggcatagctcctcgctggtgcggcaccagcgcatccacacggccgagaagtccttccgctgctccgagtgcggcaaggccttcagccacggctccaacctcagccagcaccgcaagatccacgcgggtgggcgtccttatgcttgcgcacagtgtggccgccgcttctgccgcaactcgcacctgatccagcacgagcgtacgcacacaggcgagaagcccttcgtgtgcgcgctctgcggtgctgccttcagccagggctcctcgctctttaagcaccagcgcgtgcacacaggcgagaagcccttcgcctgcccacagtgcggccgcgcctttagccacagctccaacctcacccagcaccagctcctgcacacgggcgagcggcccttccgctgcgtggactgtggcaaggccttcgccaagggcgccgtgctgctcagccaccggcgcattcacacgggcgagaagcccttcgtgtgtacgcagtgtggccgcgccttccgtgagcgcccggccctcttccaccaccagaggatccataccggcgagaagaccgtccggcgatccagggccagcctgcacccccaggccaggtctgttgccggggcatcatcagaaggtgcgccagcgaaggaaaccgagcccactcccgcctcgggcccagccgccgtctcgcagccagcggaggtctgaggtcacagatcacacctccatccccaaagaggtagcactgcagcaacatcagggggaggacgtggtggctgaactctagtggggccgagactattcagagccagtaggaggccgacagtcacagcactgcactgtggtgcggcttcatgtgatatgacagtggatgctaaggtgagagggatgcaggcatgggttgggggtggcccagagaaacttatgacagctgtacacaaactggccgctggagagatgcccgctgagggtattctcccctcaacccactgcctctgttcatccaagacttcctaggggccagcctagcagacaagagaccacaagggactggggatcagggtctgggctctgtcagccgccacctctgggaaagagaaaaggtttgggtccactgaacatcatgtttgtagacgctgacaggtggggtcctaatgagagccaacacatgctcactgccagctcctgtcctgagtactgggaagtttctcctgaagccctgtgagatggctctgtggctggtatcccgacttggaagatgaggaaactgaggcacacggcctggcctggcttcacacacatagccgactcaggagagggatgcccatgggggaacatgtgactctcagcattggaaggacagagctaggatgatggctttccggtggcactcgttcaggtttttgcccaagtctcagcttggccaaggcctgtcactgactggtttaccaaagtcgatgtgaggaggaggctttatacctgaggggatgatgttaacttcagacaagatggagctgctcacttttgccgggtttggtggccacttcacccccaaccctgtctcacccccattatccctcctcaattggaggctggacagagctgaataggaaagacttgctattgcctaaggctatgtgtgacaccctcctgaggacctccccaccccagtgtaatggcccttcatggcagggacagaaaggtggactgggggccatttgcttcctgtggccttcagcagaccaggccctgtccctacctggagcctcacctccaaggaaattcatgttctccttaatggaaaaaaaaaaaaaaaaaagactaccatctgcaactcagagtaggtgttgcagtttcctgtacagcagtttggacctccagagcacagcctcttgtccctactccagagcatggttcagtcttaatagcagttcaagagcttctctgataaaggtttctttttaaacatt

SEQ ID NO: 376232 - DNA, 840 bp, Homo sapiens
  misc_feature (837)..(837): n is a, c, g, or t
taaaaacttcaaaaaaaaaaaaaaaaaaaaaaaaaaaaaaaaaaaaaaaaaaaaatcccagagtggggcacagcgaggcgctagggggaacgctggcctctgaaactagctctgggaccggggtctgcggccggcccctagctggccccgtctcccatccccagaagggtattcactggggattctgagctttggctactccagtttcccacgacacgatgttccctttctacagctgctggaggactggactgctactactactcctggctgtggcagtgagagaatcctggcagacagaagaaaaaacttgcgacttggtaggagaaaagggtaaagagtcagagaaagagttggctctagtgaagaggctgaaaccactgtttaataaaagctttgagagcactgtgggccagggttcagacacatacatctacatcttcagggtgtgccgggaagctggcaaccacacttctggggcaggcctggtgcaaatcaacaaaagtaatgggaaggagacagtggtagggagactcaacgagactcacatcttcaacggaagtaattggatcatgctgatctataaagggggtgatgaatatgacaaccactgtggcaaggagcagcgtcgtgcagtggtgatgatctcctgcaatcgacacaccctagcggacaattttaaccctgtgtctgaggagcgtggcaaagtccaagattgtttctacctctttgagatggatagcagcctggcctgttcaccagagatctcccacctcagtgtgggttccatcttacttgtcacgtttgcattactgggtttgcccggtttaaggtttnttt

SEQ ID NO: 376233 - DNA, 3971 bp, Homo sapiens
cggaacagcgtccctctcaggcggcgaacgggctagggaagcgcccggaggagacctagcgtgagaactacaactcccgcggagcccgagggcgagctgcctgcgtaacttccgcttccgccacctgcccctctcaccctcttcactcgaaccctacccgggagcggtcaggcgcgtgaccccgcgtgaccggggtgcgcgagccgagaggccctggaagcgggactctgggaccccattgaaagaaaggcaaccagaaaaggcgaaacgacaacctcgatagtgattggagctgatggaacgagggcggagctaaagtcccagaatactggccaatcagagtttaagattatcagggagcccgggaaggggaaaggggcgaaatggttctatggtcacatgccgcggggtctggtgggaggagcggttgcccagcggcctcttggcgcttcctgtttccggttcccagagtggggcacagcgaggcgctagggggaacgctggcctctgaaactagctctgggaccggggtctgcggccggcccctagctggccccgtctcccatccccagaagggtattcactggggattctgagctttggctactccagtttcccacgacacgatgttccctttctacagctgctggaggactggactgctactactactcctggctgtggcagtgagagaatcctggcagacagaagaaaaaacttgcgacttggtaggagaaaagggtaaagagtcagagaaagagttggctctagtgaagaggctgaaaccactgtttaataaaagctttgagagcactgtgggccagggttcagacacatacatctacatcttcagggtgtgccgggaagctggcaaccacacttctggggcaggcctggtgcaaatcaacaaaagtaatgggaaggagacagtggtagggagactcaacgagactcacatcttcaacggaagtaattggatcatgctgatctataaagggggtgatgaatatgacaaccactgtggcaaggagcagcgtcgtgcagtggtgatgatctcctgcaatcgacacaccctagcggacaattttaaccctgtgtctgaggagcgtggcaaagtccaagattgtttctacctctttgagatggatagcagcctggcctgttcaccagagatctcccacctcagtgtgggttccatcttacttgtcacgtttgcatcactggttgctgtttatgttgttggggggttcctataccagcgactggtagtgggagccaaaggaatggagcagtttccccacttagccttctggcaggatcttggcaacctggtagcagatggctgtgactttgtctgccgttctaaacctcgaaatgtgcctgcagcatatcgtggtgtgggggatgaccagctgggggaggagtcagaagaaagggatgaccatttattaccaatgtagattgcactttatatgtccagcctcttcctcagtcccccaaaccaaagctacacagccagatttctcaagcagtctcaactccagtccctcatctcacccttactattgctcttgctttccagtttgcttttgatttgcatcttctcactagtaaaactgccttccctttgttccttattttctgttttttctctagagaggtacagttgtaagtcagagttaatataatagggcctgtgaaaacagaggcttttgcattgtctcttgacatcagaagttacaataggcatatgggcaaaatggtgtagcaggctcactggccgtttgttttttaaacacattttcacaagtttttgagacactggatttctttaattaaaaaaaaaatgccaagaaacattatttatacagggttgattgctttcatgttgttattctgtaccctatagtagcctccatgagaatctggtatttcttgctgcttggaactactttgcagtgattacttggttgcagtccaagtactctcgtttagtctgagcctggagatgttctagacttgcttctcccacctctgagattaggacaggaaaaatgtgaaatttcccaattacaggattatacggtaccatcacatcatttgtggaaattggggtgactgtatagctgggattgggctaaggactgtggtcttatctgtccacatacagccaaaatgcctatccagaaatccagttcgttggaaaggaaaattggtactcctgtgccacaggggttccagaaaagggaagtcactttaccttgcggtggtgggatcctgatgtctttcatccatttgtagtaaaagctggtaaagcttttcttactcctggttccctaccagtatttctaaacatgtcgcactttctccacaggcatgtggttttgacctttttttcaatcttctagaaagggaacggaagcagaagtgggacatcgagggctctgctgtcctctgcgctgggtgtggaatgctgctgcacctgtcccttctgctggctcagggaagtgtcttcttgcccacatttctgtggggaaaggtttttaatcctctgatgcttccatcttcctgtttaggccatgtgcccagaaacctggactgatctttctttaatagtgaacccctgggccactgaagagtaacatggctccactggacacaaaagagggatggaatcaacaggcagggggccttttataagccttaggaaaagaaaatgaaactatttcatctttggacttttcaatactattggagtgatttttttctttctaaacagggaaaataatgttacaaaagcatcttttttgttatttgtttgcatccctcccccacaccctggtgttttaaaatgaagaaaaaaaaccatcaccttttgtacaaaaactcttaatgattaaaaaacaaacaaaacatattggccttgtcatttgtgtgaaagtgggcaaagactggaatagagtaagacaactgaaaccaattttcatccttttactgaggaaaaaaatatttaatatttttgttatataaggaatagtgcctaaggcaggtacttatactcctgacctcagccccacacactctggttttataaagctataggacagagcagagatggaactgaaaaacagggtagaaaataacataaattggaggggaacagtgggatgcagaaagaatgacaacagccacatgtgccccagtcaaatacttttagtccctgcagcagaagatgccaaccaagtctctatactggctggggatcctgccatggatgcaggagaaaaaattcaatcacaagggagtaagtgacaacaaaaagaaaaaactctgagccacagctacactgggaggggggaggaccagattttgctacttctgtcacacaagctagaaaaaccctacctctcccattgggcaggcaacctgacattccacccagttccttgccttaccatactatgtattcctcctcttggagaattaagacctgggctaaatgctccactccaggataaggctgagcagtcctagttctctagactgcctcttttataaagattggattaaggtacgtgaaatggtgagaactgtaaagattttaaaaaataaagtagaacccagagaaaatgtcaaagctgccgccatgtagcaccagcaaccaattcttgcacttctcttccctgtctcagtaatcccctacagaaggttacatgattggaacaactctttcttccctgcaaagtctgctggtaccaggttataacctggacagtggagagtgtctgccttaggctggtttgtgcaagagggccaccttaggtctccttgaggacatttatcttggcgcagatcttgagggcagggcccagcttgatgttcatggcactcataagatgttcttctttaagtaataaaagggcctgtccatcaatctcctgtgagcgaaattcctctgcaatctcttggca

SEQ ID NO: 376234 - DNA, 3403 bp, Homo sapiens
cggaacagcgtccctctcaggcggcgaacgggctagggaagcgcccggaggagacctagcgtgagaactacaactcccgcggagcccgagggcgagctgcctgcgtaacttccgcttccgccacctgcccctctcaccctcttcactcgaaccctacccgggagcggtcaggcgcgtgaccccgcgtgaccggggtgcgcgagccgagaggccctggaagcgggactctgggaccccattgaaagaaaggcaaccagaaaaggcgaaacgacaacctcgatagtgattggagctgatggaacgagggcggagctaaagtcccagaatactggccaatcagagtttaagattatcagggagcccgggaaggggaaaggggcgaaatggttctatggtcacatgccgcggggtctggtgggaggagcggttgcccagcggcctcttggcgcttcctgtttccggttcccagagtggggcacagcgaggcgctagggggaacgctggcctctgaaactagctctgggaccggggtctgcggccggcccctagctggccccgtctcccatccccagaagggtattcactggggattctgagctttggctactccagtttcccacgacacgatgttccctttctacagctgctggaggactggactgctactactactcctggctgtggcagtgagagaatcctggcagacagaagaaaaaacttgcgacttggtaggagaaaagggtaaagagtcagagaaagagttggctctagtgaagaggctgaaaccactgtttaataaaagctttgagagcactgtgggccagggttcagacacatacatctacatcttcagggtgtgccgggaagctggcaaccacacttctggggcaggcctggtgcaaatcaacaaaagtaatgggaaggagacagtggtagggagactcaacgagactcacatcttcaacggaagtaattggatcatgctgatctataaagggggtgatgaatatgacaaccactgtggcaaggagcagcgtcgtgcagtggtgatgatctcctgcaatcgacacaccctagcggacaattttaaccctgtgtctgaggagcgtggcaaagtccaagattgtttctacctctttgagatggatagcagcctggcctgttcaccagagatctcccacctcagtgtgggttccatcttacttgtcacgtttgcatcactggttgctgtttatgttgttggggggttcctataccagcgactggtagtgggagccaaaggaatggagcagtttccccacttagccttctggcaggatcttggcaacctggtagcagatggctgtgactttgtctgccgttctaaacctcgaaatgtgcctgcagcatatcgtggtgtgggggatgaccagctgggggaggagtcagaagaaagggatgaccatttattaccaatgtagattgcactttatatgtccagcctcttcctcagtcccccaaaccaaagctacacagccagatttctcaagcagtctcaactccagtccctcatctcacccttactattgctcttgctttccagtttgcttttgatttgcatcttctcactagtaaaactgccttccctttgttccttattttctgttttttctctagagaggtacagttgtaagtcagagttaatataatagggcctgtgaaaacagaggcttttgcattgtctcttgacatcagaagttacaataggcatatgggcaaaatggtgtagcaggctcactggccgtttgttttttaaacacattttcacaagtttttgagacactggatttctttaattaaaaaaaaaatgccaagaaacattatttatacagggttgattgctttcatgttgttattctgtaccctatagtagcctccatgagaatctggtatttcttgctgcttggaactactttgcagtgattacttggttgcagtccaagtactctcgtttagtctgagcctggagatgttctagacttgcttctcccacctctgagattaggacaggaaaaatgtgaaatttcccaattacaggattatacggtaccatcacatcatttgtggaaattggggtgactgtatagctgggattgggctaaggactgtggtcttatctgtccacatacagccaaaatgcctatccagaaatccagttcgttggaaaggaaaattggtactcctgtgccacaggggttccagaaaagggaagtcactttaccttgcggtggtgggatcctgatgtctttcatccatttgtagtaaaagctggtaaagcttttcttactcctggttccctaccagtatttctaaacatgtcgcactttctccacaggcatgtggttttgacctttttttcaatcttctagaaagggaacggaagcagaagtgggacatcgagggctctgctgtcctctgcgctgggtgtggaatgctgctgcacctgtcccttctgctggctcagggaagtgtcttcttgcccacatttctgtggggaaaggtttttaatcctctgatgcttccatcttcctgtttaggccatgtgcccagaaacctggactgatctttctttaatagtgaacccctgggccactgaagagtaacatggctccactggacacaaaagagggatggaatcaacaggcagggggccttttataagccttaggaaaagaaaatgaaactatttcatctttggacttttcaatactattggagtgatttttttctttctaaacagggaaaataatgttacaaaagcatcttttttgttatttgtttgcatccctcccccacaccctggtgttttaaaatgaagaaaaaaaaccatcaccttttgtacaaaaactcttaatgattaaaaaacaaacaaaacataaaaaaaaaaaaaaaaaaaaaaaaaaaaaaaaaaaaaaaaaaaaaaaaaaaaaaaaaaaaaaaaaaaaaaaaaaaaaaaaaaaaaaggggggggggcccaaaaaagacaccccaagaggggagccaacaacaattaggacccacccgagtttctgtgtaagacagcgggggacccacatagggggcggactattaaaagaccagcagaacgaggagccgcgtcaaaaaaaaacagcaaagagagggaaaaaaaagcagaagagggggaacatactagggggagaggacaccaccaacataagcgggggagggagcaacaaaaatgggggaagcaaaacaaccccccccaacaaaagaattaagaagccccacagagggaaaaaaaaaaaaccgaggagagataacgggggcagaccacaaccgaaaaatgttgagcggcaaagaaaatgagacacaacaagataatatagagaggaacataccccag

SEQ ID NO: 376235 - DNA, 3562 bp, Homo sapiens
aaagaaagaaagaaagaaagaaagaaagaaagaaagaaagaaagaaagaaaagaaagaaaagtggggcacagcgaggcgctagggggaacgctggcctctgaaactagctctgggaccggggtctgcggccggcccctagctggccccgtctcccatccccagaagggtattcactggggattctgagctttggctactccagtttcccacgacacgatgttccctttctacagctgctggaggactggactgctactactactcctggctgtggcagtgagagaatcctggcagacagaagaaaaaacttgcgacttggtaggagaaaagggtaaagagtcagagaaagagttggctctagtgaagaggctgaaaccactgtttaataaaagctttgagagcactgtgggccagggttcagacacatacatctacatcttcagggtgtgccgggaagctggcaaccacacttctggggcaggcctggtgcaaatcaacaaaagtaatgggaaggagacagtggtagggagactcaacgagactcacatcttcaacggaagtaattggatcatgctgatctataaagggggtgatgaatatgacaaccactgtggcaaggagcagcgtcgtgcagtggtgatgatctcctgcaatcgacacaccctagcggacaattttaaccctgtgtctgaggagcgtggcaaagtccaagattgtttctacctctttgagatggatagcagcctggcctgttcaccagagatctcccacctcagtgtgggttccatcttacttgtcacgtttgcatcactggttgctgtttatgttgttggggggttcctataccagcgactggtagtgggagccaaaggaatggagcagtttccccacttagccttctggcaggatcttggcaacctggtagcagatggctgtgactttgtctgccgttctaaacctcgaaatgtgcctgcagcatatcgtggtgtgggggatgaccagctgggggaggagtcagaagaaagggatgaccatttattaccaatgtagattgcactttatatgtccagcctcttcctcagtcccccaaaccaaagctacacagccagatttctcaagcagtctcaactccagtccctcatctcacccttactattgctcttgctttccagtttgcttttgatttgcatcttctcactagtaaaactgccttccctttgttccttattttctgttttttctctagagaggtacagttgtaagtcagagttaatataatagggcctgtgaaaacagaggcttttgcattgtctcttgacatcagaagttacaataggcatatgggcaaaatggtgtagcaggctcactggccgtttgttttttaaacacattttcacaagtttttgagacactggatttctttaattaaaaaaaaaatgccaagaaacattatttatacagggttgattgctttcatgttgttattctgtaccctatagtagcctccatgagaatctggtatttcttgctgcttggaactactttgcagtgattacttggttgcagtccaagtactctcgtttagtctgagcctggagatgttctagacttgcttctcccacctctgagattaggacaggaaaaatgtgaaatttcccaattacaggattatacggtaccatcacatcatttgtggaaattggggtgactgtatagctgggattgggctaaggactgtggtcttatctgtccacatacagccaaaatgcctatccagaaatccagttcgttggaaaggaaaattggtactcctgtgccacaggggttccagaaaagggaagtcactttaccttgcggtggtgggatcctgatgtctttcatccatttgtagtaaaagctggtaaagcttttcttactcctggttccctaccagtatttctaaacatgtcgcactttctccacaggcatgtggttttgacctttttttcaatcttctagaaagggaacggaagcagaagtgggacatcgagggctctgctgtcctctgcgctgggtgtggaatgctgctgcacctgtcccttctgctggctcagggaagtgtcttcttgcccacatttctgtggggaaaggtttttaatcctctgatgcttccatcttcctgtttaggccatgtgcccagaaacctggactgatctttctttaatagtgaacccctgggccactgaagagtaacatggctccactggacacaaaagagggatggaatcaacaggcagggggccttttataagccttaggaaaagaaaatgaaactatttcatctttggacttttcaatactattggagtgatttttttctttctaaacagggaaaataatgttacaaaagcatcttttttgttatttgtttgcatccctcccccacaccctggtgttttaaaatgaagaaaaaaaaccatcaccttttgtacaaaaactcttaatgattaaaaaacaaacaaaacatattggccttgtcatttgtgtgaaagtgggcaaagactggaatagagtaagacaactgaaaccaattttcatccttttactgaggaaaaaaatatttaatatttttgttatataaggaatagtgcctaaggcaggtacttatactcctgacctcagccccacacactctggttttataaagctataggacagagcagagatggaactgaaaaacagggtagaaaataacataaattggaggggaacagtgggatgcagaaagaatgacaacagccacatgtgccccagtcaaatacttttagtccctgcagcagaagatgccaaccaagtctctatactggctggggatcctgccatggatgcaggagaaaaaattcaatcacaagggagtaagtgacaacaaaaagaaaaaactctgagccacagctacactgggaggggggaggaccagattttgctacttctgtcacacaagctagaaaaaccctacctctcccattgggcaggcaacctgacattccacccagttccttgccttaccatactatgtattcctcctcttggagaattaagacctgggctaaatgctccactccaggataaggctgagcagtcctagttctctagactgcctcttttataaagattggattaaggtacgtgaaatggtgagaactgtaaagattttaaaaaataaagtagaacccagagaaaatgtcaaagctgccgccatgtagcaccagcaaccaattcttgcacttctcttccctgtctcagtaatcccctacagaaggttacatgattggaacaactctttcttccctgcaaagtctgctggtaccaggttataacctggacagtggagagtgtctgccttaggctggtttgtgcaagagggccaccttaggtctccttgaggacatttatcttggcgcagatcttgagggcagggcccagcttgatgttcatggcactcataagatgttcttctttaagtaataaaagggcctgtccatcaatctcctgtgagcgaaattcctctgcaatctcttggca

SEQ ID NO: 376236 - DNA, 3953 bp, Homo sapiens
cggaacagcgtccctctcaggcggcgaacgggctagggaagcgcccggaggagacctagcgtgagaactacaactcccgcggagcccgagggcgagctgcctgcgtaacttccgcttccgccacctgcccctctcaccctcttcactcgaaccctacccgggagcggtcaggcgcgtgaccccgcgtgaccggggtgcgcgagccgagaggccctggaagcgggactctgggaccccattgaaagaaaggcaaccagaaaaggcgaaacgacaacctcgatagtgattggagctgatggaacgagggcggagctaaagtcccagaatactggccaatcagagtttaagattatcagggagcccgggaaggggaaaggggcgaaatggttctatggtcacatgccgcggggtctggtgggaggagcggttgcccagcggcctcttggcgcttcctgtttccggttcccagagtggggcacagcgaggcgctagggggaacgctggcctctgaaactagctctgggaccggggtctgcggccggcccctagctggccccgtctcccatccccagaagggtattcactggggattctgagctttggctactccagtttcccacgacacctgctggaggactggactgctactactactcctggctgtggcagtgagagaatcctggcagacagaagaaaaaacttgcgacttggtaggagaaaagggtaaagagtcagagaaagagttggctctagtgaagaggctgaaaccactgtttaataaaagctttgagagcactgtgggccagggttcagacacatacatctacatcttcagggtgtgccgggaagctggcaaccacacttctggggcaggcctggtgcaaatcaacaaaagtaatgggaaggagacagtggtagggagactcaacgagactcacatcttcaacggaagtaattggatcatgctgatctataaagggggtgatgaatatgacaaccactgtggcaaggagcagcgtcgtgcagtggtgatgatctcctgcaatcgacacaccctagcggacaattttaaccctgtgtctgaggagcgtggcaaagtccaagattgtttctacctctttgagatggatagcagcctggcctgttcaccagagatctcccacctcagtgtgggttccatcttacttgtcacgtttgcatcactggttgctgtttatgttgttggggggttcctataccagcgactggtagtgggagccaaaggaatggagcagtttccccacttagccttctggcaggatcttggcaacctggtagcagatggctgtgactttgtctgccgttctaaacctcgaaatgtgcctgcagcatatcgtggtgtgggggatgaccagctgggggaggagtcagaagaaagggatgaccatttattaccaatgtagattgcactttatatgtccagcctcttcctcagtcccccaaaccaaagctacacagccagatttctcaagcagtctcaactccagtccctcatctcacccttactattgctcttgctttccagtttgcttttgatttgcatcttctcactagtaaaactgccttccctttgttccttattttctgttttttctctagagaggtacagttgtaagtcagagttaatataatagggcctgtgaaaacagaggcttttgcattgtctcttgacatcagaagttacaataggcatatgggcaaaatggtgtagcaggctcactggccgtttgttttttaaacacattttcacaagtttttgagacactggatttctttaattaaaaaaaaaatgccaagaaacattatttatacagggttgattgctttcatgttgttattctgtaccctatagtagcctccatgagaatctggtatttcttgctgcttggaactactttgcagtgattacttggttgcagtccaagtactctcgtttagtctgagcctggagatgttctagacttgcttctcccacctctgagattaggacaggaaaaatgtgaaatttcccaattacaggattatacggtaccatcacatcatttgtggaaattggggtgactgtatagctgggattgggctaaggactgtggtcttatctgtccacatacagccaaaatgcctatccagaaatccagttcgttggaaaggaaaattggtactcctgtgccacaggggttccagaaaagggaagtcactttaccttgcggtggtgggatcctgatgtctttcatccatttgtagtaaaagctggtaaagcttttcttactcctggttccctaccagtatttctaaacatgtcgcactttctccacaggcatgtggttttgacctttttttcaatcttctagaaagggaacggaagcagaagtgggacatcgagggctctgctgtcctctgcgctgggtgtggaatgctgctgcacctgtcccttctgctggctcagggaagtgtcttcttgcccacatttctgtggggaaaggtttttaatcctctgatgcttccatcttcctgtttaggccatgtgcccagaaacctggactgatctttctttaatagtgaacccctgggccactgaagagtaacatggctccactggacacaaaagagggatggaatcaacaggcagggggccttttataagccttaggaaaagaaaatgaaactatttcatctttggacttttcaatactattggagtgatttttttctttctaaacagggaaaataatgttacaaaagcatcttttttgttatttgtttgcatccctcccccacaccctggtgttttaaaatgaagaaaaaaaaccatcaccttttgtacaaaaactcttaatgattaaaaaacaaacaaaacatattggccttgtcatttgtgtgaaagtgggcaaagactggaatagagtaagacaactgaaaccaattttcatccttttactgaggaaaaaaatatttaatatttttgttatataaggaatagtgcctaaggcaggtacttatactcctgacctcagccccacacactctggttttataaagctataggacagagcagagatggaactgaaaaacagggtagaaaataacataaattggaggggaacagtgggatgcagaaagaatgacaacagccacatgtgccccagtcaaatacttttagtccctgcagcagaagatgccaaccaagtctctatactggctggggatcctgccatggatgcaggagaaaaaattcaatcacaagggagtaagtgacaacaaaaagaaaaaactctgagccacagctacactgggaggggggaggaccagattttgctacttctgtcacacaagctagaaaaaccctacctctcccattgggcaggcaacctgacattccacccagttccttgccttaccatactatgtattcctcctcttggagaattaagacctgggctaaatgctccactccaggataaggctgagcagtcctagttctctagactgcctcttttataaagattggattaaggtacgtgaaatggtgagaactgtaaagattttaaaaaataaagtagaacccagagaaaatgtcaaagctgccgccatgtagcaccagcaaccaattcttgcacttctcttccctgtctcagtaatcccctacagaaggttacatgattggaacaactctttcttccctgcaaagtctgctggtaccaggttataacctggacagtggagagtgtctgccttaggctggtttgtgcaagagggccaccttaggtctccttgaggacatttatcttggcgcagatcttgagggcagggcccagcttgatgttcatggcactcataagatgttcttctttaagtaataaaagggcctgtccatcaatctcctgtgagcgaaattcctctgcaatctcttggca

SEQ ID NO: 376237 - DNA, 3911 bp, Homo sapiens
cggaacagcgtccctctcaggcggcgaacgggctagggaagcgcccggaggagacctagcgtgagaactacaactcccgcggagcccgagggcgagctgcctgcgtaacttccgcttccgccacctgcccctctcaccctcttcactcgaaccctacccgggagcggtcaggcgcgtgaccccgcgtgaccggggtgcgcgagccgagaggccctggaagcgggactctgggaccccattgaaagaaaggcaaccagaaaaggcgaaacgacaacctcgatagtgattggagctgatggaacgagggcggagctaaagtcccagaatactggccaatcagagtttaagattatcagggagcccgggaaggggaaaggggcgaaatggttctatggtcacatgccgcggggtctggtgggaggagcggttgcccagcggcctcttggcgcttcctgtttccggttcccagagtggggcacagcgaggcgctagggggaacgctggcctctgaaactagctctgggaccggggtctgcggccggcccctagctggccccgtctcccatccccagaagggtattcactggggattctgagctttggctatactactcctggctgtggcagtgagagaatcctggcagacagaagaaaaaacttgcgacttggtaggagaaaagggtaaagagtcagagaaagagttggctctagtgaagaggctgaaaccactgtttaataaaagctttgagagcactgtgggccagggttcagacacatacatctacatcttcagggtgtgccgggaagctggcaaccacacttctggggcaggcctggtgcaaatcaacaaaagtaatgggaaggagacagtggtagggagactcaacgagactcacatcttcaacggaagtaattggatcatgctgatctataaagggggtgatgaatatgacaaccactgtggcaaggagcagcgtcgtgcagtggtgatgatctcctgcaatcgacacaccctagcggacaattttaaccctgtgtctgaggagcgtggcaaagtccaagattgtttctacctctttgagatggatagcagcctggcctgttcaccagagatctcccacctcagtgtgggttccatcttacttgtcacgtttgcatcactggttgctgtttatgttgttggggggttcctataccagcgactggtagtgggagccaaaggaatggagcagtttccccacttagccttctggcaggatcttggcaacctggtagcagatggctgtgactttgtctgccgttctaaacctcgaaatgtgcctgcagcatatcgtggtgtgggggatgaccagctgggggaggagtcagaagaaagggatgaccatttattaccaatgtagattgcactttatatgtccagcctcttcctcagtcccccaaaccaaagctacacagccagatttctcaagcagtctcaactccagtccctcatctcacccttactattgctcttgctttccagtttgcttttgatttgcatcttctcactagtaaaactgccttccctttgttccttattttctgttttttctctagagaggtacagttgtaagtcagagttaatataatagggcctgtgaaaacagaggcttttgcattgtctcttgacatcagaagttacaataggcatatgggcaaaatggtgtagcaggctcactggccgtttgttttttaaacacattttcacaagtttttgagacactggatttctttaattaaaaaaaaaatgccaagaaacattatttatacagggttgattgctttcatgttgttattctgtaccctatagtagcctccatgagaatctggtatttcttgctgcttggaactactttgcagtgattacttggttgcagtccaagtactctcgtttagtctgagcctggagatgttctagacttgcttctcccacctctgagattaggacaggaaaaatgtgaaatttcccaattacaggattatacggtaccatcacatcatttgtggaaattggggtgactgtatagctgggattgggctaaggactgtggtcttatctgtccacatacagccaaaatgcctatccagaaatccagttcgttggaaaggaaaattggtactcctgtgccacaggggttccagaaaagggaagtcactttaccttgcggtggtgggatcctgatgtctttcatccatttgtagtaaaagctggtaaagcttttcttactcctggttccctaccagtatttctaaacatgtcgcactttctccacaggcatgtggttttgacctttttttcaatcttctagaaagggaacggaagcagaagtgggacatcgagggctctgctgtcctctgcgctgggtgtggaatgctgctgcacctgtcccttctgctggctcagggaagtgtcttcttgcccacatttctgtggggaaaggtttttaatcctctgatgcttccatcttcctgtttaggccatgtgcccagaaacctggactgatctttctttaatagtgaacccctgggccactgaagagtaacatggctccactggacacaaaagagggatggaatcaacaggcagggggccttttataagccttaggaaaagaaaatgaaactatttcatctttggacttttcaatactattggagtgatttttttctttctaaacagggaaaataatgttacaaaagcatcttttttgttatttgtttgcatccctcccccacaccctggtgttttaaaatgaagaaaaaaaaccatcaccttttgtacaaaaactcttaatgattaaaaaacaaacaaaacatattggccttgtcatttgtgtgaaagtgggcaaagactggaatagagtaagacaactgaaaccaattttcatccttttactgaggaaaaaaatatttaatatttttgttatataaggaatagtgcctaaggcaggtacttatactcctgacctcagccccacacactctggttttataaagctataggacagagcagagatggaactgaaaaacagggtagaaaataacataaattggaggggaacagtgggatgcagaaagaatgacaacagccacatgtgccccagtcaaatacttttagtccctgcagcagaagatgccaaccaagtctctatactggctggggatcctgccatggatgcaggagaaaaaattcaatcacaagggagtaagtgacaacaaaaagaaaaaactctgagccacagctacactgggaggggggaggaccagattttgctacttctgtcacacaagctagaaaaaccctacctctcccattgggcaggcaacctgacattccacccagttccttgccttaccatactatgtattcctcctcttggagaattaagacctgggctaaatgctccactccaggataaggctgagcagtcctagttctctagactgcctcttttataaagattggattaaggtacgtgaaatggtgagaactgtaaagattttaaaaaataaagtagaacccagagaaaatgtcaaagctgccgccatgtagcaccagcaaccaattcttgcacttctcttccctgtctcagtaatcccctacagaaggttacatgattggaacaactctttcttccctgcaaagtctgctggtaccaggttataacctggacagtggagagtgtctgccttaggctggtttgtgcaagagggccaccttaggtctccttgaggacatttatcttggcgcagatcttgagggcagggcccagcttgatgttcatggcactcataagatgttcttctttaagtaataaaagggcctgtccatcaatctcctgtgagcgaaattcctctgcaatctcttggca

SEQ ID NO: 376238 - DNA, 3230 bp, Homo sapiens
ggtactctaaggatccggtattgagtggcatgtgaagaggctgaaaccactgtttaataaactttgagagcactgtgggccagggttcagacacatacatctacatcttcagggtgtgccgggaagctggcaaccacacttctggggcaggcctggtgcaaatcaacaaaagtaatgggaaggagacagtggtagggagactcaacgagactcacatcttcaacggaagtaattggatcatgctgatctataaagggggtgatgaatatgacaaccactgtggcaaggagcagcgtcgtgcagtggtgatgatctcctgcaatcgacacaccctagcggacaattttaaccctgtgtctgaggagcgtggcaaagtccaagattgtttctacctctttgagatggatagcagcctggcctgttcaccagagatctcccacctcagtgtgggttccatcttacttgtcacgtttgcatcactggttgctgtttatgttgttggggggttcctataccagcgactggtagtgggagccaaaggaatggagcagtttccccacttagccttctggcaggatcttggcaacctggtagcagatggctgtgactttgtctgccgttctaaacctcgaaatgtgcctgcagcatatcgtggtgtgggggatgaccagctgggggaggagtcagaagaaagggatgaccatttattaccaatgtagattgcactttatatgtccagcctcttcctcagtcccccaaaccaaagctacacagccagatttctcaagcagtctcaactccagtccctcatctcacccttactattgctcttgctttccagtttgcttttgatttgcatcttctcactagtaaaactgccttccctttgttccttattttctgttttttctctagagaggtacagttgtaagtcagagttaatataatagggcctgtgaaaacagaggcttttgcattgtctcttgacatcagaagttacaataggcatatgggcaaaatggtgtagcaggctcactggccgtttgttttttaaacacattttcacaagtttttgagacactggatttctttaattaaaaaaaaaatgccaagaaacattatttatacagggttgattgctttcatgttgttattctgtaccctatagtagcctccatgagaatctggtatttcttgctgcttggaactactttgcagtgattacttggttgcagtccaagtactctcgtttagtctgagcctggagatgttctagacttgcttctcccacctctgagattaggacaggaaaaatgtgaaatttcccaattacaggattatacggtaccatcacatcatttgtggaaattggggtgactgtatagctgggattgggctaaggactgtggtcttatctgtccacatacagccaaaatgcctatccagaaatccagttcgttggaaaggaaaattggtactcctgtgccacaggggttccagaaaagggaagtcactttaccttgcggtggtgggatcctgatgtctttcatccatttgtagtaaaagctggtaaagcttttcttactcctggttccctaccagtatttctaaacatgtcgcactttctccacaggcatgtggttttgacctttttttcaatcttctagaaagggaacggaagcagaagtgggacatcgagggctctgctgtcctctgcgctgggtgtggaatgctgctgcacctgtcccttctgctggctcagggaagtgtcttcttgcccacatttctgtggggaaaggtttttaatcctctgatgcttccatcttcctgtttaggccatgtgcccagaaacctggactgatctttctttaatagtgaacccctgggccactgaagagtaacatggctccactggacacaaaagagggatggaatcaacaggcagggggccttttataagccttaggaaaagaaaatgaaactatttcatctttggacttttcaatactattggagtgatttttttctttctaaacagggaaaataatgttacaaaagcatcttttttgttatttgtttgcatccctcccccacaccctggtgttttaaaatgaagaaaaaaaaccatcaccttttgtacaaaaactcttaatgattaaaaaacaaacaaaacatattggccttgtcatttgtgtgaaagtgggcaaagactggaatagagtaagacaactgaaaccaattttcatccttttactgaggaaaaaaatatttaatatttttgttatataaggaatagtgcctaaggcaggtacttatactcctgacctcagccccacacactctggttttataaagctataggacagagcagagatggaactgaaaaacagggtagaaaataacataaattggaggggaacagtgggatgcagaaagaatgacaacagccacatgtgccccagtcaaatacttttagtccctgcagcagaagatgccaaccaagtctctatactggctggggatcctgccatggatgcaggagaaaaaattcaatcacaagggagtaagtgacaacaaaaagaaaaaactctgagccacagctacactgggaggggggaggaccagattttgctacttctgtcacacaagctagaaaaaccctacctctcccattgggcaggcaacctgacattccacccagttccttgccttaccatactatgtattcctcctcttggagaattaagacctgggctaaatgctccactccaggataaggctgagcagtcctagttctctagactgcctcttttataaagattggattaaggtacgtgaaatggtgagaactgtaaagattttaaaaaataaagtagaacccagagaaaatgtcaaagctgccgccatgtagcaccagcaaccaattcttgcacttctcttccctgtctcagtaatcccctacagaaggttacatgattggaacaactctttcttccctgcaaagtctgctggtaccaggttataacctggacagtggagagtgtctgccttaggctggtttgtgcaagagggccaccttaggtctccttgaggacatttatcttggcgcagatcttgagggcagggcccagcttgatgttcatggcactcataagatgttcttctttaagtaataaaagggcctgtccatcaatctcctgtgagcgaaattcctctgcaatctcttggca

SEQ ID NO: 376239 - DNA, 3728 bp, Homo sapiens
cggaacagcgtccctctcaggcggcgaacgggctagggaagcgcccggaggagacctagcgtgagaactacaactcccgcggagcccgagggcgagctgcctgcgtaacttccgcttccgccacctgcccctctcaccctcttcactcgaaccctacccgggagcggtcaggcgcgtgaccccgcgtgaccggggtgcgcgagccgagaggccctggaagcgggactctgggaccccattgaaagaaaggcaaccagaaaaggcgaaacgacaacctcgatagtgattggagctgatggaacgagggcggagctaaagtcccagaatactggccaatcagagtttaagattatcagggagcccgggaaggggaaaggggcgaaatggttctatggtcacatgccgcggggtctggtgggaggagcggttgcccagcggcctcttggcgcttcctgtttccggttcccagagtggggcacagcgaggcgctagggggaacgctggcctctgaaactagctctgggaccggggtctgcggccggcccctagctggccccgtctcccatccccagaagggtattcactggggattctgagctttggctactccagtttcccacgacacgatgttccctttctacagctgctggaggactggactgctactactactcctggctgtggcagtgagagaatcctggcagacagaagaaaaaacttgcgactgtaattggatcatgctgatctataaagggggtgatgaatatgacaaccactgtggcaaggagcagcgtcgtgcagtggtgatgatctcctgcaatcgacacaccctagcggacaattttaaccctgtgtctgaggagcgtggcaaagtccaagattgtttctacctctttgagatggatagcagcctggcctgttcaccagagatctcccacctcagtgtgggttccatcttacttgtcacgtttgcatcactggttgctgtttatgttgttggggggttcctataccagcgactggtagtgggagccaaaggaatggagcagtttccccacttagccttctggcaggatcttggcaacctggtagcagatggctgtgactttgtctgccgttctaaacctcgaaatgtgcctgcagcatatcgtggtgtgggggatgaccagctgggggaggagtcagaagaaagggatgaccatttattaccaatgtagattgcactttatatgtccagcctcttcctcagtcccccaaaccaaagctacacagccagatttctcaagcagtctcaactccagtccctcatctcacccttactattgctcttgctttccagtttgcttttgatttgcatcttctcactagtaaaactgccttccctttgttccttattttctgttttttctctagagaggtacagttgtaagtcagagttaatataatagggcctgtgaaaacagaggcttttgcattgtctcttgacatcagaagttacaataggcatatgggcaaaatggtgtagcaggctcactggccgtttgttttttaaacacattttcacaagtttttgagacactggatttctttaattaaaaaaaaaatgccaagaaacattatttatacagggttgattgctttcatgttgttattctgtaccctatagtagcctccatgagaatctggtatttcttgctgcttggaactactttgcagtgattacttggttgcagtccaagtactctcgtttagtctgagcctggagatgttctagacttgcttctcccacctctgagattaggacaggaaaaatgtgaaatttcccaattacaggattatacggtaccatcacatcatttgtggaaattggggtgactgtatagctgggattgggctaaggactgtggtcttatctgtccacatacagccaaaatgcctatccagaaatccagttcgttggaaaggaaaattggtactcctgtgccacaggggttccagaaaagggaagtcactttaccttgcggtggtgggatcctgatgtctttcatccatttgtagtaaaagctggtaaagcttttcttactcctggttccctaccagtatttctaaacatgtcgcactttctccacaggcatgtggttttgacctttttttcaatcttctagaaagggaacggaagcagaagtgggacatcgagggctctgctgtcctctgcgctgggtgtggaatgctgctgcacctgtcccttctgctggctcagggaagtgtcttcttgcccacatttctgtggggaaaggtttttaatcctctgatgcttccatcttcctgtttaggccatgtgcccagaaacctggactgatctttctttaatagtgaacccctgggccactgaagagtaacatggctccactggacacaaaagagggatggaatcaacaggcagggggccttttataagccttaggaaaagaaaatgaaactatttcatctttggacttttcaatactattggagtgatttttttctttctaaacagggaaaataatgttacaaaagcatcttttttgttatttgtttgcatccctcccccacaccctggtgttttaaaatgaagaaaaaaaaccatcaccttttgtacaaaaactcttaatgattaaaaaacaaacaaaacatattggccttgtcatttgtgtgaaagtgggcaaagactggaatagagtaagacaactgaaaccaattttcatccttttactgaggaaaaaaatatttaatatttttgttatataaggaatagtgcctaaggcaggtacttatactcctgacctcagccccacacactctggttttataaagctataggacagagcagagatggaactgaaaaacagggtagaaaataacataaattggaggggaacagtgggatgcagaaagaatgacaacagccacatgtgccccagtcaaatacttttagtccctgcagcagaagatgccaaccaagtctctatactggctggggatcctgccatggatgcaggagaaaaaattcaatcacaagggagtaagtgacaacaaaaagaaaaaactctgagccacagctacactgggaggggggaggaccagattttgctacttctgtcacacaagctagaaaaaccctacctctcccattgggcaggcaacctgacattccacccagttccttgccttaccatactatgtattcctcctcttggagaattaagacctgggctaaatgctccactccaggataaggctgagcagtcctagttctctagactgcctcttttataaagattggattaaggtacgtgaaatggtgagaactgtaaagattttaaaaaataaagtagaacccagagaaaatgtcaaagctgccgccatgtagcaccagcaaccaattcttgcacttctcttccctgtctcagtaatcccctacagaaggttacatgattggaacaactctttcttccctgcaaagtctgctggtaccaggttataacctggacagtggagagtgtctgccttaggctggtttgtgcaagagggccaccttaggtctccttgaggacatttatcttggcgcagatcttgagggcagggcccagcttgatgttcatggcactcataagatgttcttctttaagtaataaaagggcctgtccatcaatctcctgtgagcgaaattcctctgcaatctcttggca

SEQ ID NO: 376240 - DNA, 3813 bp, Homo sapiens
cggaacagcgtccctctcaggcggcgaacgggctagggaagcgcccggaggagacctagcgtgagaactacaactcccgcggagcccgagggcgagctgcctgcgtaacttccgcttccgccacctgcccctctcaccctcttcactcgaaccctacccgggagcggtcaggcgcgtgaccccgcgtgaccggggtgcgcgagccgagaggccctggaagcgggactctgggaccccattgaaagaaaggcaaccagaaaaggcgaaacgacaacctcgatagtgattggagctgatggaacgagggcggagctaaagtcccagaatactggccaatcagagtttaagattatcagggagcccgggaaggggaaaggggcgaaatggttctatggtcacatgccgcggggtctggtgggaggagcggttgcccagcggcctcttggcgcttcctgtttccggttcccagagtggggcacagcgaggcgctagggggaacgctggcctctgaaactagctctgggaccggggtctgcggccggcccctagctggccccgtctcccatccccagaagggtattcactggggattctgagctttggctactccagtttcccacgacacgatgttccctttctacagctgctggaggactggactgctactactactcctggctgtggcagtgagagaatcctggcagacagaagaaaaaacttgcgacttggtaggagaaaagggtaaagagtcagagaaagagttggctctagtgaagaggctgaaaccactgtttaataaaagctttgagagcactgtgggccagggttcagacacatacatctacatcttcagggtgtgccgggaagctggcaaccacacttctggggcaggcctggtgcaaatcaacaaaagtaatgggaaggagacagtggtagggagactcaacgagactcacatcttcaacggaagtaattggatcatgctgatctataaagggggtgatgaatatgacaaccactgtggcaaggagcagcgtcgtgcagtggtgatgatctcctgcaatcgacacaccctagcggacaattttaaccctgtgtctgaggagcgtggcaaagtccaagattgtttctacctctttgagatggatagcagcctggcctgttcaccagagatctcccacctcagtgtgggttccatcttacttgtcacgtttgcatcactggttgctgtttatgttgttggggggttcctataccagcgactggtagtgggagccaaaggaatggagcagtttccccacttagccttctggcaggatcttggcaacctggtagcagatggctgtgactttgtctgccgttctaaacctcgaaatgtgcctgcagcatatcgtggtgtgggggatgaccagctgggggaggagtcagaagaaagggatgaccatttattaccaatgtagattgcactttatatgtccagcctcttcctcagtcccccaaaccaaagctacacagccagatttctcaagcagtctcaactccagtccctcatctcacccttactattgctcttgctttccagtttgcttttgatttgcatcttctcactagtaaaactgccttccctttgttccttattttctgttttttctctagagaggtacagttgtaagtcagagttaatataatagggcctgtgaaaacagaggcttttgcattgtctcttgacatcagaagttacaataggcatatgggcaaaatggtgtagcaggctcactggccgtttgttttttaaacacattttcacaagtttttgagacactggatttctttaattaaaaaaaaaatgccaagaaacattatttatacagggttgattgctttcatgttgttattctgtaccctatagtagcctccatgagaatctggtatttcttgctgcttggaactactttgcagtgattacttggttgcagtccaagtactctcgtttagtctgagcctggagatgttctagacttgcttctcccacctctgagattaggacaggaaaaatgtgaaatttcccaattacaggattatacggtaccatcacatcatttgtggaaattggggtgactgtatagctgggattgggctaaggactgtggtcttatctgtccacatacagccaaaatgcctatccagaaatccagttcgttggaaaggaaaattggtactcctgtgccacaggggttccagaaaagggaagtcactttaccttgcggtggtgggatcctgatgtctttcatccatttgtagtaaaagctggtaaagcttttcttactcctggttccctaccagtatttctaaacatgtcgcactttctccacaggcatgtggttttgacctttttttcaatcttctcttcctgtttaggccatgtgcccagaaacctggactgatctttctttaatagtgaacccctgggccactgaagagtaacatggctccactggacacaaaagagggatggaatcaacaggcagggggccttttataagccttaggaaaagaaaatgaaactatttcatctttggacttttcaatactattggagtgatttttttctttctaaacagggaaaataatgttacaaaagcatcttttttgttatttgtttgcatccctcccccacaccctggtgttttaaaatgaagaaaaaaaaccatcaccttttgtacaaaaactcttaatgattaaaaaacaaacaaaacatattggccttgtcatttgtgtgaaagtgggcaaagactggaatagagtaagacaactgaaaccaattttcatccttttactgaggaaaaaaatatttaatatttttgttatataaggaatagtgcctaaggcaggtacttatactcctgacctcagccccacacactctggttttataaagctataggacagagcagagatggaactgaaaaacagggtagaaaataacataaattggaggggaacagtgggatgcagaaagaatgacaacagccacatgtgccccagtcaaatacttttagtccctgcagcagaagatgccaaccaagtctctatactggctggggatcctgccatggatgcaggagaaaaaattcaatcacaagggagtaagtgacaacaaaaagaaaaaactctgagccacagctacactgggaggggggaggaccagattttgctacttctgtcacacaagctagaaaaaccctacctctcccattgggcaggcaacctgacattccacccagttccttgccttaccatactatgtattcctcctcttggagaattaagacctgggctaaatgctccactccaggataaggctgagcagtcctagttctctagactgcctcttttataaagattggattaaggtacgtgaaatggtgagaactgtaaagattttaaaaaataaagtagaacccagagaaaatgtcaaagctgccgccatgtagcaccagcaaccaattcttgcacttctcttccctgtctcagtaatcccctacagaaggttacatgattggaacaactctttcttccctgcaaagtctgctggtaccaggttataacctggacagtggagagtgtctgccttaggctggtttgtgcaagagggccaccttaggtctccttgaggacatttatcttggcgcagatcttgagggcagggcccagcttgatgttcatggcactcataagatgttcttctttaagtaataaaagggcctgtccatcaatctcctgtgagcgaaattcctctgcaatctcttggca

SEQ ID NO: 376241 - DNA, 3159 bp, Homo sapiens
agtttttgaaaaatgagatttaatgtttagttgccggtatagatttgcatttggaggtgcttttttcccctactgcaggactaggcaatttttatattatttcattagattatgagaacttctagagaaatggaatcatatacttaatggtgattattcttggccatagaatcacacgctgtcacattttgtctgggcctttgcttctcttggactgacagcactctaactggttttctaagagttaccagccccctttttcatttagtatcactactcatttttccttttcagggaatgtatcttaggaaacagctgacaataaatgcagaggttatcctatctgagtttttactatttcccagttcttaagtatagatgtctttctctctctacaggtttgcatcactggttgctgtttatgttgttggggggttcctataccagcgactggtagtgggagccaaaggaatggagcagtttccccacttagccttctggcaggatcttggcaacctggtagcagatggctgtgactttgtctgccgttctaaacctcgaaatgtgcctgcagcatatcgtggtgtgggggatgaccagctgggggaggagtcagaagaaagggatgaccatttattaccaatgtagattgcactttatatgtccagcctcttcctcagtcccccaaaccaaagctacacagccagatttctcaagcagtctcaactccagtccctcatctcacccttactattgctcttgctttccagtttgcttttgatttgcatcttctcactagtaaaactgccttccctttgttccttattttctgttttttctctagagaggtacagttgtaagtcagagttaatataatagggcctgtgaaaacagaggcttttgcattgtctcttgacatcagaagttacaataggcatatgggcaaaatggtgtagcaggctcactggccgtttgttttttaaacacattttcacaagtttttgagacactggatttctttaattaaaaaaaaaatgccaagaaacattatttatacagggttgattgctttcatgttgttattctgtaccctatagtagcctccatgagaatctggtatttcttgctgcttggaactactttgcagtgattacttggttgcagtccaagtactctcgtttagtctgagcctggagatgttctagacttgcttctcccacctctgagattaggacaggaaaaatgtgaaatttcccaattacaggattatacggtaccatcacatcatttgtggaaattggggtgactgtatagctgggattgggctaaggactgtggtcttatctgtccacatacagccaaaatgcctatccagaaatccagttcgttggaaaggaaaattggtactcctgtgccacaggggttccagaaaagggaagtcactttaccttgcggtggtgggatcctgatgtctttcatccatttgtagtaaaagctggtaaagcttttcttactcctggttccctaccagtatttctaaacatgtcgcactttctccacaggcatgtggttttgacctttttttcaatcttctagaaagggaacggaagcagaagtgggacatcgagggctctgctgtcctctgcgctgggtgtggaatgctgctgcacctgtcccttctgctggctcagggaagtgtcttcttgcccacatttctgtggggaaaggtttttaatcctctgatgcttccatcttcctgtttaggccatgtgcccagaaacctggactgatctttctttaatagtgaacccctgggccactgaagagtaacatggctccactggacacaaaagagggatggaatcaacaggcagggggccttttataagccttaggaaaagaaaatgaaactatttcatctttggacttttcaatactattggagtgatttttttctttctaaacagggaaaataatgttacaaaagcatcttttttgttatttgtttgcatccctcccccacaccctggtgttttaaaatgaagaaaaaaaaccatcaccttttgtacaaaaactcttaatgattaaaaaacaaacaaaacatattggccttgtcatttgtgtgaaagtgggcaaagactggaatagagtaagacaactgaaaccaattttcatccttttactgaggaaaaaaatatttaatatttttgttatataaggaatagtgcctaaggcaggtacttatactcctgacctcagccccacacactctggttttataaagctataggacagagcagagatggaactgaaaaacagggtagaaaataacataaattggaggggaacagtgggatgcagaaagaatgacaacagccacatgtgccccagtcaaatacttttagtccctgcagcagaagatgccaaccaagtctctatactggctggggatcctgccatggatgcaggagaaaaaattcaatcacaagggagtaagtgacaacaaaaagaaaaaactctgagccacagctacactgggaggggggaggaccagattttgctacttctgtcacacaagctagaaaaaccctacctctcccattgggcaggcaacctgacattccacccagttccttgccttaccatactatgtattcctcctcttggagaattaagacctgggctaaatgctccactccaggataaggctgagcagtcctagttctctagactgcctcttttataaagattggattaaggtacgtgaaatggtgagaactgtaaagattttaaaaaataaagtagaacccagagaaaatgtcaaagctgccgccatgtagcaccagcaaccaattcttgcacttctcttccctgtctcagtaatcccctacagaaggttacatgattggaacaactctttcttccctgcaaagtctgctggtaccaggttataacctggacagtggagagtgtctgccttaggctggtttgtgcaagagggccaccttaggtctccttgaggacatttatcttggcgcagatcttgagggcagggcccagcttgatgttcatggcactcataagatgttcttctttaagtaataaaagggcctgtccatcaatctcctgtgagcgaaattcctctgcaatctcttggca

SEQ ID NO: 376242 - DNA, 3634 bp, Homo sapiens
agtttttgaaaaatgagatttaatgtttagttgccggtatagatttgcatttggaggtgcttttttcccctactgcaggactaggcaatttttatattatttcattagattatgagaacttctagagaaatggaatcatatacttaatggtgattattcttggccatagaatcacacgctgtcacattttgtctgggcctttgcttctcttggactgacagcactctaactggttttctaagagttaccagccccctttttcatttagtatcactactcatttttccttttcagggaatgtatcttaggaaacagctgacaataaatgcagaggttatcctatctgagtttttactatttcccagttcttaagtatagatgtctttctctctctacaggtttgcatcactggttgctgtttatgttgttggggggttcctataccagcgactggtagtgggagccaaaggaatggagcagtttccccacttagccttctggcaggatcttggcaacctggtagcaagtaagtaacagggcagctggttgaatttgtagcctgcaaacaaggttgggtgaccaaccatcctcgtttgttcacactgagggggttcctgggacacaggacattgagtgctaaaaccacaaaagtcccagcaaacaagacagttgccctagtacagagtagtaagtggcacagcatccatttctggccttggtaagacattgctgaaagagcaacactgttgaccagatgggctcttctaaatctgatttagcttttaagagggcctgggtgggaagaaggtgaggcctaataagaagaaactttttctcctgttgccccaaattgaatttaggctgattgtcagatcttttaggtttctcattatccctatagaaaaccaattcttgccacattcctagaccataagtacactttctcatatcctaaagttagatgctgcgaattatttccttcttttttttccccctacaggatggctgtgactttgtctgccgttctaaacctcgaaatgtgcctgcagcatatcgtggtgtgggggatgaccagctgggggaggagtcagaagaaagggatgaccatttattaccaatgtagattgcactttatatgtccagcctcttcctcagtcccccaaaccaaagctacacagccagatttctcaagcagtctcaactccagtccctcatctcacccttactattgctcttgctttccagtttgcttttgatttgcatcttctcactagtaaaactgccttccctttgttccttattttctgttttttctctagagaggtacagttgtaagtcagagttaatataatagggcctgtgaaaacagaggcttttgcattgtctcttgacatcagaagttacaataggcatatgggcaaaatggtgtagcaggctcactggccgtttgttttttaaacacattttcacaagtttttgagacactggatttctttaattaaaaaaaaaatgccaagaaacattatttatacagggttgattgctttcatgttgttattctgtaccctatagtagcctccatgagaatctggtatttcttgctgcttggaactactttgcagtgattacttggttgcagtccaagtactctcgtttagtctgagcctggagatgttctagacttgcttctcccacctctgagattaggacaggaaaaatgtgaaatttcccaattacaggattatacggtaccatcacatcatttgtggaaattggggtgactgtatagctgggattgggctaaggactgtggtcttatctgtccacatacagccaaaatgcctatccagaaatccagttcgttggaaaggaaaattggtactcctgtgccacaggggttccagaaaagggaagtcactttaccttgcggtggtgggatcctgatgtctttcatccatttgtagtaaaagctggtaaagcttttcttactcctggttccctaccagtatttctaaacatgtcgcactttctccacaggcatgtggttttgacctttttttcaatcttctagaaagggaacggaagcagaagtgggacatcgagggctctgctgtcctctgcgctgggtgtggaatgctgctgcacctgtcccttctgctggctcagggaagtgtcttcttgcccacatttctgtggggaaaggtttttaatcctctgatgcttccatcttcctgtttaggccatgtgcccagaaacctggactgatctttctttaatagtgaacccctgggccactgaagagtaacatggctccactggacacaaaagagggatggaatcaacaggcagggggccttttataagccttaggaaaagaaaatgaaactatttcatctttggacttttcaatactattggagtgatttttttctttctaaacagggaaaataatgttacaaaagcatcttttttgttatttgtttgcatccctcccccacaccctggtgttttaaaatgaagaaaaaaaaccatcaccttttgtacaaaaactcttaatgattaaaaaacaaacaaaacatattggccttgtcatttgtgtgaaagtgggcaaagactggaatagagtaagacaactgaaaccaattttcatccttttactgaggaaaaaaatatttaatatttttgttatataaggaatagtgcctaaggcaggtacttatactcctgacctcagccccacacactctggttttataaagctataggacagagcagagatggaactgaaaaacagggtagaaaataacataaattggaggggaacagtgggatgcagaaagaatgacaacagccacatgtgccccagtcaaatacttttagtccctgcagcagaagatgccaaccaagtctctatactggctggggatcctgccatggatgcaggagaaaaaattcaatcacaagggagtaagtgacaacaaaaagaaaaaactctgagccacagctacactgggaggggggaggaccagattttgctacttctgtcacacaagctagaaaaaccctacctctcccattgggcaggcaacctgacattccacccagttccttgccttaccatactatgtattcctcctcttggagaattaagacctgggctaaatgctccactccaggataaggctgagcagtcctagttctctagactgcctcttttataaagattggattaaggtacgtgaaatggtgagaactgtaaagattttaaaaaataaagtagaacccagagaaaatgtcaaagctgccgccatgtagcaccagcaaccaattcttgcacttctcttccctgtctcagtaatcccctacagaaggttacatgattggaacaactctttcttccctgcaaagtctgctggtaccaggttataacctggacagtggagagtgtctgccttaggctggtttgtgcaagagggccaccttaggtctccttgaggacatttatcttggcgcagatcttgagggcagggcccagcttgatgttcatggcactcataagatgttcttctttaagtaataaaagggcctgtccatcaatctcctgtgagcgaaattcctctgcaatctcttggca

SEQ ID NO: 376243 - DNA, 2662 bp, Homo sapiens
ggacgcgtgggtcgacccacgcgtccgagatggctgtgactttgtctgccgttctaaacctcgaaatgtgcctgcagcatatcgtggtgtgggggatgaccagctgggggaggagtcagaagaaagggatgaccatttattaccaatgtagattgcactttatatgtccagcctcttcctcagtcccccaaaccaaagctacacagccagatttctcaagcagtctcaactccagtccctcatctcacccttactattgctcttgctttccagtttgcttttgatttgcatcttctcactagtaaaactgccttccctttgttccttattttctgttttttctctagagaggtacagttgtaagtcagagttaatataatagggcctgtgaaaacagaggcttttgcattgtctcttgacatcagaagttacaataggcatatgggcaaaatggtgtagcaggctcactggccgtttgttttttaaacacattttcacaagtttttgagacactggatttctttaattaaaaaaaaaatgccaagaaacattatttatacagggttgattgctttcatgttgttattctgtaccctatagtagcctccatgagaatctggtatttcttgctgcttggaactactttgcagtgattacttggttgcagtccaagtactctcgtttagtctgagcctggagatgttctagacttgcttctcccacctctgagattaggacaggaaaaatgtgaaatttcccaattacaggattatacggtaccatcacatcatttgtggaaattggggtgactgtatagctgggattgggctaaggactgtggtcttatctgtccacatacagccaaaatgcctatccagaaatccagttcgttggaaaggaaaattggtactcctgtgccacaggggttccagaaaagggaagtcactttaccttgcggtggtgggatcctgatgtctttcatccatttgtagtaaaagctggtaaagcttttcttactcctggttccctaccagtatttctaaacatgtcgcactttctccacaggcatgtggttttgacctttttttcaatcttctagaaagggaacggaagcagaagtgggacatcgagggctctgctgtcctctgcgctgggtgtggaatgctgctgcacctgtcccttctgctggctcagggaagtgtcttcttgcccacatttctgtggggaaaggtttttaatcctctgatgcttccatcttcctgtttaggccatgtgcccagaaacctggactgatctttctttaatagtgaacccctgggccactgaagagtaacatggctccactggacacaaaagagggatggaatcaacaggcagggggccttttataagccttaggaaaagaaaatgaaactatttcatctttggacttttcaatactattggagtgatttttttctttctaaacagggaaaataatgttacaaaagcatcttttttgttatttgtttgcatccctcccccacaccctggtgttttaaaatgaagaaaaaaaaccatcaccttttgtacaaaaactcttaatgattaaaaaacaaacaaaacatattggccttgtcatttgtgtgaaagtgggcaaagactggaatagagtaagacaactgaaaccaattttcatccttttactgaggaaaaaaatatttaatatttttgttatataaggaatagtgcctaaggcaggtacttatactcctgacctcagccccacacactctggttttataaagctataggacagagcagagatggaactgaaaaacagggtagaaaataacataaattggaggggaacagtgggatgcagaaagaatgacaacagccacatgtgccccagtcaaatacttttagtccctgcagcagaagatgccaaccaagtctctatactggctggggatcctgccatggatgcaggagaaaaaattcaatcacaagggagtaagtgacaacaaaaagaaaaaactctgagccacagctacactgggaggggggaggaccagattttgctacttctgtcacacaagctagaaaaaccctacctctcccattgggcaggcaacctgacattccacccagttccttgccttaccatactatgtattcctcctcttggagaattaagacctgggctaaatgctccactccaggataaggctgagcagtcctagttctctagactgcctcttttataaagattggattaaggtacgtgaaatggtgagaactgtaaagattttaaaaaataaagtagaacccagagaaaatgtcaaagctgccgccatgtagcaccagcaaccaattcttgcacttctcttccctgtctcagtaatcccctacagaaggttacatgattggaacaactctttcttccctgcaaagtctgctggtaccaggttataacctggacagtggagagtgtctgccttaggctggtttgtgcaagagggccaccttaggtctccttgaggacatttatcttggcgcagatcttgagggcagggcccagcttgatgttcatggcactcataagatgttcttctttaagtaataaaagggcctgtccatcaatctcctgtgagcgaaattcctctgcaatctcttggca

SEQ ID NO: 376244 - DNA, 2563 bp, Homo sapiens
gcttctcccacctctgagattaggacaggaaaaatgtgaaatttcccaattacaggattatacggtaccatcacatcatttgtggaaattggggtgactgtatagctgggattgggctaaggactgtggtcttatctgtccacatacagccaaaatgcctatccagaaatccagtttgcttttgatttgcatcttctcactagtaaaactgccttccctttgttccttattttctgttttttctctagagaggtacagttgtaagtcagagttaatataatagggcctgtgaaaacagaggcttttgcattgtctcttgacatcagaagttacaataggcatatgggcaaaatggtgtagcaggctcactggccgtttgttttttaaacacattttcacaagtttttgagacactggatttctttaattaaaaaaaaaatgccaagaaacattatttatacagggttgattgctttcatgttgttattctgtaccctatagtagcctccatgagaatctggtatttcttgctgcttggaactactttgcagtgattacttggttgcagtccaagtactctcgtttagtctgagcctggagatgttctagacttgcttctcccacctctgagattaggacaggaaaaatgtgaaatttcccaattacaggattatacggtaccatcacatcatttgtggaaattggggtgactgtatagctgggattgggctaaggactgtggtcttatctgtccacatacagccaaaatgcctatccagaaatccagttcgttggaaaggaaaattggtactcctgtgccacaggggttccagaaaagggaagtcactttaccttgcggtggtgggatcctgatgtctttcatccatttgtagtaaaagctggtaaagcttttcttactcctggttccctaccagtatttctaaacatgtcgcactttctccacaggcatgtggttttgacctttttttcaatcttctagaaagggaacggaagcagaagtgggacatcgagggctctgctgtcctctgcgctgggtgtggaatgctgctgcacctgtcccttctgctggctcagggaagtgtcttcttgcccacatttctgtggggaaaggtttttaatcctctgatgcttccatcttcctgtttaggccatgtgcccagaaacctggactgatctttctttaatagtgaacccctgggccactgaagagtaacatggctccactggacacaaaagagggatggaatcaacaggcagggggccttttataagccttaggaaaagaaaatgaaactatttcatctttggacttttcaatactattggagtgatttttttctttctaaacagggaaaataatgttacaaaagcatcttttttgttatttgtttgcatccctcccccacaccctggtgttttaaaatgaagaaaaaaaaccatcaccttttgtacaaaaactcttaatgattaaaaaacaaacaaaacatattggccttgtcatttgtgtgaaagtgggcaaagactggaatagagtaagacaactgaaaccaattttcatccttttactgaggaaaaaaatatttaatatttttgttatataaggaatagtgcctaaggcaggtacttatactcctgacctcagccccacacactctggttttataaagctataggacagagcagagatggaactgaaaaacagggtagaaaataacataaattggaggggaacagtgggatgcagaaagaatgacaacagccacatgtgccccagtcaaatacttttagtccctgcagcagaagatgccaaccaagtctctatactggctggggatcctgccatggatgcaggagaaaaaattcaatcacaagggagtaagtgacaacaaaaagaaaaaactctgagccacagctacactgggaggggggaggaccagattttgctacttctgtcacacaagctagaaaaaccctacctctcccattgggcaggcaacctgacattccacccagttccttgccttaccatactatgtattcctcctcttggagaattaagacctgggctaaatgctccactccaggataaggctgagcagtcctagttctctagactgcctcttttataaagattggattaaggtacgtgaaatggtgagaactgtaaagattttaaaaaataaagtagaacccagagaaaatgtcaaagctgccgccatgtagcaccagcaaccaattcttgcacttctcttccctgtctcagtaatcccctacagaaggttacatgattggaacaactctttcttccctgcaaagtctgctggtaccaggttataacctggacagtggagagtgtctgccttaggctggtttgtgcaagagggccaccttaggtctccttgaggacatttatcttggcgcagatcttgagggcagggcccagcttgatgttcatggcactcataagatgttcttctttaagtaataaaagggcctgtccatcaatctcctgtgagcgaaattcctctgcaatctcttggca

SEQ ID NO: 376245 - DNA, 2934 bp, Homo sapiens
cggaacagcgtccctctcaggcggcgaacgggctagggaagcgcccggaggagacctagcgtgagaactacaactcccgcggagcccgagggcgagctgcctgcgtaacttccgcttccgccacctgcccctctcaccctcttcactcgaaccctacccgggagcggtcaggcgcgtgaccccgcgtgaccggggtgcgcgagccgagaggccctggaagcgggactctgggaccccattgaaagaaaggcaaccagaaaaggcgaaacgacaacctcgatagtgattggagctgatggaacgagggcggagctaaagtcccagaatactggccaatcagagtttaagattatcagggagcccgggaaggggaaaggggcgaaatggttctatggtcacatgccgcggggtctggtgggaggagcggttgcccagcggcctcttggcgcttcctgtttccggttcccagagtggggcacagcgaggcgctagggggaacgctggcctctgaaactagctctgggaccggggtctgcggccggcccctagctggccccgtctcccatccccagaagggtattcactggggattctgagctttggctactccagtttcccacgacacgatgttccctttctacagctgctggaggactggactgctactactactcctggctgtggcagtgagagaatcctggcagacagaagaaaaaacttgcgacttggtaggagaaaagggtaaagagtcagagaaagagttggctctagtgaagaggctgaaaccactgtttaataaaagctttgagagcactgtgggccagggttcagacacatacatctacatcttcagggtgtgccgggaagctggcaaccacacttctggggcaggcctggtgcaaatcaacaaaagtaatgggaaggagacagtggtagggagactcaacgagactcacatcttcaacggaagtaattggatcatgctgatctataaagggggtgatgaatatgacaaccactgtggcaaggagcagcgtcgtgcagtggtgatgatctcctgcaatcgacacaccctagcggacaattttaaccctgtgtctgaggagcgtggcaaagtccaagattgtttctacctctttgagatggatagcagcctggcctgttcaccagagatctcccacctcagtgtgggttccatcttacttgtcacgtttgcatcactggttgctgtttatgttgttggggggttcctataccagcgactggtagtgggagccaaaggaatggagcagtttccccacttagccttctggcaggatcttggcaacctggtagcagcatgtggttttgacctttttttcaatcttctagaaagggaacggaagcagaagtgggacatcgagggctctgctgtcctctgcgctgggtgtggaatgctgctgcacctgtcccttctgctggctcagggaagtgtcttcttgcccacatttctgtggggaaaggtttttaatcctctgatgcttccatcttcctgtttaggccatgtgcccagaaacctggactgatctttctttaatagtgaacccctgggccactgaagagtaacatggctccactggacacaaaagagggatggaatcaacaggcagggggccttttataagccttaggaaaagaaaatgaaactatttcatctttggacttttcaatactattggagtgatttttttctttctaaacagggaaaataatgttacaaaagcatcttttttgttatttgtttgcatccctcccccacaccctggtgttttaaaatgaagaaaaaaaaccatcaccttttgtacaaaaactcttaatgattaaaaaacaaacaaaacatattggccttgtcatttgtgtgaaagtgggcaaagactggaatagagtaagacaactgaaaccaattttcatccttttactgaggaaaaaaatatttaatatttttgttatataaggaatagtgcctaaggcaggtacttatactcctgacctcagccccacacactctggttttataaagctataggacagagcagagatggaactgaaaaacagggtagaaaataacataaattggaggggaacagtgggatgcagaaagaatgacaacagccacatgtgccccagtcaaatacttttagtccctgcagcagaagatgccaaccaagtctctatactggctggggatcctgccatggatgcaggagaaaaaattcaatcacaagggagtaagtgacaacaaaaagaaaaaactctgagccacagctacactgggaggggggaggaccagattttgctacttctgtcacacaagctagaaaaaccctacctctcccattgggcaggcaacctgacattccacccagttccttgccttaccatactatgtattcctcctcttggagaattaagacctgggctaaatgctccactccaggataaggctgagcagtcctagttctctagactgcctcttttataaagattggattaaggtacgtgaaatggtgagaactgtaaagattttaaaaaataaagtagaacccagagaaaatgtcaaagctgccgccatgtagcaccagcaaccaattcttgcacttctcttccctgtctcagtaatcccctacagaaggttacatgattggaacaactctttcttccctgcaaagtctgctggtaccaggttataacctggacagtggagagtgtctgccttaggctggtttgtgcaagagggccaccttaggtctccttgaggacatttatcttggcgcagatcttgagggcagggcccagcttgatgttcatggcactcataagatgttcttctttaagtaataaaagggcctgtccatcaatctcctgtgagcgaaattcctctgcaatctcttggca

SEQ ID NO: 376246 - DNA, 2293 bp, Homo sapiens
cggaacagcgtccctctcaggcggcgaacgggctagggaagcgcccggaggagacctagcgtgagaactacaactcccgcggagcccgagggcgagctgcctgcgtaacttccgcttccgccacctgcccctctcaccctcttcactcgaaccctacccgggagcggtcaggcgcgtgaccccgcgtgaccggggtgcgcgagccgagaggccctggaagcgggactctgggaccccattgaaagaaaggcaaccagaaaaggcgaaacgacaacctcgatagtgattggagctgatggaacgagggcggagctaaagtcccagaatactggccaatcagagtttaagattatcagggagcccgggaaggggaaaggggcgaaatggttctatggtcacatgccgcggggtctggtgggaggagcggttgcccagcggcctcttggcgcttcctgtttccggttcccagagtggggcacagcgaggcgctagggggaacgctggcctctgaaactagctctgggaccggggtctgcggccggcccctagctggccccgtctcccatccccagaagggtattcactggggattctgagctttggctactccagtttcccacgacacgatgttccctttctacagctgctggaggactggactgctactactactcctggctgtggcagtgagagaatcctggcagacagaagaaaaaacttgcgacttggtaggagaaaagggtaaagagtcagagaaagagttggctctagtgaagaggctgaaaccactgtttaataaaagctttgagagcactgtgggccagggttcagacacatacatctacatcttcagggtgtgccgggaagctggcaaccacacttctggggcaggcctggtgcaaatcaacaaaagtaatgggaaggagacagtggtagggagactcaacgagactcacatcttcaacggaagtaattggatcatgctgatctataaagggggtgatgaatatgacaaccactgtggcaaggagcagcgtcgtgcagtggtgatgatctcctgcaatcgacacaccctagcggacaattttaaccctgtgtctgaggagcgtggcaaagtccaagattgtttctacctctttgagatggatagcagcctggcctgttcaccagagatctcccacctcagtgtgggttccatcttacttgtcacgtttgcatcactggttgctgtttatgttgttggggggttcctataccagcgactggtagtgggagccaaaggaatggagcagtttccccacttagccttctggcaggatcttggcaacctggtagcagatggctgtgactttgtctgccgttctaaacctcgaaatgtgcctgcagcatatcgtggtgtgggggatgaccagctgggggaggagtcagaagaaagggatgaccatttattaccaatgtagattgcactttatatgtccagcctcttcctcagtcccccaaaccaaagctacacagccagatttctcaagcagtctcaactccagtccctcatctcacccttactattgctcttgctttccagtttgcttttgatttgcatcttctcactagtaaaactgccttccctttgttccttattttctgttttttctctagagaggtacagttgtaagtcagagttaatataatagggcctgtgaaaacagaggcttttgcattgtctcttgacatcagaagttacaataggcatatgggcaaaatggtgtagcaggctcactggccgtttgttttttaaacacattttcacaagtttttgagacactggatttctttaattaaaaaaaaaatgccaagaaacattatttatacagggttgattgctttcatgttgttattctgtaccctatagtagcctccatgagaatctggtatttcttgctgcttggaactactttgcagtgattacttggttgcagtccaagtactctcgtttagtctgagcctggagatgttctagacttgcttctcccacctctgagattaggacaggaaaaatgtgaaatttcccaattacaggattatacggtaccatcacatcatttgtggaaattggggtgactgtatagctgggattgggctaaggactgtggtcttatctgtccacatacagccaaaatgccatgtaattccggtgtaggtggagctgtattgggattccccaggtcacgttctccatgcccagctcttactgataaaggcccaggagatgttggagagagtgcttcatcataac

SEQ ID NO: 376247 - DNA, 2452 bp, Homo sapiens
cggaacagcgtccctctcaggcggcgaacgggctagggaagcgcccggaggagacctagcgtgagaactacaactcccgcggagcccgagggcgagctgcctgcgtaacttccgcttccgccacctgcccctctcaccctcttcactcgaaccctacccgggagcggtcaggcgcgtgaccccgcgtgaccggggtgcgcgagccgagaggccctggaagcgggactctgggaccccattgaaagaaaggcaaccagaaaaggcgaaacgacaacctcgatagtgattggagctgatggaacgagggcggagctaaagtcccagaatactggccaatcagagtttaagattatcagggagcccgggaaggggaaaggggcgaaatggttctatggtcacatgccgcggggtctggtgggaggagcggttgcccagcggcctcttggcgcttcctgtttccggttcccagagtggggcacagcgaggcgctagggggaacgctggcctctgaaactagctctgggaccggggtctgcggccggcccctagctggccccgtctcccatccccagaagggtattcactggggattctgagctttggctactccagtttcccacgacacgatgttccctttctacagctgctggaggactggactgctactactactcctggctgtggcagtgagagaatcctggcagacagaagaaaaaacttgcgacttggtaggagaaaagggtaaagagtcagagaaagagttggctctagtgaagaggctgaaaccactgtttaataaaagctttgagagcactgtgggccagggttcagacacatacatctacatcttcagggtgtgccgggaagctggcaaccacacttctggggcaggcctggtgcaaatcaacaaaagtaatgggaaggagacagtggtagggagactcaacgagactcacatcttcaacggaagtaattggatcatgctgatctataaagggggtgatgaatatgacaaccactgtggcaaggagcagcgtcgtgcagtggtgatgatctcctgcaatcgacacaccctagcggacaattttaaccctgtgtctgaggagcgtggcaaagtccaagattgtttctacctctttgagatggatagcagcctggcctgttcaccagagatctcccacctcagtgtgggttccatcttacttgtcacgtttgcatcactggttgctgtttatgttgttggggggttcctataccagcgactggtagtgggagccaaaggaatggagcagtttccccacttagccttctggcaggatcttggcaacctggtagcagatggctgtgactttgtctgccgttctaaacctcgaaatgtgcctgcagcatatcgtggtgtgggggatgaccagctgggggaggagtcagaagaaagggatgaccatttattaccaatgtagattgcactttatatgtccagcctcttcctcagtcccccaaaccaaagctacacagccagatttctcaagcagtctcaactccagtccctcatctcacccttactattgctcttgctttccagtttgcttttgatttgcatcttctcactagtaaaactgccttccctttgttccttattttctgttttttctctagagaggtacagttgtaagtcagagttaatataatagggcctgtgaaaacagaggcttttgcattgtctcttgacatcagaagttacaataggcatatgggcaaaatggtgtagcaggctcactggccgtttgttttttaaacacattttcacaagtttttgagacactggatttctttaattaaaaaaaaaatgccaagaaacattatttatacagggttgattgctttcatgttgttattctgtaccctatagtagcctccatgagaatctggtatttcttgctgcttggaactactttgcagtgattacttggttgcagtccaagtactctcgtttagtctgagcctggagatgttctagacttgcttctcccacctctgagattaggacaggaaaaatgtgaaatggtgagaactgtaaagattttaaaaaataaagtagaacccagagaaaatgtcaaagctgccgccatgtagcaccagcaaccaattcttgcacttctcttccctgtctcagtaatcccctacagaaggttacatgattggaacaactctttcttccctgcaaagtctgctggtaccaggttataacctggacagtggagagtgtctgccttaggctggtttgtgcaagagggccaccttaggtctccttgaggacatttatcttggcgcagatcttgagggcagggcccagcttgatgttcatggcactcataagatgttcttctttaagtaataaaagggcctgtccatcaatctcctgtgagcgaaattcctctgcaatctcttggca

SEQ ID NO: 376248 - DNA, 1912 bp, Homo sapiens
aggtgaatcgtacttatactggaccttcacgtcttcagtgttggtagtggtcatcgtttaactagcggtacttgactgagaactgctgtggtcttatctgtccacatacagccaaaatgcctatccagaaatccagttcgttggaaaggaaaattggtactcctgtgccacaggggttccagaaaagggaagtcactttaccttgcggtggtgggatcctgatgtctttcatccatttgtagtaaaagctggtaaagcttttcttactcctggttccctaccagtatttctaaacatgtcgcactttctccacaggcatgtggttttgacctttttttcaatcttctagaaagggaacggaagcagaagtgggacatcgagggctctgctgtcctctgcgctgggtgtggaatgctgctgcacctgtcccttctgctggctcagggaagtgtcttcttgcccacatttctgtggggaaaggtttttaatcctctgatgcttccatcttcctgtttaggccatgtgcccagaaacctggactgatctttctttaatagtgaacccctgggccactgaagagtaacatggctccactggacacaaaagagggatggaatcaacaggcagggggccttttataagccttaggaaaagaaaatgaaactatttcatctttggacttttcaatactattggagtgatttttttctttctaaacagggaaaataatgttacaaaagcatcttttttgttatttgtttgcatccctcccccacaccctggtgttttaaaatgaagaaaaaaaaccatcaccttttgtacaaaaactcttaatgattaaaaaacaaacaaaacatattggccttgtcatttgtgtgaaagtgggcaaagactggaatagagtaagacaactgaaaccaattttcatccttttactgaggaaaaaaatatttaatatttttgttatataaggaatagtgcctaaggcaggtacttatactcctgacctcagccccacacactctggttttataaagctataggacagagcagagatggaactgaaaaacagggtagaaaataacataaattggaggggaacagtgggatgcagaaagaatgacaacagccacatgtgccccagtcaaatacttttagtccctgcagcagaagatgccaaccaagtctctatactggctggggatcctgccatggatgcaggagaaaaaattcaatcacaagggagtaagtgacaacaaaaagaaaaaactctgagccacagctacactgggaggggggaggaccagattttgctacttctgtcacacaagctagaaaaaccctacctctcccattgggcaggcaacctgacattccacccagttccttgccttaccatactatgtattcctcctcttggagaattaagacctgggctaaatgctccactccaggataaggctgagcagtcctagttctctagactgcctcttttataaagattggattaaggtacgtgaaatggtgagaactgtaaagattttaaaaaataaagtagaacccagagaaaatgtcaaagctgccgccatgtagcaccagcaaccaattcttgcacttctcttccctgtctcagtaatcccctacagaaggttacatgattggaacaactctttcttccctgcaaagtctgctggtaccaggttataacctggacagtggagagtgtctgccttaggctggtttgtgcaagagggccaccttaggtctccttgaggacatttatcttggcgcagatcttgagggcagggcccagcttgatgttcatggcactcataagatgttcttctttaagtaataaaagggcctgtccatcaatctcctgtgagcgaaattcctctgcaatctcttggca

SEQ ID NO: 376249 - DNA, 2045 bp, Homo sapiens
ggccaagaccttatttaacagggtgaacgcttcaaggtgtaatcgggcgccaaagagcccccataaatgcgggaattcgtgtggctactttgcagtgattacttggttgcagtccaagtactctcgtttagtctgagcctggagatgttctagacttgcttctcccacctctgagattaggacaggaaaaatgtgaaatttcccaattacaggattatacggtaccatcacatcatttgtggaaattggggtgactgtatagctgggattgggctaaggactgtggtcttatctgtccacatacagccaaaatgcctatccagaaatccagttcgttggaaaggaaaattggtactcctgtgccacaggggttccagaaaagggaagtcacttttcttactcctggttccctaccagtatttctaaacatgtcgcactttctccacaggcatgtggttttgacctttttttcaatcttctagaaagggaacggaagcagaagtgggacatcgagggctctgctgtcctctgcgctgggtgtggaatgctgctgcacctgtcccttctgctggctcagggaagtgtcttcttgcccacatttctgtggggaaaggtttttaatcctctgatgcttccatcttcctgtttaggccatgtgcccagaaacctggactgatctttctttaatagtgaacccctgggccactgaagagtaacatggctccactggacacaaaagagggatggaatcaacaggcagggggccttttataagccttaggaaaagaaaatgaaactatttcatctttggacttttcaatactattggagtgatttttttctttctaaacagggaaaataatgttacaaaagcatcttttttgttatttgtttgcatccctcccccacaccctggtgttttaaaatgaagaaaaaaaaccatcaccttttgtacaaaaactcttaatgattaaaaaacaaacaaaacatattggccttgtcatttgtgtgaaagtgggcaaagactggaatagagtaagacaactgaaaccaattttcatccttttactgaggaaaaaaatatttaatatttttgttatataaggaatagtgcctaaggcaggtacttatactcctgacctcagccccacacactctggttttataaagctataggacagagcagagatggaactgaaaaacagggtagaaaataacataaattggaggggaacagtgggatgcagaaagaatgacaacagccacatgtgccccagtcaaatacttttagtccctgcagcagaagatgccaaccaagtctctatactggctggggatcctgccatggatgcaggagaaaaaattcaatcacaagggagtaagtgacaacaaaaagaaaaaactctgagccacagctacactgggaggggggaggaccagattttgctacttctgtcacacaagctagaaaaaccctacctctcccattgggcaggcaacctgacattccacccagttccttgccttaccatactatgtattcctcctcttggagaattaagacctgggctaaatgctccactccaggataaggctgagcagtcctagttctctagactgcctcttttataaagattggattaaggtacgtgaaatggtgagaactgtaaagattttaaaaaataaagtagaacccagagaaaatgtcaaagctgccgccatgtagcaccagcaaccaattcttgcacttctcttccctgtctcagtaatcccctacagaaggttacatgattggaacaactctttcttccctgcaaagtctgctggtaccaggttataacctggacagtggagagtgtctgccttaggctggtttgtgcaagagggccaccttaggtctccttgaggacatttatcttggcgcagatcttgagggcagggcccagcttgatgttcatggcactcataagatgttcttctttaagtaataaaagggcctgtccatcaatctcctgtgagcgaaattcctctgcaatctcttggca

SEQ ID NO: 376250 - DNA, 1487 bp, Homo sapiens
  misc_feature (1374)..(1374): n is a, c, g, or t
  misc_feature (1404)..(1404): n is a, c, g, or t
cggaacagcgtccctctcaggcggcgaacgggctagggaagcgcccggaggagacctagcgtgagaactacaactcccgcggagcccgagggcgagctgcctgcgtaacttccgcttccgccacctgcccctctcaccctcttcactcgaaccctacccgggagcggtcaggcgcgtgaccccgcgtgaccggggtgcgcgagccgagaggccctggaagcgggactctgggaccccattgaaagaaaggcaaccagaaaaggcgaaacgacaacctcgatagtgattggagctgatggaacgagggcggagctaaagtcccagaatactggccaatcagagtttaagattatcagggagcccgggaaggggaaaggggcgaaatggttctatggtcacatgccgcggggtctggtgggaggagcggttgcccagcggcctcttggcgcttcctgtttccggttcccagagtggggcacagcgaggcgctagggggaacgctggcctctgaaactagctctgggaccggggtctgcggccggcccctagctggccccgtctcccatccccagaagggtattcactggggattctgagctttggctactccagtttcccacgacacgatgttccctttctacagctgctggaggactggactgctactactactcctggctgtggcagtgagagaatcctggcagacagaagaaaaaacttgcgacttggtaggagaaaagggtaaagagtcagagaaagagttggctctagtgaagaggctgaaaccactgtttaataaaagctttgagagcactgtgggccagggttcagacacatacatctacatcttcagggtgtgccgggaagctggcaaccacacttctggggcaggcctggtgcaaatcaacaaaagtaatgggaaggagacagtggtagggagactcaacgagactcacatcttcaacggaagtaattggatcatgctgatctataaagggggtgatgaatatgacaaccactgtggcaaggagcagcgtcgtgcagtggtgatgatctcctgcaatcgacacaccctagcggacaattttaaccctgtgtctgaggagcgtggcaaagtccaagattgtttctacctctttgagatggatagcagcctggcctgttcaccagagatctcccacctcagtgtgggttccatcttacttgtcacgtttgcatcactggttgctgtttatgttgttggggggttcctataccagcgactggtagtgggagccaaaggaatggagcagtttccccacttagccttctggcaggatcttggcaacctggtagcaccgatgggtggatttggttgcggtaacccaaatggcnggcattggcggggggggccccgggggggcnacggggccctttaccgagggtattggctccgccccccaacaggcgattggcaccgcaccactgggccgggacacaaagacgct

SEQ ID NO: 376251 - DNA, 2209 bp, Homo sapiens
cggaacagcgtccctctcaggcggcgaacgggctagggaagcgcccggaggagacctagcgtgagaactacaactcccgcggagcccgagggcgagctgcctgcgtaacttccgcttccgccacctgcccctctcaccctcttcactcgaaccctacccgggagcggtcaggcgcgtgaccccgcgtgaccggggtgcgcgagccgagaggccctggaagcgggactctgggaccccattgaaagaaaggcaaccagaaaaggcgaaacgacaacctcgatagtgattggagctgatggaacgagggcggagctaaagtcccagaatactggccaatcagagtttaagattatcagggagcccgggaaggggaaaggggcgaaatggttctatggtcacatgccgcggggtctggtgggaggagcggttgcccagcggcctcttggcgcttcctgtttccggttcccagagtggggcacagcgaggcgctagggggaacgctggcctctgaaactagctctgggaccggggtctgcggccggcccctagctggccccgtctcccatccccagaagggtattcactggggattctgagctttggctactccagtttcccacgacacgatgttccctttctacagctgctggaggactggactgctactactactcctggctgtggcagtgagagaatcctggcagacagaagaaaaaacttgcgacttggtaggagaaaagggtaaagagtcagagaaagagttggctctagtgaagaggctgaaaccactgtttaataaaagcttcctgtttaggccatgtgcccagaaacctggactgatctttctttaatagtgaacccctgggccactgaagagtaacatggctccactggacacaaaagagggatggaatcaacaggcagggggccttttataagccttaggaaaagaaaatgaaactatttcatctttggacttttcaatactattggagtgatttttttctttctaaacagggaaaataatgttacaaaagcatcttttttgttatttgtttgcatccctcccccacaccctggtgttttaaaatgaagaaaaaaaaccatcaccttttgtacaaaaactcttaatgattaaaaaacaaacaaaacatattggccttgtcatttgtgtgaaagtgggcaaagactggaatagagtaagacaactgaaaccaattttcatccttttactgaggaaaaaaatatttaatatttttgttatataaggaatagtgcctaaggcaggtacttatactcctgacctcagccccacacactctggttttataaagctataggacagagcagagatggaactgaaaaacagggtagaaaataacataaattggaggggaacagtgggatgcagaaagaatgacaacagccacatgtgccccagtcaaatacttttagtccctgcagcagaagatgccaaccaagtctctatactggctggggatcctgccatggatgcaggagaaaaaattcaatcacaagggagtaagtgacaacaaaaagaaaaaactctgagccacagctacactgggaggggggaggaccagattttgctacttctgtcacacaagctagaaaaaccctacctctcccattgggcaggcaacctgacattccacccagttccttgccttaccatactatgtattcctcctcttggagaattaagacctgggctaaatgctccactccaggataaggctgagcagtcctagttctctagactgcctcttttataaagattggattaaggtacgtgaaatggtgagaactgtaaagattttaaaaaataaagtagaacccagagaaaatgtcaaagctgccgccatgtagcaccagcaaccaattcttgcacttctcttccctgtctcagtaatcccctacagaaggttacatgattggaacaactctttcttccctgcaaagtctgctggtaccaggttataacctggacagtggagagtgtctgccttaggctggtttgtgcaagagggccaccttaggtctccttgaggacatttatcttggcgcagatcttgagggcagggcccagcttgatgttcatggcactcataagatgttcttctttaagtaataaaagggcctgtccatcaatctcctgtgagcgaaattcctctgcaatctcttggca

SEQ ID NO: 376252 - DNA, 2191 bp, Homo sapiens
cggaacagcgtccctctcaggcggcgaacgggctagggaagcgcccggaggagacctagcgtgagaactacaactcccgcggagcccgagggcgagctgcctgcgtaacttccgcttccgccacctgcccctctcaccctcttcactcgaaccctacccgggagcggtcaggcgcgtgaccccgcgtgaccggggtgcgcgagccgagaggccctggaagcgggactctgggaccccattgaaagaaaggcaaccagaaaaggcgaaacgacaacctcgatagtgattggagctgatggaacgagggcggagctaaagtcccagaatactggccaatcagagtttaagattatcagggagcccgggaaggggaaaggggcgaaatggttctatggtcacatgccgcggggtctggtgggaggagcggttgcccagcggcctcttggcgcttcctgtttccggttcccagagtggggcacagcgaggcgctagggggaacgctggcctctgaaactagctctgggaccggggtctgcggccggcccctagctggccccgtctcccatccccagaagggtattcactggggattctgagctttggctactccagtttcccacgacacctgctggaggactggactgctactactactcctggctgtggcagtgagagaatcctggcagacagaagaaaaaacttgcgacttggtaggagaaaagggtaaagagtcagagaaagagttggctctagtgaagaggctgaaaccactgtttaataaaagcttcctgtttaggccatgtgcccagaaacctggactgatctttctttaatagtgaacccctgggccactgaagagtaacatggctccactggacacaaaagagggatggaatcaacaggcagggggccttttataagccttaggaaaagaaaatgaaactatttcatctttggacttttcaatactattggagtgatttttttctttctaaacagggaaaataatgttacaaaagcatcttttttgttatttgtttgcatccctcccccacaccctggtgttttaaaatgaagaaaaaaaaccatcaccttttgtacaaaaactcttaatgattaaaaaacaaacaaaacatattggccttgtcatttgtgtgaaagtgggcaaagactggaatagagtaagacaactgaaaccaattttcatccttttactgaggaaaaaaatatttaatatttttgttatataaggaatagtgcctaaggcaggtacttatactcctgacctcagccccacacactctggttttataaagctataggacagagcagagatggaactgaaaaacagggtagaaaataacataaattggaggggaacagtgggatgcagaaagaatgacaacagccacatgtgccccagtcaaatacttttagtccctgcagcagaagatgccaaccaagtctctatactggctggggatcctgccatggatgcaggagaaaaaattcaatcacaagggagtaagtgacaacaaaaagaaaaaactctgagccacagctacactgggaggggggaggaccagattttgctacttctgtcacacaagctagaaaaaccctacctctcccattgggcaggcaacctgacattccacccagttccttgccttaccatactatgtattcctcctcttggagaattaagacctgggctaaatgctccactccaggataaggctgagcagtcctagttctctagactgcctcttttataaagattggattaaggtacgtgaaatggtgagaactgtaaagattttaaaaaataaagtagaacccagagaaaatgtcaaagctgccgccatgtagcaccagcaaccaattcttgcacttctcttccctgtctcagtaatcccctacagaaggttacatgattggaacaactctttcttccctgcaaagtctgctggtaccaggttataacctggacagtggagagtgtctgccttaggctggtttgtgcaagagggccaccttaggtctccttgaggacatttatcttggcgcagatcttgagggcagggcccagcttgatgttcatggcactcataagatgttcttctttaagtaataaaagggcctgtccatcaatctcctgtgagcgaaattcctctgcaatctcttggca

SEQ ID NO: 376253 - DNA, 1641 bp, Homo sapiens
  misc_feature (16)..(16): n is a, c, g, or t
  misc_feature (73)..(73): n is a, c, g, or t
  misc_feature (80)..(81): n is a, c, g, or t
  misc_feature (84)..(84): n is a, c, g, or t
  misc_feature (106)..(106): n is a, c, g, or t
  misc_feature (120)..(120): n is a, c, g, or t
  misc_feature (126)..(126): n is a, c, g, or t
  misc_feature (153)..(153): n is a, c, g, or t
  misc_feature (155)..(155): n is a, c, g, or t
  misc_feature (160)..(161): n is a, c, g, or t
  misc_feature (170)..(170): n is a, c, g, or t
  misc_feature (173)..(173): n is a, c, g, or t
  misc_feature (195)..(195): n is a, c, g, or t
  misc_feature (213)..(213): n is a, c, g, or t
  misc_feature (223)..(223): n is a, c, g, or t
  misc_feature (228)..(229): n is a, c, g, or t
  misc_feature (237)..(238): n is a, c, g, or t
  misc_feature (242)..(242): n is a, c, g, or t
  misc_feature (252)..(252): n is a, c, g, or t
  misc_feature (256)..(256): n is a, c, g, or t
  misc_feature (258)..(258): n is a, c, g, or t
  misc_feature (264)..(265): n is a, c, g, or t
  misc_feature (286)..(286): n is a, c, g, or t
  misc_feature (321)..(321): n is a, c, g, or t
  misc_feature (353)..(353): n is a, c, g, or t
  misc_feature (368)..(368): n is a, c, g, or t
  misc_feature (374)..(375): n is a, c, g, or t
  misc_feature (387)..(387): n is a, c, g, or t
  misc_feature (390)..(390): n is a, c, g, or t
  misc_feature (392)..(393): n is a, c, g, or t
ttaaggaaactacaangtcccgctttgtgcaattggggcgcattgctttttaattcggttatatagccaggtnctcactnnccnttccatgcaaatttttcgaagnatttggggtgattngggttntgatttattttccaaagttgatgcggntnggganngtatttggnatntccttttggggggtgggcgcanttgatattttcccttttnttacaggggntcttnnaggctgannggtnatcttggcanttgngntcccgnntacggtcggggtatctcctcnatccgggaatttggagttcatcttccgctttgtgncgattcgcgccactctttctttaatgccgctngctttttggttttcncatggnnattccaatcccnttnanntatttcatctttggacttttcaatactattggagtgatttttttctttctaaacagggaaaataatgttacaaaagcatcttttttgttatttgtttgcatccctcccccacaccctggtgttttaaaatgaagaaaaaaaaccatcaccttttgtacaaaaactcttaatgattaaaaaacaaacaaaacatattggccttgtcatttgtgtgaaagtgggcaaagactggaatagagtaagacaactgaaaccaattttcatccttttactgaggaaaaaaatatttaatatttttgttatataaggaatagtgcctaaggcaggtacttatactcctgacctcagccccacacactctggttttataaagctataggacagagcagagatggaactgaaaaacagggtagaaaataacataaattggaggggaacagtgggatgcagaaagaatgacaacagccacatgtgccccagtcaaatacttttagtccctgcagcagaagatgccaaccaagtctctatactggctggggatcctgccatggatgcaggagaaaaaattcaatcacaagggagtaagtgacaacaaaaagaaaaaactctgagccacagctacactgggaggggggaggaccagattttgctacttctgtcacacaagctagaaaaaccctacctctcccattgggcaggcaacctgacattccacccagttccttgccttaccatactatgtattcctcctcttggagaattaagacctgggctaaatgctccactccaggataaggctgagcagtcctagttctctagactgcctcttttataaagattggattaaggtacgtgaaatggtgagaactgtaaagattttaaaaaataaagtagaacccagagaaaatgtcaaagctgccgccatgtagcaccagcaaccaattcttgcacttctcttccctgtctcagtaatcccctacagaaggttacatgattggaacaactctttcttccctgcaaagtctgctggtaccaggttataacctggacagtggagagtgtctgccttaggctggtttgtgcaagagggccaccttaggtctccttgaggacatttatcttggcgcagatcttgagggcagggcccagcttgatgttcatggcactcataagatgttcttctttaagtaataaaagggcctgtccatcaatctcctgtgagcgaaattcctctgcaatctcttggca

SEQ ID NO: 376254 - DNA, 1143 bp, Homo sapiens
ggacgcgtgggtcgacccacgcgtccgagatggctgtgactttgtctgccgttctaaacctcgaaatgtgcctgcagcatatcgtggtgtgggggatgaccagctgggggaggagtcagaagaaagggatgaccatttattaccaatgtagattgcactttatatgtccagcctcttcctcagtcccccaaaccaaagctacacagccagatttctcaagcagtctcaactccagtccctcatctcacccttactattgctcttgctttccagtttgcttttgatttgcatcttctcactagtaaaactgccttccctttgttccttattttctgttttttctctagagaggtacagttgtaagtcagagttaatataatagggcctgtgaaaacagaggcttttgcattgtctcttgacatcagaagttacaataggcatatgggcaaaatggtgtagcaggctcactggccgtttgttttttaaacacattttcacaagtttttgagacactggatttctttaattaaaaaaaaaatgccaagaaacattatttatacagggttgattgctttcatgttgttattctgtaccctatagtagcctccatgagaatctggtatttcttgctgcttggaactactttgcagtgattacttggttgcagtccaagtactctcgtttagtctgagcctggagatgttctagacttgcttctcccacctctgagattaggacaggaaaaatgtgaaatggtgagaactgtaaagattttaaaaaataaagtagaacccagagaaaatgtcaaagctgccgccatgtagcaccagcaaccaattcttgcacttctcttccctgtctcagtaatcccctacagaaggttacatgattggaacaactctttcttccctgcaaagtctgctggtaccaggttataacctggacagtggagagtgtctgccttaggctggtttgtgcaagagggccaccttaggtctccttgaggacatttatcttggcgcagatcttgagggcagggcccagcttgatgttcatggcactcataagatgttcttctttaagtaataaaagggcctgtccatcaatctcctgtgagcgaaattcctctgcaatctcttggca

SEQ ID NO: 376255 - DNA, 3478 bp, Homo sapiens
cggaacagcgtccctctcaggcggcgaacgggctagggaagcgcccggaggagacctagcgtgagaactacaactcccgcggagcccgagggcgagctgcctgcgtaacttccgcttccgccacctgcccctctcaccctcttcactcgaaccctacccgggagcggtcaggcgcgtgaccccgcgtgaccggggtgcgcgagccgagaggccctggaagcgggactctgggaccccattgaaagaaaggcaaccagaaaaggcgaaacgacaacctcgatagtgattggagctgatggaacgagggcggagctaaagtcccagaatactggccaatcagagtttaagattatcagggagcccgggaaggggaaaggggcgaaatggttctatggtcacatgccgcggggtctggtgggaggagcggttgcccagcggcctcttggcgcttcctgtttccggttcccagagtggggcacagcgaggcgctagggggaacgctggcctctgaaactagctctgggaccggggtctgcggccggcccctagctggccccgtctcccatccccagaagggtattcactggggattctgagctttggctactccagtttcccacgacacgatgttccctttctacagctgctggaggactggactgctactactactcctggctgtggcagtgagagaatcctggcagacagaagaaaaaacttgcgacttggtaggagaaaagggtaaagagtcagagaaagagttggctctagtgaagaggctgaaaccactgtttaataaaagctttgagagcactgtgggccagggttcagacacatacatctacatcttcagggtgtgccgggaagctggcaaccacacttctggggcaggcctggtgcaaatcaacaaaagtaatgggaaggagacagtggtagggagactcaacgagactcacatcttcaacggaagtaattggatcatgctgatctataaagggggtgatgaatatgacaaccactgtggcaaggagcagcgtcgtgcagtggtgatgatctcctgcaatcgacacaccctagcggacaattttaaccctgtgtctgaggagcgtggcaaagtccaagattgtttctacctctttgagatggatagcagcctggcctgttcaccagagatctcccacctcagtgtgggttccatcttacttgtcacgtttgcatcactggttgctgtttatgttgttggggggttcctataccagcgactggtagtgggagccaaaggaatggagcagtttccccacttagccttctggcaggatcttggcaacctggtagcagatggctgtgactttgtctgccgttctaaacctcgaaatgtgcctgcagcatatcgtggtgtgggggatgaccagctgggggaggagtcagaagaaagggatgaccatttattaccaatgtagattgcactttatatgtccagcctcttcctcagtcccccaaaccaaagctacacagccagatttctcaagcagtctcaactccagtccctcatctcacccttactattgctcttgctttccagtttgcttttgatttgcatcttctcactagtaaaactgccttccctttgttccttattttctgttttttctctagagaggtacagttgtaagtcagagttaatataatagggcctgtgaaaacagaggcttttgcattgtctcttgacatcagaagttacaataggcatatgggcaaaatggtgtagcaggctcactggccgtttgttttttaaacacattttcacaagtttttgagacactggatttctttaattaaaaaaaaaatgccaagaaacattatttatacagggttgattgctttcatgttgttattctgtaccctatagtagcctccatgagaatctggtatttcttgctgcttggaactactttgcagtgattacttggttgcagtccaagtactctcgtttagtctgagcctggagatgttctagacttgcttctcccacctctgagattaggacaggaaaaatgtgaaatttcccaattacaggattatacggtaccatcacatcatttgtggaaattggggtgactgtatagctgggattgggctaaggactgtggtcttatctgtccacatacagccaaaatgcctatccagaaatccagttcgttggaaaggaaaattggtactcctgtgccacaggggttccagaaaagggaagtcactttaccttgcggtggtgggatcctgatgtctttcatccatttgtagtaaaagctggtaaagcttttcttactcctggttccctaccagtatttctaaacatgtcgcactttctccacaggcatgtggttttgacctttttttcaatcttctagaaagggaacggaagcagaagtgggacatcgagggctctgctgtcctctgcgctgggtgtggaatgctgctgcacctgtcccttctgctggctcagggaagtgtcttcttgcccacatttctgtggggaaaggtttttaatcctctgatgcttccatcttcctgtttaggccatgtgcccagaaacctggactgatctttctttaatagtgaacccctgggccactgaagagtaacatggctccactggacacaaaagagggatggaatcaacaggcagggggccttttataagccttaggaaaagaaaatgaaactatttcatctttggacttttcaatactattggagtgatttttttctttctaaacagggaaaataatgttacaaaagcatcttttttgttatttgtttgcatccctcccccacaccctggtgttttaaaatgaagaaaaaaaaccatcaccttttgtacaaaaactcttaatgattaaaaaacaaacaaaacatattggccttgtcatttgtgtgaaagtgggcaaagactggaatagagtaagacaactgaaaccaattttcatccttttactgaggaaaaaaatatttaatatttttgttatataaggaatagtgcctaaggcaggtacttatactcctgacctcagccccacacactctggttttataaagctataggacagagcagagatggaactgaaaaacagggtagaaaataacataaattggaggggaacagtgggatgcagaaagaatgacaacagccacatgtgccccagtcaaatacttttagtccctgcagcagaagatgccaaccaagtctctatactggctggggatcctgccatggatgcaggagaaaaaattcaatcacaagggagtaagtgacaacaaaaagaaaaaactgctgagtaggtgggacctgtggtggctgaggggcagtgagggtggtggcttgcggctgctgctgttgctgctgttgctgttgttgctgctgctgctgctgcgccaactggaggtgtgtagctgtgtgaaggagctgggactgccggtg

SEQ ID NO: 376256 - DNA, 4446 bp, Homo sapiens
cggaacagcgtccctctcaggcggcgaacgggctagggaagcgcccggaggagacctagcgtgagaactacaactcccgcggagcccgagggcgagctgcctgcgtaacttccgcttccgccacctgcccctctcaccctcttcactcgaaccctacccgggagcggtcaggcgcgtgaccccgcgtgaccggggtgcgcgagccgagaggccctggaagcgggactctgggaccccattgaaagaaaggcaaccagaaaaggcgaaacgacaacctcgatagtgattggagctgatggaacgagggcggagctaaagtcccagaatactggccaatcagagtttaagattatcagggagcccgggaaggggaaaggggcgaaatggttctatggtcacatgccgcggggtctggtgggaggagcggttgcccagcggcctcttggcgcttcctgtttccggttcccagagtggggcacagcgaggcgctagggggaacgctggcctctgaaactagctctgggaccggggtctgcggccggcccctagctggccccgtctcccatccccagaagggtattcactggggattctgagctttggctactccagtttcccacgacacgatgttccctttctacagctgctggaggactggactgctactactactcctggctgtggcagtgagagaatcctggcagacagaagaaaaaacttgcgacttggtaggagaaaagggtaaagagtcagagaaagagttggctctagtgaagaggctgaaaccactgtttaataaaagctttgagagcactgtgggccagggttcagacacatacatctacatcttcagggtgtgccgggaagctggcaaccacacttctggggcaggcctggtgcaaatcaacaaaagtaatgggaaggagacagtggtagggagactcaacgagactcacatcttcaacggaagtaattggatcatgctgatctataaagggggtgatgaatatgacaaccactgtggcaaggagcagcgtcgtgcagtggtgatgatctcctgcaatcgacacaccctagcggacaattttaaccctgtgtctgaggagcgtggcaaagtccaagattgtttctacctctttgagatggatagcagcctggcctgttcaccagagatctcccacctcagtgtgggttccatcttacttgtcacgtttgcatcactggttgctgtttatgttgttggggggttcctataccagcgactggtagtgggagccaaaggaatggagcagtttccccacttagccttctggcaggatcttggcaacctggtagcaagtaagtaacagggcagctggttgaatttgtagcctgcaaacaaggttgggtgaccaaccatcctcgtttgttcacactgagggggttcctgggacacaggacattgagtgctaaaaccacaaaagtcccagcaaacaagacagttgccctagtacagagtagtaagtggcacagcatccatttctggccttggtaagacattgctgaaagagcaacactgttgaccagatgggctcttctaaatctgatttagcttttaagagggcctgggtgggaagaaggtgaggcctaataagaagaaactttttctcctgttgccccaaattgaatttaggctgattgtcagatcttttaggtttctcattatccctatagaaaaccaattcttgccacattcctagaccataagtacactttctcatatcctaaagttagatgctgcgaattatttccttcttttttttccccctacaggatggctgtgactttgtctgccgttctaaacctcgaaatgtgcctgcagcatatcgtggtgtgggggatgaccagctgggggaggagtcagaagaaagggatgaccatttattaccaatgtagattgcactttatatgtccagcctcttcctcagtcccccaaaccaaagctacacagccagatttctcaagcagtctcaactccagtccctcatctcacccttactattgctcttgctttccagtttgcttttgatttgcatcttctcactagtaaaactgccttccctttgttccttattttctgttttttctctagagaggtacagttgtaagtcagagttaatataatagggcctgtgaaaacagaggcttttgcattgtctcttgacatcagaagttacaataggcatatgggcaaaatggtgtagcaggctcactggccgtttgttttttaaacacattttcacaagtttttgagacactggatttctttaattaaaaaaaaaatgccaagaaacattatttatacagggttgattgctttcatgttgttattctgtaccctatagtagcctccatgagaatctggtatttcttgctgcttggaactactttgcagtgattacttggttgcagtccaagtactctcgtttagtctgagcctggagatgttctagacttgcttctcccacctctgagattaggacaggaaaaatgtgaaatttcccaattacaggattatacggtaccatcacatcatttgtggaaattggggtgactgtatagctgggattgggctaaggactgtggtcttatctgtccacatacagccaaaatgcctatccagaaatccagttcgttggaaaggaaaattggtactcctgtgccacaggggttccagaaaagggaagtcactttaccttgcggtggtgggatcctgatgtctttcatccatttgtagtaaaagctggtaaagcttttcttactcctggttccctaccagtatttctaaacatgtcgcactttctccacaggcatgtggttttgacctttttttcaatcttctagaaagggaacggaagcagaagtgggacatcgagggctctgctgtcctctgcgctgggtgtggaatgctgctgcacctgtcccttctgctggctcagggaagtgtcttcttgcccacatttctgtggggaaaggtttttaatcctctgatgcttccatcttcctgtttaggccatgtgcccagaaacctggactgatctttctttaatagtgaacccctgggccactgaagagtaacatggctccactggacacaaaagagggatggaatcaacaggcagggggccttttataagccttaggaaaagaaaatgaaactatttcatctttggacttttcaatactattggagtgatttttttctttctaaacagggaaaataatgttacaaaagcatcttttttgttatttgtttgcatccctcccccacaccctggtgttttaaaatgaagaaaaaaaaccatcaccttttgtacaaaaactcttaatgattaaaaaacaaacaaaacatattggccttgtcatttgtgtgaaagtgggcaaagactggaatagagtaagacaactgaaaccaattttcatccttttactgaggaaaaaaatatttaatatttttgttatataaggaatagtgcctaaggcaggtacttatactcctgacctcagccccacacactctggttttataaagctataggacagagcagagatggaactgaaaaacagggtagaaaataacataaattggaggggaacagtgggatgcagaaagaatgacaacagccacatgtgccccagtcaaatacttttagtccctgcagcagaagatgccaaccaagtctctatactggctggggatcctgccatggatgcaggagaaaaaattcaatcacaagggagtaagtgacaacaaaaagaaaaaactctgagccacagctacactgggaggggggaggaccagattttgctacttctgtcacacaagctagaaaaaccctacctctcccattgggcaggcaacctgacattccacccagttccttgccttaccatactatgtattcctcctcttggagaattaagacctgggctaaatgctccactccaggataaggctgagcagtcctagttctctagactgcctcttttataaagattggattaaggtacgtgaaatggtgagaactgtaaagattttaaaaaataaagtagaacccagagaaaatgtcaaagctgccgccatgtagcaccagcaaccaattcttgcacttctcttccctgtctcagtaatcccctacagaaggttacatgattggaacaactctttcttccctgcaaagtctgctggtaccaggttataacctggacagtggagagtgtctgccttaggctggtttgtgcaagagggccaccttaggtctccttgaggacatttatcttggcgcagatcttgagggcagggcccagcttgatgttcatggcactcataagatgttcttctttaagtaataaaagggcctgtccatcaatctcctgtgagcgaaattcctctgcaatctcttggca

SEQ ID NO: 376257 - DNA, 3461 bp, Homo sapiens
gtgtctgaaccctggcccacagtgctctcaaagcttttattaaacagtggtttcagcctcttcactagagccaactctttctctgactctttacccttttctcctaccaagtcgcaagttttttcttctgtctgccaggattctctctctgccacagccaggagtagtagtagcagtccagtcctccagcagctgtagaaagggaacatcgtgtcgtggtaggagaaaagggtaaagagtcagagaaagagttggctctagtgaagaggctgaaaccactgtttaataaaagctttgagagcactgtgggccagggttcagacacatacatctacatcttcagggtgtgccgggaagctggcaaccacacttctggggcaggcctggtgcaaatcaacaaaagtaatgggaaggagacagtggtagggagactcaacgagactcacatcttcaacggaagtaattggatcatgctgatctataaagggggtgatgaatatgacaaccactgtggcaaggagcagcgtcgtgcagtggtgatgatctcctgcaatcgacacaccctagcggacaattttaaccctgtgtctgaggagcgtggcaaagtccaagattgtttctacctctttgagatggatagcagcctggcctgttcaccagagatctcccacctcagtgtgggttccatcttacttgtcacgtttgcatcactggttgctgtttatgttgttggggggttcctataccagcgactggtagtgggagccaaaggaatggagcagtttccccacttagccttctggcaggatcttggcaacctggtagcagatggctgtgactttgtctgccgttctaaacctcgaaatgtgcctgcagcatatcgtggtgtgggggatgaccagctgggggaggagtcagaagaaagggatgaccatttattaccaatgtagattgcactttatatgtccagcctcttcctcagtcccccaaaccaaagctacacagccagatttctcaagcagtctcaactccagtccctcatctcacccttactattgctcttgctttccagtttgcttttgatttgcatcttctcactagtaaaactgccttccctttgttccttattttctgttttttctctagagaggtacagttgtaagtcagagttaatataatagggcctgtgaaaacagaggcttttgcattgtctcttgacatcagaagttacaataggcatatgggcaaaatggtgtagcaggctcactggccgtttgttttttaaacacattttcacaagtttttgagacactggatttctttaattaaaaaaaaaatgccaagaaacattatttatacagggttgattgctttcatgttgttattctgtaccctatagtagcctccatgagaatctggtatttcttgctgcttggaactactttgcagtgattacttggttgcagtccaagtactctcgtttagtctgagcctggagatgttctagacttgcttctcccacctctgagattaggacaggaaaaatgtgaaatttcccaattacaggattatacggtaccatcacatcatttgtggaaattggggtgactgtatagctgggattgggctaaggactgtggtcttatctgtccacatacagccaaaatgcctatccagaaatccagttcgttggaaaggaaaattggtactcctgtgccacaggggttccagaaaagggaagtcactttaccttgcggtggtgggatcctgatgtctttcatccatttgtagtaaaagctggtaaagcttttcttactcctggttccctaccagtatttctaaacatgtcgcactttctccacaggcatgtggttttgacctttttttcaatcttctagaaagggaacggaagcagaagtgggacatcgagggctctgctgtcctctgcgctgggtgtggaatgctgctgcacctgtcccttctgctggctcagggaagtgtcttcttgcccacatttctgtggggaaaggtttttaatcctctgatgcttccatcttcctgtttaggccatgtgcccagaaacctggactgatctttctttaatagtgaacccctgggccactgaagagtaacatggctccactggacacaaaagagggatggaatcaacaggcagggggccttttataagccttaggaaaagaaaatgaaactatttcatctttggacttttcaatactattggagtgatttttttctttctaaacagggaaaataatgttacaaaagcatcttttttgttatttgtttgcatccctcccccacaccctggtgttttaaaatgaagaaaaaaaaccatcaccttttgtacaaaaactcttaatgattaaaaaacaaacaaaacatattggccttgtcatttgtgtgaaagtgggcaaagactggaatagagtaagacaactgaaaccaattttcatccttttactgaggaaaaaaatatttaatatttttgttatataaggaatagtgcctaaggcaggtacttatactcctgacctcagccccacacactctggttttataaagctataggacagagcagagatggaactgaaaaacagggtagaaaataacataaattggaggggaacagtgggatgcagaaagaatgacaacagccacatgtgccccagtcaaatacttttagtccctgcagcagaagatgccaaccaagtctctatactggctggggatcctgccatggatgcaggagaaaaaattcaatcacaagggagtaagtgacaacaaaaagaaaaaactctgagccacagctacactgggaggggggaggaccagattttgctacttctgtcacacaagctagaaaaaccctacctctcccattgggcaggcaacctgacattccacccagttccttgccttaccatactatgtattcctcctcttggagaattaagacctgggctaaatgctccactccaggataaggctgagcagtcctagttctctagactgcctcttttataaagattggattaaggtacgtgaaatggtgagaactgtaaagattttaaaaaataaagtagaacccagagaaaatgtcaaagctgccgccatgtagcaccagcaaccaattcttgcacttctcttccctgtctcagtaatcccctacagaaggttacatgattggaacaactctttcttccctgcaaagtctgctggtaccaggttataacctggacagtggagagtgtctgccttaggctggtttgtgcaagagggccaccttaggtctccttgaggacatttatcttggcgcagatcttgagggcagggcccagcttgatgttcatggcactcataagatgttcttctttaagtaataaaagggcctgtccatcaatctcctgtgagcgaaattcctctgcaatctcttggca

SEQ ID NO: 376258 - DNA, 3861 bp, Homo sapiens
cggaacagcgtccctctcaggcggcgaacgggctagggaagcgcccggaggagacctagcgtgagaactacaactcccgcggagcccgagggcgagctgcctgcgtaacttccgcttccgccacctgcccctctcaccctcttcactcgaaccctacccgggagcggtcaggcgcgtgaccccgcgtgaccggggtgcgcgagccgagaggccctggaagcgggactctgggaccccattgaaagaaaggcaaccagaaaaggcgaaacgacaacctcgatagtgattggagctgatggaacgagggcggagctaaagtcccagaatactggccaatcagagtttaagattatcagggagcccgggaaggggaaaggggcgaaatggttctatggtcacatgccgcggggtctggtgggaggagcggttgcccagcggcctcttggcgcttcctgtttccggttcccagagtggggcacagcgaggcgctagggggaacgctggcctctgaaactagctctgggaccggggtctgcggccggcccctagctggccccgtctcccatccccagaagggtattcactggggattctgagctttggctactccagtttcccacgacacgatgttccctttctacagctgctggaggactggactgctactactactcctggctgtggcagtgagagaatcctggcagacagaagaaaaaacttgcgacttggtaggagaaaagggtaaagagtcagagaaagagttggctctagtgaagaggctgaaaccactgtttaataaaagctttgagagcactgtgggccagggttcagacacatacatctacatcttcagggtgtgccgggaagctggcaaccacacttctggggcaggcctggtgcaaatcaacaaaagtaatgggaaggagacagtggtagggagactcaacgagactcacatcttcaacggaagacaattttaaccctgtgtctgaggagcgtggcaaagtccaagattgtttctacctctttgagatggatagcagcctggcctgttcaccagagatctcccacctcagtgtgggttccatcttacttgtcacgtttgcatcactggttgctgtttatgttgttggggggttcctataccagcgactggtagtgggagccaaaggaatggagcagtttccccacttagccttctggcaggatcttggcaacctggtagcagatggctgtgactttgtctgccgttctaaacctcgaaatgtgcctgcagcatatcgtggtgtgggggatgaccagctgggggaggagtcagaagaaagggatgaccatttattaccaatgtagattgcactttatatgtccagcctcttcctcagtcccccaaaccaaagctacacagccagatttctcaagcagtctcaactccagtccctcatctcacccttactattgctcttgctttccagtttgcttttgatttgcatcttctcactagtaaaactgccttccctttgttccttattttctgttttttctctagagaggtacagttgtaagtcagagttaatataatagggcctgtgaaaacagaggcttttgcattgtctcttgacatcagaagttacaataggcatatgggcaaaatggtgtagcaggctcactggccgtttgttttttaaacacattttcacaagtttttgagacactggatttctttaattaaaaaaaaaatgccaagaaacattatttatacagggttgattgctttcatgttgttattctgtaccctatagtagcctccatgagaatctggtatttcttgctgcttggaactactttgcagtgattacttggttgcagtccaagtactctcgtttagtctgagcctggagatgttctagacttgcttctcccacctctgagattaggacaggaaaaatgtgaaatttcccaattacaggattatacggtaccatcacatcatttgtggaaattggggtgactgtatagctgggattgggctaaggactgtggtcttatctgtccacatacagccaaaatgcctatccagaaatccagttcgttggaaaggaaaattggtactcctgtgccacaggggttccagaaaagggaagtcactttaccttgcggtggtgggatcctgatgtctttcatccatttgtagtaaaagctggtaaagcttttcttactcctggttccctaccagtatttctaaacatgtcgcactttctccacaggcatgtggttttgacctttttttcaatcttctagaaagggaacggaagcagaagtgggacatcgagggctctgctgtcctctgcgctgggtgtggaatgctgctgcacctgtcccttctgctggctcagggaagtgtcttcttgcccacatttctgtggggaaaggtttttaatcctctgatgcttccatcttcctgtttaggccatgtgcccagaaacctggactgatctttctttaatagtgaacccctgggccactgaagagtaacatggctccactggacacaaaagagggatggaatcaacaggcagggggccttttataagccttaggaaaagaaaatgaaactatttcatctttggacttttcaatactattggagtgatttttttctttctaaacagggaaaataatgttacaaaagcatcttttttgttatttgtttgcatccctcccccacaccctggtgttttaaaatgaagaaaaaaaaccatcaccttttgtacaaaaactcttaatgattaaaaaacaaacaaaacatattggccttgtcatttgtgtgaaagtgggcaaagactggaatagagtaagacaactgaaaccaattttcatccttttactgaggaaaaaaatatttaatatttttgttatataaggaatagtgcctaaggcaggtacttatactcctgacctcagccccacacactctggttttataaagctataggacagagcagagatggaactgaaaaacagggtagaaaataacataaattggaggggaacagtgggatgcagaaagaatgacaacagccacatgtgccccagtcaaatacttttagtccctgcagcagaagatgccaaccaagtctctatactggctggggatcctgccatggatgcaggagaaaaaattcaatcacaagggagtaagtgacaacaaaaagaaaaaactctgagccacagctacactgggaggggggaggaccagattttgctacttctgtcacacaagctagaaaaaccctacctctcccattgggcaggcaacctgacattccacccagttccttgccttaccatactatgtattcctcctcttggagaattaagacctgggctaaatgctccactccaggataaggctgagcagtcctagttctctagactgcctcttttataaagattggattaaggtacgtgaaatggtgagaactgtaaagattttaaaaaataaagtagaacccagagaaaatgtcaaagctgccgccatgtagcaccagcaaccaattcttgcacttctcttccctgtctcagtaatcccctacagaaggttacatgattggaacaactctttcttccctgcaaagtctgctggtaccaggttataacctggacagtggagagtgtctgccttaggctggtttgtgcaagagggccaccttaggtctccttgaggacatttatcttggcgcagatcttgagggcagggcccagcttgatgttcatggcactcataagatgttcttctttaagtaataaaagggcctgtccatcaatctcctgtgagcgaaattcctctgcaatctcttggca

SEQ ID NO: 376259 - DNA, 2337 bp, Homo sapiens
cggaacagcgtccctctcaggcggcgaacgggctagggaagcgcccggaggagacctagcgtgagaactacaactcccgcggagcccgagggcgagctgcctgcgtaacttccgcttccgccacctgcccctctcaccctcttcactcgaaccctacccgggagcggtcaggcgcgtgaccccgcgtgaccggggtgcgcgagccgagaggccctggaagcgggactctgggaccccattgaaagaaaggcaaccagaaaaggcgaaacgacaacctcgatagtgattggagctgatggaacgagggcggagctaaagtcccagaatactggccaatcagagtttaagattatcagggagcccgggaaggggaaaggggcgaaatggttctatggtcacatgccgcggggtctggtgggaggagcggttgcccagcggcctcttggcgcttcctgtttccggttcccagagtggggcacagcgaggcgctagggggaacgctggcctctgaaactagctctgggaccggggtctgcggccggcccctagctggccccgtctcccatccccagaagggtattcactggggattctgagctttggctactccagtttcccacgacacgatgttccctttctacagctgctggaggactggactgctactactactcctggctgtggcagtgagagaatcctggcagacagaagaaaaaacttgcgacttggtaggagaaaagggtaaagagtcagagaaagagttggctctagtgaagaggctgaaaccactgtttaataaaagctttgagagcactgtgggccagggttcagacacatacatctacatcttcagggtgtgccgggaagctggcaaccacacttctggggcaggcctggtgcaaatcaacaaaagtaatgggaaggagacagtggtagggagactcaacgagactcacatcttcaacggaagtaattggatcatgctgatctataaagggggtgatgaatatgacaaccactgtggcaaggagcagcgtcgtgcagtggtgatgatctcctgcaatcgacacaccctagcggacaattttaaccctgtgtctgaggagcgtggcaaagtccaagattgtttctacctctttgagatggatagcagcctggcctgttcaccagagatctcccacctcagtgtgggttccatcttacttgtcacgtttgcatcactggttgctgtttatgttgttggggggttcctataccagcgactggtagtgggagccaaaggaatggagcagtttccccacttagccttctggcaggatcttggcaacctggtagcagatggctgtgactttgtctgccgttctaaacctcgaaatgtgcctgcagcatatcgtggtgtgggggatgaccagctgggggaggagtcagaagaaagggatgaccatttattaccaatgtagattgcactttatatgtccagcctcttcctcagtcccccaaaccaaagctacacagccagatttctcaagcagtctcaactccagtccctcatctcacccttactattgctcttgctttccagtttgcttttgatttgcatcttctcactagtaaaactgccttccctttgttccttattttctgttttttctctagagaggtacagttgtaagtcagagttaatataatagggcctgtgaaaacagaggcttttgcattgtctcttgacatcagaagttacaataggcatatgggcaaaatggtgtagcaggctcactggccgtttgttttttaaacacattttcacaagtttttgagacactggatttctttaattaaaaaaaaaatgccaagaaacattatttatacagggttgattgctttcatgttgttattctgtaccctatagtagcctccatgagaatctggtatttcttgctgcttggaactactttgcagtgattacttggttgcagtccaagtactctcgtttagtctgagcctggagatgttctagacttgcttctcccacctctgagattaggacaggaaaaatgtgaaatttcccaattacaggattatacggtaccatcacatcatttgtggaaattggggtgactgtatagctgggattgggctaaggactgtggtcttatctgtccacatacagccaaaatgcctatccagaaatccagttcgttggaaaggaaaattggtactcctgtgccacaggggttccagaaaagggaagtcactttttccccaggtcacgttctccatgcccagctcttactgataaaggcccaggagatgttggagagagtgcttcatcataac

SEQ ID NO: 376260 - DNA, 2902 bp, Homo sapiens
cggaacagcgtccctctcaggcggcgaacgggctagggaagcgcccggaggagacctagcgtgagaactacaactcccgcggagcccgagggcgagctgcctgcgtaacttccgcttccgccacctgcccctctcaccctcttcactcgaaccctacccgggagcggtcaggcgcgtgaccccgcgtgaccggggtgcgcgagccgagaggccctggaagcgggactctgggaccccattgaaagaaaggcaaccagaaaaggcgaaacgacaacctcgatagtgattggagctgatggaacgagggcggagctaaagtcccagaatactggccaatcagagtttaagattatcagggagcccgggaaggggaaaggggcgaaatggttctatggtcacatgccgcggggtctggtgggaggagcggttgcccagcggcctcttggcgcttcctgtttccggttcccagagtggggcacagcgaggcgctagggggaacgctggcctctgaaactagctctgggaccggggtctgcggccggcccctagctggccccgtctcccatccccagaagggtattcactggggattctgagctttggctactccagtttcccacgacacgatgttccctttctacagctgctggaggactggactgctactactactcctggctgtggcagtgagagaatcctggcagacagaagaaaaaacttgcgacttggtaggagaaaagggtaaagagtcagagaaagagttggctctagtgaagaggctgaaaccactgtttaataaaagctttgagagcactgtgggccagggttcagacacatacatctacatcttcagggtgtgccgggaagctggcaaccacacttctggggcaggcctggtgcaaatcaacaaaagtaatgggaaggagacagtggtagggagactcaacgagactcacatcttcaacggaagtaattggatcatgctgatctataaagggggtgatgaatatgacaaccactgtggcaaggagcagcgtcgtgcagtggtgatgatctcctgcaatcgacacaccctagcggacaattttaaccctgtgtctgaggagcgtggcaaagtccaagattgtttctacctctttgagatggatagcagcctggcctgttcaccagagatctcccacctcagtgtgggttccatcttacttgtcacgtttgcatcactggttgctgtttatgttgttggggggttcctataccagcgactggtagtgggagccaaaggaatggagcagtttccccacttagccttctggcaggatcttggcaacctggtagcaagaaagggaacggaagcagaagtgggacatcgagggctctgctgtcctctgcgctgggtgtggaatgctgctgcacctgtcccttctgctggctcagggaagtgtcttcttgcccacatttctgtggggaaaggtttttaatcctctgatgcttccatcttcctgtttaggccatgtgcccagaaacctggactgatctttctttaatagtgaacccctgggccactgaagagtaacatggctccactggacacaaaagagggatggaatcaacaggcagggggccttttataagccttaggaaaagaaaatgaaactatttcatctttggacttttcaatactattggagtgatttttttctttctaaacagggaaaataatgttacaaaagcatcttttttgttatttgtttgcatccctcccccacaccctggtgttttaaaatgaagaaaaaaaaccatcaccttttgtacaaaaactcttaatgattaaaaaacaaacaaaacatattggccttgtcatttgtgtgaaagtgggcaaagactggaatagagtaagacaactgaaaccaattttcatccttttactgaggaaaaaaatatttaatatttttgttatataaggaatagtgcctaaggcaggtacttatactcctgacctcagccccacacactctggttttataaagctataggacagagcagagatggaactgaaaaacagggtagaaaataacataaattggaggggaacagtgggatgcagaaagaatgacaacagccacatgtgccccagtcaaatacttttagtccctgcagcagaagatgccaaccaagtctctatactggctggggatcctgccatggatgcaggagaaaaaattcaatcacaagggagtaagtgacaacaaaaagaaaaaactctgagccacagctacactgggaggggggaggaccagattttgctacttctgtcacacaagctagaaaaaccctacctctcccattgggcaggcaacctgacattccacccagttccttgccttaccatactatgtattcctcctcttggagaattaagacctgggctaaatgctccactccaggataaggctgagcagtcctagttctctagactgcctcttttataaagattggattaaggtacgtgaaatggtgagaactgtaaagattttaaaaaataaagtagaacccagagaaaatgtcaaagctgccgccatgtagcaccagcaaccaattcttgcacttctcttccctgtctcagtaatcccctacagaaggttacatgattggaacaactctttcttccctgcaaagtctgctggtaccaggttataacctggacagtggagagtgtctgccttaggctggtttgtgcaagagggccaccttaggtctccttgaggacatttatcttggcgcagatcttgagggcagggcccagcttgatgttcatggcactcataagatgttcttctttaagtaataaaagggcctgtccatcaatctcctgtgagcgaaattcctctgcaatctcttggca

SEQ ID NO: 376261 - DNA, 2123 bp, Homo sapiens
cggaacagcgtccctctcaggcggcgaacgggctagggaagcgcccggaggagacctagcgtgagaactacaactcccgcggagcccgagggcgagctgcctgcgtaacttccgcttccgccacctgcccctctcaccctcttcactcgaaccctacccgggagcggtcaggcgcgtgaccccgcgtgaccggggtgcgcgagccgagaggccctggaagcgggactctgggaccccattgaaagaaaggcaaccagaaaaggcgaaacgacaacctcgatagtgattggagctgatggaacgagggcggagctaaagtcccagaatactggccaatcagagtttaagattatcagggagcccgggaaggggaaaggggcgaaatggttctatggtcacatgccgcggggtctggtgggaggagcggttgcccagcggcctcttggcgcttcctgtttccggttcccagagtggggcacagcgaggcgctagggggaacgctggcctctgaaactagctctgggaccggggtctgcggccggcccctagctggccccgtctcccatccccagaagggtattcactggggattctgagctttggctactccagtttcccacgacacgatgttccctttctacagctgctggaggactggactgctactactactcctggctgtggcagtgagagaatcctggcagacagaagaaaaaacttgcgacttggtaggagaaaagggtaaagagtcagagaaagagttggctctagtgaagaggctgaaaccactgtttaataaaagctttgagagcactgtgggccagggttcagacacatacatctacatcttcagggtgtgccgggaagctggcaaccacacttctggggcaggcctggtgcaaatcaacaaaagtaatgggaaggagacagtggtagggagactcaacgagactcacatcttcaacggaagtaattggatcatgctgatctataaagggggtgatgaatatgacaaccactgtggcaaggagcagcgtcgtgcagtggtgatgatctcctgcaatcgacacaccctagcggacaattttaaccctgtgtctgaggagcgtggcaaagtccaagattgtttctacctctttgagatggatagcagcctggcctgttcaccagagatctcccacctcagtgtgggttccatcttacttgtcacgtttgcatcactggttgctgtttatgttgttggggggttcctataccagcgactggtagtgggagccaaaggaatggagcagtttccccacttagccttctggcaggatcttggcaacctggtagcagatggctgtgactttgtctgccgttctaaacctcgaaatgtgcctgcagcatatcgtggtgtgggggatgaccagctgggggaggagtcagaagaaagggatgaccatttattaccaatgtagattgcactttatatgtccagcctcttcctcagtcccccaaaccaaagctacacagccagatttctcaagcagtctcaactccagtccctcatctcacccttactattgctcttgctttccagtttgcttttgatttgcatcttctcactagtaaaactgccttccctttgttccttaaaaaaaaaaaaaaaaaaaaaaaaaaaaaaaaaaaaaaaaaaaaaaaaaaaaaaaaaaaaaaaaaaaaaaaaaaaaaaaaaaaaaaggggggggggcccaaaaaagacaccccaagaggggagccaacaacaattaggacccacccgagtttctgtgtaagacagcgggggacccacatagggggcggactattaaaagaccagcagaacgaggagccgcgtcaaaaaaaaacagcaaagagagggaaaaaaaagcagaagagggggaacatactagggggagaggacaccaccaacataagcgggggagggagcaacaaaaatgggggaagcaaaacaaccccccccaacaaaagaattaagaagccccacagagggaaaaaaaaaaaaccgaggagagataacgggggcagaccacaaccgaaaaatgttgagcggcaaagaaaatgagacacaacaagataatatagagaggaacataccccag

SEQ ID NO: 376262 - DNA, 1319 bp, Homo sapiens
cggaacagcgtccctctcaggcggcgaacgggctagggaagcgcccggaggagacctagcgtgagaactacaactcccgcggagcccgagggcgagctgcctgcgtaacttccgcttccgccacctgcccctctcaccctcttcactcgaaccctacccgggagcggtcaggcgcgtgaccccgcgtgaccggggtgcgcgagccgagaggccctggaagcgggactctgggaccccattgaaagaaaggcaaccagaaaaggcgaaacgacaacctcgatagtgattggagctgatggaacgagggcggagctaaagtcccagaatactggccaatcagagtttaagattatcagggagcccgggaaggggaaaggggcgaaatggttctatggtcacatgccgcggggtctggtgggaggagcggttgcccagcggcctcttggcgcttcctgtttccggttcccagagtggggcacagcgaggcgctagggggaacgctggcctctgaaactagctctgggaccggggtctgcggccggcccctagctggccccgtctcccatccccagaagggtattcactggggattctgagctttggctactccagtttcccacgacacgatgttccctttctacagctgctggaggactggactgctactactactcctggctgtggcagtgagagaatcctggcagacagaagaaaaaacttgcgacttggtaggagaaaagggtaaagagtcagagaaagagttggctctagtgaagaggctgaaaccactgtttaataaaagctttgagagcactgtgggccagggttcagacacatacatctacatcttcagggtgtgccgggaagctggcaaccacacttctggggcaggcctggtgcaaatcaacaaaagtaatgggaaggagacagtggtagggagactcaacgagactcacatcttcaacggaagtaattggatcatgctgatctataaagggggtgatgaatatgacaaccactgtggcaaggagcagcgtcgtgcagtggtgatgatctcctgcaatcgacacaccctagcggacaattttaaccctgtgtctgaggagcgtggcaaagtccaagattgtttctacctctttgagatggatagcagcctggcctgttcaccagagatctcccacctcagtgtgggttccatcttacttgtcacgtgagtatgccttcctttatcagaacagaccttccttccttttgtttttaaggtcagtaactatatggtggtacataagcacaaattgtatgtgtacattatgctgtaa

SEQ ID NO: 376263 - DNA, 412 bp, Homo sapiens
  misc_feature (60)..(60): n is a, c, g, or t
ttgccctttggcccttttgtcaggggccaggggtctgccgggtgggggtgccaacaggcntggccctttcctcccctgcatccagccatgggggcctctgcgattgccggaaggttgcatggctggtcccagggccagcacaggcccgaggccgggctgcctggttttatttttatttaactttattttctgttttatgagtgtgcgaggcggtcactcccatcgtgcccctggccgtccctccactcacccacacctggcccagtccacgttgaggtccaggactgggaaggaccgggtgagtgcaccggggacccaggccaggtgccccccggagcctgctggggtggccagagcaggagggggtgtgtttcctttttgtgggtgttgcatgcaaatcaagtggacaaga

SEQ ID NO: 376264 - DNA, 1881 bp, Homo sapiens
taccaagcccccgcccttcccaccccggggtcagccggccgtgtgcgtcccccgacagacactgtgaacggaagacagcaggccgcgatcagagtcgctgttcattcagccgcagcctctgggccggggcggcccccaggggccaggagagagccctggagtcccgcagccaccatgcacgctcccagcgtgctgtgtccttcgccactcccacgcgcccgttcctcttccgtcgccctctgtcccctgctctacctctctgtccttgtctggctctcccgtcaccctccctgcctctgtctctcttctggcctgagcctgggcccagccacctcctgacgggtcccctgggtctgcataggtctcccatggcgcaatgagtcagtggcccccagccaggcagtgtgggcattgccactgcggctggacggggctgcgcgctcgcgctctctctctctctctctctctctctttgatctcagggggtccttttgggagtttattgtattttattgtacttggtggggtgtttggggtgggggcggaggagagcttgttctcgtggggttgtcggtaccttcagaaacttttaccaaagtcacgattagctgcttgtggtggggccccaaccgccctcgggcactggggagctgggctggggctgctgctctggggtctccgggggccacagcttggggtgagttgaagacctcaggggatgtggaggggtctgcggggccctggccgcacaggatggccttcagggaaggtggtcttggggcatggtgcagagcaggtgaccggagggaatcggtgacggagcggggccaagggaggggtccggagggagtcagggatggagggcagagggagtggatgtgggggtttgaggacgtgtgacaagctccagcaggggtgggggccgggctgagggtgggggtgcgaggcggtcactcccatcgtgcccctggccgtccctccactcacccacacctggcccagtccacgttgaggtccaggactgggaaggaccgggtgagtgcaccggggacccaggccaggtgccccccggagcctgctggggtggccagagcaggagggggtgtgtttcctttttgtgggtgttgcatgcaaatcaagtggacaagaaaaaataacaaaacaaaaaacaagaaaaaaaaaacacaaaaccccgtaaaatcacaaagaaaatccaacaccaaaggcgcagaagccggctggccgtggtgggggcagcgtaggcgtagcatccctctcctctcacttagcctgttgactcttgttattatcatgatattcacaaaacgccgcatgtttaaaaagtcatagatgtcatcttctctctgcccccagggaggaaagccaccttctcttgccccttggcccctttgtcaggggccaggggtctgccgggtgggggtgccaacaggcctggccctttcctcccctgcatccagccatgggggcctctgcgattgccggaaggttgcatggctggtcccagggccagcacaggcccgaggccgggctgcctggttttatttttatttaactttattttctgttttatgagtgtgtgtccgcccacccccacccccttcagtgttaagtggggagccctgggggagtctctcctgcctcccagcctctcccaagacctcccccctcgtcaccagccatccctctggaccaggcagagggcggaccgggtgggcaggggcctgagggtggctcgggccagcccaccagccaatggacccctcctcaggccgccagtgtcgccctgcccctttttaaaacaaaatgccctcgtttgtaaacccttagacgcttgagaataaaccccttccttttcttcca

SEQ ID NO: 376265 - DNA, 1449 bp, Homo sapiens
taccaagcccccgcccttcccaccccggggtcagccggccgtgtgcgtcccccgacagacactgtgaacggaagacagcaggccgcgatcagagtcgctgttcattcagccgcagcctctgggccggggcggcccccaggggccaggagagagccctggagtcccgcagccaccatgcacgctcccagcgtgctgtgtccttcgccactcccacgcgcccgttcctcttccgtcgccctctgtcccctgctctacctctctgtccttgtctggctctcccgtcaccctccctgcctctgtctctcttcctggccgcacaggatggccttcagggaaggtggtcttggggcatggtgcagagcaggtgaccggagggaatcggtgacggagcggggccaagggaggggtccggagggagtcagggatggagggcagagggagtggatgtgggggtttgaggacgtgtgacaagctccagcaggggtgggggccgggctgagggtgggggtgcgaggcggtcactcccatcgtgcccctggccgtccctccactcacccacacctggcccagtccacgttgaggtccaggactgggaaggaccgggtgagtgcaccggggacccaggccaggtgccccccggagcctgctggggtggccagagcaggagggggtgtgtttcctttttgtgggtgttgcatgcaaatcaagtggacaagaaaaaataacaaaacaaaaaacaagaaaaaaaaaacacaaaaccccgtaaaatcacaaagaaaatccaacaccaaaggcgcagaagccggctggccgtggtgggggcagcgtaggcgtagcatccctctcctctcacttagcctgttgactcttgttattatcatgatattcacaaaacgccgcatgtttaaaaagtcatagatgtcatcttctctctgcccccagggaggaaagccaccttctcttgccccttggcccctttgtcaggggccaggggtctgccgggtgggggtgccaacaggcctggccctttcctcccctgcatccagccatgggggcctctgcgattgccggaaggttgcatggctggtcccagggccagcacaggcccgaggccgggctgcctggttttatttttatttaactttattttctgttttatgagtgtgtgtccgcccacccccacccccttcagtgttaagtggggagccctgggggagtctctcctgcctcccagcctctcccaagacctcccccctcgtcaccagccatccctctggaccaggcagagggcggaccgggtgggcaggggcctgagggtggctcgggccagcccaccagccaatggacccctcctcaggccgccagtgtcgccctgcccctttttaaaacaaaatgccctcgtttgtaaacccttagacgcttgagaataaaccccttccttttcttcca

SEQ ID NO: 376266 - DNA, 1420 bp, Homo sapiens
taccaagcccccgcccttcccaccccggggtcagccggccgtgtgcgtcccccgacagacactgtgaacggaagacagcaggccgcgatcagagtcgctgttcattcagccgcagcctctgggccggggcggcccccaggggccaggagagagccctggagtcccgcagccaccatgcacgctcccagcgtgctgtgtccttcgccactcccacgcgcccgttcctcttccgtcgccctctgtcccctgctctacctctctgtccttgtctggctctcccgtcaccctccctgcctctgtctctcttctggcctgagcctgggcccagccacctcgtgaccggagggaatcggtgacggagcggggccaagggaggggtccggagggagtcagggatggagggcagagggagtggatgtgggggtttgaggacgtgtgacaagctccagcaggggtgggggccgggctgagggtgggggtgcgaggcggtcactcccatcgtgcccctggccgtccctccactcacccacacctggcccagtccacgttgaggtccaggactgggaaggaccgggtgagtgcaccggggacccaggccaggtgccccccggagcctgctggggtggccagagcaggagggggtgtgtttcctttttgtgggtgttgcatgcaaatcaagtggacaagaaaaaataacaaaacaaaaaacaagaaaaaaaaaacacaaaaccccgtaaaatcacaaagaaaatccaacaccaaaggcgcagaagccggctggccgtggtgggggcagcgtaggcgtagcatccctctcctctcacttagcctgttgactcttgttattatcatgatattcacaaaacgccgcatgtttaaaaagtcatagatgtcatcttctctctgcccccagggaggaaagccaccttctcttgccccttggcccctttgtcaggggccaggggtctgccgggtgggggtgccaacaggcctggccctttcctcccctgcatccagccatgggggcctctgcgattgccggaaggttgcatggctggtcccagggccagcacaggcccgaggccgggctgcctggttttatttttatttaactttattttctgttttatgagtgtgtgtccgcccacccccacccccttcagtgttaagtggggagccctgggggagtctctcctgcctcccagcctctcccaagacctcccccctcgtcaccagccatccctctggaccaggcagagggcggaccgggtgggcaggggcctgagggtggctcgggccagcccaccagccaatggacccctcctcaggccgccagtgtcgccctgcccctttttaaaacaaaatgccctcgtttgtaaacccttagacgcttgagaataaaccccttccttttcttcca

SEQ ID NO: 376267 - DNA, 1149 bp, Homo sapiens
taccaagcccccgcccttcccaccccggggtcagccggccgtgtgcgtcccccgacagacactgtgaacggaagacagcaggccgcgatcagagtcgctgttcattcagccgcagcctctgggccggggcggcccccaggggccaggagagagccctggagtcccgcagccaccatgcacgctcccagcgtgctgtgtccttcgccactcccacgcgcccgttcctcttccgtcgccctctgtcccctgctctacctctctgtccttgtctggctctcccgtcaccctccctgcctctgtctctcttctggcctgagcctgggcccagccacctcctgacgggtcccctgggtctgcataggtctcccatggcgcaatgagtcagtggcccccagccaggcagtgtgggcattgccactgcggctggacggggctgcgcgctcgcgctctctctctctctctctctctctctttgatctcagggggtccttttgggagtttattgtattttattgtacttggtggggtgtttggggtgggggcggaggagagcttgttctcgtggggttgtcggtaccttcagaaacttttaccaaagtcacgattagctgcttgtggtggggccccaaccgccctcgggcactggggagctgggctggggctgctgctctggggtctccgggggccacagcttggggtgagttgaagacctcaggggatgtggaggggtctgcggggccctggccgcacaggatggccttcagggaaggtggtcttggggcatggtgcagagcaggtgaccggagggaatcggtgacggagcggggccaagggaggggtccggagggagtcagggatggagggcagagggagtggatgtgggggtttgaggacgtgtgacaagctccagcaggggtgggggccgggctgagggtgggggtgcgaggcggtcactcccatcgtgcccctggccgtccctccactcacccacacctggcccagtccacgttgaggtccaggactgggaaggaccgggtgagtgcaccggggacccaggccaggtgccccccggagcctgctggggtggccagagcaggagggggtgtgtttcctttttgtgggtgttgcatgcaaatcaagtggacaaga

SEQ ID NO: 376268 - DNA, 597 bp, Homo sapiens
  misc_feature (493)..(493): n is a, c, g, or t
taccaagcccccgcccttcccaccccggggtcagccggccgtgtgcgtcccccgacagacactgtgaacggaagacagcaggccgcgatcagagtcgctgttcattcagccgcagcctctgggccggggcggcccccaggggccaggagagagccctggagtcccgcagccaccatgcacgctcccagcgtgctgtgtccttcgccactcccacgcgcccgttcctcttccgtcgccctctgtcccctgctctacctctctgtccttgtctggctctcccgtcaccctccctgcctctgtctctcttcctggccgcacaggatggccttcagggaaggtggtcttggggcatggtgcagagcaggtgaccggagggaatcggtgacggagcggggccaagggaggggtccggagggagtcagggatggagggcagagggagtggatgtgggggtttgaggacgtgtgacaagcttttcccagggggggggaantaggcttgagataaagggttgtaagtaagttttttaaataggtatttttgttctgagttggggtaattataaacaggttgttataaagatggttgttttttgaa

SEQ ID NO: 376269 - DNA, 2164 bp, Homo sapiens
taccaagcccccgcccttcccaccccggggtcagccggccgtgtgcgtcccccgacagacactgtgaacggaagacagcaggccgcgatcagagtcgctgttcattcagccgcagcctctgggccggggcggcccccaggggccaggagagagccctggagtcccgcagccaccatgcacgctcccagcgtgctgtgtccttcgccactcccacgcgcccgttcctcttccgtcgccctctgtcccctgctctacctctctgtccttgtctggctctcccgtcaccctccctgcctctgtctctcttctggcctgagcctgggcccagccacctcctgacgggtcccctgggtctgcataggtctcccatggcgcaatgagtcagtggcccccagccaggcagtgtgggcattgccactgcggctggacggggctgcgcgctcgcgctctctctctctctctctctctctctttgatctcagggggtccttttgggagtttattgtattttattgtacttggtggggtgtttggggtgggggcggaggagagcttgttctcgtggggttgtcggtaccttcagaaacttttaccaaagtcacgattagctgcttgtggtggggccccaaccgccctcgggcactggggagctgggctggggctgctgctctggggtctccgggggccacagcttggggtgagttgaagacctcaggggatgtggaggggtctgcggggccctggccgcacaggatggccttcagggaaggtggtcttggggcatggtgcagagcaggtgaccggagggaatcggtgacggagcggggccaagggaggggtccggagggagtcagggatggagggcagagggagtggatgtgggggtttgaggacgtgtgacaagctccagcaggggtgggggccgggctgagggtgggggtgcgaggcggtcactcccatcgtgcccctggccgtccctccactcacccacacctggcccagtccacgttgaggtccaggactgggaaggaccgggtgagtgcaccggggacccaggccaggtgccccccggagcctgctggggtggccagagcaggagggggtgtgtttcctttttgtgggtgttgcatgcaaatcaagtggacaagaaaaaataacaaaacaaaaaacaagaaaaaaaaaacacaaaaccccgtaaaatcacaaagaaaatccaacaccaaaggcgcagaagccggctggccgtggtgggggcagcgtaggcgtagcatccctctcctctcacttagcctgttgactcttgttattatcatgatattcacaaaacgccgcatgtttaaaaagtcatagatgtcatcttctctctgcccccagggaggaaagccaccttctcttgccccttggcccctttgtcaggggccaggggtctgccgggtgggggtgccaacaggcctggccctttcctcccctgcatccagccatgggggcctctgcgattgccggaaggttgcatggctggtcccagggccagcacaggcccgaggccgggctgcctggttttatttttatttaactttattttctgttttatgagtgtgtgtccgcccacccccacccccttcagtgttaagtggggagccctgggggagtctctcctgcctcccagcctctcccaagacctcccccctcgtcaccagccatccctctggaccaggcagagggcggaccgggtgggcaggggcctgagggtggctcgggccagcccaccagccaatggacccctcctcaggccgccagtgtcgccctgcccctttttaaaacaaaatgccctcgtttgtaaacccttagacgcttgagaataaaccccttccttttcttccaaaaaaaaaaaaaaaaaaaaaaaaaaaaaaaaaaaaaaaaaaaaaaaaaaaaaaaaaaaaaaaaaaaaaaaaaaaaaaaaaaaaaaaaaaaaaaaaaaaaaaaaaaaaaaaaaaaaaaaaaaaaagaaaaaattaaaaatataatgggataaaataaaattttattagtaaaaatttaaaaaacattttggctgtttaaacgcggattccctgtaaatacccggctgttaccaacattaacctttgcaaaacccctgccgttcccatcgtcttggggtttaccg

SEQ ID NO: 376270 - DNA, 471 bp, Homo sapiens
gcccagtgaattagtaacagtgcttgaggcattcctcctccagggatcttttatgaaagctttaactcatgctccattttcagagagaactggcaggtacaactctcaagccctaaattttctccagaacttggaccctacatatatatatataaaaaaatataaatatataaaaatatataaaaggccgggcgcggtggctcacgcctgtaatcccagcactttgggaggctgaggcgggcggatcacgaggtcaggagatcgagaccatcctggctaacaaggtgaaaccccgtctctactaaaaatacaaaaaattagccgggcgtggtagcgggcgcctgtagtcccagctactcgggaggctgaggcaggagaatggcgtgaacccgggaggcggagcttgcagtgagccgagatcgcgccactgcactccagcctgggcgacagagcgagactccgtctcaaaaa

SEQ ID NO: 376271 - DNA, 315 bp, Homo sapiens
tgaaggtgcctccatctctcccttccccaatatacctgcttgcctctccatcctccgaaaaacccctgaggacccccccccatcctcttctaggatgaggggaagctggagccccaactttgatcctccattggagtggcccaaatctttccatctagggcaagtcctgaaaggcccaaggccccctccccagtctggccttggcctccagcctggagaagggctaacatcagctcattgtcaaggccacccccaccccagaacagaaccgtgtctctgataaaggttttgaagtgaataaagttttaaaaacta

SEQ ID NO: 376272 - DNA, 718 bp, Homo sapiens
taggcaaggagaaggcgggatgaaatacggacgaggggcgtgagttgcatgttgtgtgaggatcccggggccgccgcgtcgctcgggccccgccatggccgtcaccatcacgctcaaaacgctgcagcagcagaccttcaagatccgcatggagcctgacgagacggtgaaggtgctaaaggagaagatagaagctgagaagggtcgtgatgccttccccgtggctggacagaaactcatctatgccggcaagatcttgagtgacgatgtccctatcagggactatcgcatcgatgagaagaactttgtggtcgtcatggtgaccaagaccaaagaacggccagggattacctcagacacccccagaaggcactcaccccacagactgaccccaagagatcactactacagtccgttccgagcacaagcaccaccaaaaacatcaagggacaatgcacaccaagacaacaccaacccgtgcaacggacaaggagcagggcaaccaagagacacacaaacgaaaaggaaagcacagcaccgcacaccggcacagatcccgccacaaccgcgacaggccgcaaccagggcaacagagcacgacccccaccccagcgcccccaggccgcgggaaggaaaaagagaaaccaaagacaagcacgcagcaacagcccgcaccacagcggcccgcaccagcccctcgacaacacgacaacacaaa

SEQ ID NO: 376273 - DNA, 3084 bp, Homo sapiens
ttctcatttggaagaggcaaaatgaggtttttacagaagaaatacaaatgtctgtaaccagtacaggtacataaaaactttgttaaaaattcatttgagcgtgagagtggggacaccagagtcactttgcagccccgtgacgtcaccgataacgggcatggcgtcactcaggagaccacgtgtgcgggccgagcaagaagccccgcccacagcgcggagtttagtctgcgcgtacctcgctcgagaacgcgctcgtgcgcatgcccacaaaggccaaggagggagtgcgcaggtcacgtgcgccggtggtcagcgcgcgcattgcctgccccggaagtggtcggcgcgcggcgcggcgcgcctgggcgctaagatggcggcggcgtgagttgcatgttgtgtgaggatcccggggccgccgcgtcgctcgggccccgccatggccgtcaccatcacgctcaaaacgctgcagcagcagaccttcaagatccgcatggagcctgacgagacggtgaaggtgctaaaggagaagatagaagctgagaagggtcgtgatgccttccccgtggctggacagaaactcatctatgccggcaagatcttgagtgacgatgtccctatcagggactatcgcatcgatgagaagaactttgtggtcgtcatggtgaccaagaccaaagccggccagggtacctcagcacccccagaggcctcacccacagctgccccagagtcctctacatccttcccgcctgcccccacctcaggcatgtcccatcccccacctgccgccagagaggacaagagcccatcagaggaatccgcccccacgacgtccccagagtctgtgtcaggctctgttccctcttcaggtagcagcgggcgagaggaagacgcggcctccacgctagtgacgggctctgagtatgagacgatgctgacggagatcatgtccatgggctatgagcgagagcgggtcgtggccgccctgagagccagctacaacaacccccaccgagccgtggagtatctgctcacgggaattcctgggagccccgagccggaacacggttctgtccaggagagccaggtatcggagcagccggccacggaagcagcaggagagaaccccctggagttcctgcgggaccagccccagttccagaacatgcggcaggtgattcagcagaaccctgcgctgctgcccgccctgctccagcagctgggccaggagaaccctcagcttttacagcaaatcagccggcaccaggagcagttcatccagatgctgaacgagccccctggggagctggcggacatctcagatgtggagggggaggtgggcgccataggagaggaggccccgcagatgaactacatccaggtgacgccgcaggagaaagaagctatagagaggttgaaggccctgggcttcccagagagcctggtcatccaggcctatttcgcgtgtgaaaaaaatgagaacttggctgccaacttcctcctgagtcagaactttgatgacgagtgatgccaggaagccaggccaccgaagcccccaccctacccttattccatgaaagttttataaaagaaaaaatatatatatattcatgtttatttaagaaatggaaaaaaaaatcaaaaatcttaaaaaaacaagcaaacagtccagcttcctgtcctcctaaagtggcccctgttcccatctcccgggccagacagctgtccccccgtcctcctccccagcccagcctgctcagagaagctggcaggactgggaggcgacagatgggcccctcttggcctctgtcccagctctctgcagccagacggaaaggcggctgcttgcctctccatcctccgaaaaacccctgaggacccccccccatcctcttctaggatgaggggaagctggagccccaactttgatcctccattggagtggcccaaatctttccatctagggcaagtcctgaaaggcccaaggccccctccccagtctggccttggcctccagcctggagaagggctaacatcagctcattgtcaaggccacccccaccccagaacagaaccgtgtctctgataaaggttttgaagtgaataaagttttaaaaactagccctatggtctgtgcctgctggggctccccgcgcccacctgtctgggtcttggggggctggctgggcacaggcaggcatggtgacgggtgcctggaagggggagaggagtctgtgagtccctgcagattgaggcttccggtgtctcctcccccagtgtgtcatttccaggcagtggaccccagcccaacgttacaaggactgcttctccccggcccccaccatcatcaccacagtctgttttggctatacttccccccccaccagccttgtaattggctaattactggagatgaatgttggtaaacagaagccttcttctcttctgccatctgcttctccattatttgcccattgtacaccccccttttcctcccactgaagccccagttagtcagcagggcctagagtccctgtccccttttgagtacagccaagtgggggattccccagctcttaagtattgggggaggaaccaggggacccagagaggcacaccttgagaggacgcagatctcttcaggggtactgccaggtagcaggctttattgggaagggacaaagcctcaggagctgggtgccccagaggctgctgggtcttgagccacagctgcagccaatgcagcagctcgcgcctccttcttccgtttctgtttttcctccttgaggcgcttgcgctccttcttctctaggtcctggagcagctcctggaagcgggcactccttgggtccacctggtagcccaggagctcctgggcctcagcctgcagtcgggccctcctctccttgtcagcctgggccttctcccagttctcccgctgctgctgctgccagttcacaatcatctgtggcatcttggccatgcactctgcgatgtgctgctccctctcccgacgcttctgctcttcggccagtaactgacccgagtctcgggctgggcagaggaaagcagtgtggggtt

SEQ ID NO: 376274 - DNA, 2943 bp, Homo sapiens
ttctcatttggaagaggcaaaatgaggtttttacagaagaaatacaaatgtctgtaaccagtacaggtacataaaaactttgttaaaaattcatttgagcgtgagagtggggacaccagagtcactttgcagccccgtgacgtcaccgataacgggcatggcgtcactcaggagaccacgtgtgcgggccgagcaagaagccccgcccacagcgcggagtttagtctgcgcgtacctcgctcgagaacgcgctcgtgcgcatgcccacaaaggccaaggagggagtgcgcaggtcacgtgcgccggtggtcagcgcgcgcattgcctgccccggaagtggtcggcgcgcggcgcggcgcgcctgggcgctaagatggcggcggcgtgagttgcatgttgtgtgaggatcccggggccgccgcgtcgctcgggccccgccatggccgtcaccatcacgctcaaaacgctgcagcagcagaccttcaagatccgcatggagcctgacgagacggtgaaggtgctaaaggagaagatagaagctgagaagggtcgtgatgccttccccgtggctggacagaaactcatctatgccggcaagatcttgagtgacgatgtccctatcagggactatcgcatcgatgagaagaactttgtggtcgtcatggtgaccaagaccaaagccggccagggtacctcagcacccccagaggcctcacccacagctgccccagagtcctctacatccttcccgcctgcccccacctcaggcatgtcccatcccccacctgccgccagagaggacaagagcccatcagaggaatccgcccccacgacgtccccagagtctgtgtcaggctctgttccctcttcaggtagcagcgggcgagaggaagacgcggcctccacgctagtgacgggctctgagtatgagacgatgctgacggagatcatgtccatgggctatgagcgagagcgggtcgtggccgccctgagagccagctacaacaacccccaccgagccgtggagtatctgctcacgggaattcctgggagccccgagccggaacacggttctgtccaggagagccaggtatcggagcagccggccacggaagcagcaggagagaaccccctggagttcctgcgggaccagccccagttccagaacatgcggcaggtgattcagcagaaccctgcgctgctgcccgccctgctccagcagctgggccaggagaaccctcagcttttacagcaaatcagccggcaccaggagcagttcatccagatgctgaacgagccccctggggagctggcggacatctcagatgtggagggggaggtgggcgccataggagaggaggccccgcagatgaactacatccaggtgacgccgcaggagaaagaagctatagagaggttgaaggccctgggcttcccagagagcctggtcatccaggcctatttcgcgtgtgaaaaaaatgagaacttggctgccaacttcctcctgagtcagaactttgatgacgagtgatgccaggaagccaggccaccgaagcccccaccctacccttattccatgaaagttttataaaagaaaaaatatatatatattcatgtttatttaagaaatggaaaaaaaaatcaaaaatcttaaaaaaacaagcaaacagtccagcttcctgtcctcctaaagtggcccctgttcccatctcccgggccagacagctgtccccccgtcctcctccccagcccagcctgctcagagaagctggcaggactgggaggcgacagatgggcccctcttggcctctgtcccagctctctgcagccagacggaaaggcggctgcttgcctctccatcctccgaaaaacccctgaggacccccccccatcctcttctaggatgaggggaagctggagccccaactttgatcctccattggagtggcccaaatctttccatctagggcaagtcctgaaaggcccaaggccccctccccagtctggccttggcctccagcctggagaagggctaacatcagctcattgtcaaggccacccccaccccagaacagaaccgtgtctctgataaaggttttgaagtgaataaagttttaaaaactaaaaaaaaaaaaaaaaaaaaaaaaaaaaaacacaaaacaaaaaaaaaaaaaaaaaacaacaaaaacaaaaaaaaaaataaaaaacaaaaaacaacaaaaaaaacacacaaaacaaaaaaaaaaaacaaaaacacacaaaaaagggggggggcacggaacaacgatctcaaccaagggggcaacaagaaaaaaacgaccacacagacaagagaagaaagggggaccacaacgcggagacgaagaaaaaaagaggagcaccacgagcaccaaaacaggcgggagaaaggagaaacacaccacagggaacaagatgatagaagaagcgcaaaacacacaggaaggcgggggcaacacagaaagggcaaaaaaccaccaaccagagaacacgagccggagacacaaaacacaggaggcggagcacagaggcgaacaccaacaggacgtagcacactcgcgcggaacaagaaaaaggacagacgacgagaaacaagaaaacacctcccccccgggggaaacaagcaaagcagcacggacagcaaaaagaaacaaagacaaaggagccagcaggcaacgatgaaacagatagaactggagagacgaatagaatgtaaaagtaaggagacaaataagacggcgcagagacaggaagaccacatcagagaacaacacagcacaagcagcagccagagaccaagaaggggaaaaagcggcgccgaaaaaaggctggccactaaaagcacaggacgcacccacacaacaccaccgaacacgaaccaaggcacaacgcaggccagcacagacagaccacagcgacaacaga

SEQ ID NO: 376275 - DNA, 2045 bp, Homo sapiens
ttctcatttggaagaggcaaaatgaggtttttacagaagaaatacaaatgtctgtaaccagtacaggtacataaaaactttgttaaaaattcatttgagcgtgagagtggggacaccagagtcactttgcagccccgtgacgtcaccgataacgggcatggcgtcactcaggagaccacgtgtgcgggccgagcaagaagccccgcccacagcgcggagtttagtctgcgcgtacctcgctcgagaacgcgctcgtgcgcatgcccacaaaggccaaggagggagtgcgcaggtcacgtgcgccggtggtcagcgcgcgcattgcctgccccggaagtggtcggcgcgcggcgcggcgcgcctgggcgctaagatggcggcggcgtgagttgcatgttgtgtgaggatcccggggccgccgcgtcgctcgggccccgccatggccgtcaccatcacgctcaaaacgctgcagcagcagaccttcaagatccgcatggagcctgacgagacggtgaaggtgctaaaggagaagatagaagctgagaagggtcgtgatgccttccccgtggctggacagaaactcatctatgccggcaagatcttgagtgacgatgtccctatcagggactatcgcatcgatgagaagaactttgtggtcgtcatggtgaccaagaccaaagccggccagggtacctcagcacccccagaggcctcacccacagctgccccagagtcctctacatccttcccgcctgcccccacctcaggcatgtcccatcccccacctgccgccagagaggacaagagcccatcagaggaatccgcccccacgacgtccccagagtctgtgtcaggctctgttccctcttcaggtagcagcgggcgagaggaagacgcggcctccacgctagtgacgggctctgagtatgagacgatgctgacggagatcatgtccatgggctatgagcgagagcgggtcgtggccgccctgagagccagctacaacaacccccaccgagccgtggagtatctgctcacgcaggagagaaccccctggagttcctgcgggaccagccccagttccagaacatgcggcaggtgattcagcagaaccctgcgctgctgcccgccctgctccagcagctgggccaggagaaccctcagcttttacagcaaatcagccggcaccaggagcagttcatccagatgctgaacgagccccctggggagctggcggacatctcagatgtggagggggaggtgggcgccataggagaggaggccccgcagatgaactacatccaggtgacgccgcaggagaaagaagctatagagaggttgaaggccctgggcttcccagagagcctggtcatccaggcctatttcgcgtgtgaaaaaaatgagaacttggctgccaacttcctcctgagtcagaactttgatgacgagtgatgccaggaagccaggccaccgaagcccccaccctacccttattccatgaaagttttataaaagaaaaaatatatatatattcatgtttatttaagaaatggaaaaaaaaatcaaaaatcttaaaaaaacaagcaaacagtccagcttcctgtcctcctaaagtggcccctgttcccatctcccgggccagacagctgtccccccgtcctcctccccagcccagcctgctcagagaagctggcaggactgggaggcgacagatgggcccctcttggcctctgtcccagctctctgcagccagacggaaaggcggctgcttgcctctccatcctccgaaaaacccctgaggacccccccccatcctcttctaggatgaggggaagctggagccccaactttgatcctccattggagtggcccaaatctttccatctagggcaagtcctgaaaggcccaaggccccctccccagtctggccttggcctccagcctggagaagggctaacatcagctcattgtcaaggccacccccaccccagaacagaaccgtgtctctgataaaggttttgaagtgaataaagttttaaaaacta

SEQ ID NO: 376276 - DNA, 2030 bp, Homo sapiens
ttctcatttggaagaggcaaaatgaggtttttacagaagaaatacaaatgtctgtaaccagtacaggtacataaaaactttgttaaaaattcatttgagcgtgagagtggggacaccagagtcactttgcagccccgtgacgtcaccgataacgggcatggcgtcactcaggagaccacgtgtgcgggccgagcaagaagccccgcccacagcgcggagtttagtctgcgcgtacctcgctcgagaacgcgctcgtgcgcatgcccacaaaggccaaggagggagtgcgcaggtcacgtgcgccggtggtcagcgcgcgcattgcctgccccggaagtggtcggcgcgcggcgcggcgcgcctgggcgctaagatggcggcggcgtgagttgcatgttgtgtgaggatcccggggccgccgcgtcgctcgggccccgccatggccgtcaccatcacgctcaaaacgctgcagcagcagaccttcaagatccgcatggagcctgacgagacggtgaaggtgctaaaggagaagatagaagctgagaagggtcgtgatgccttccccgtggctggacagaaactcatctatgccggcaagatcttgagtgacgatgtccctatcagggactatcgcatcgatgagaagaactttgtggtcgtcatggtgaccaaggcatgtcccatcccccacctgccgccagagaggacaagagcccatcagaggaatccgcccccacgacgtccccagagtctgtgtcaggctctgttccctcttcaggtagcagcgggcgagaggaagacgcggcctccacgctagtgacgggctctgagtatgagacgatgctgacggagatcatgtccatgggctatgagcgagagcgggtcgtggccgccctgagagccagctacaacaacccccaccgagccgtggagtatctgctcacgggaattcctgggagccccgagccggaacacggttctgtccaggagagccaggtatcggagcagccggccacggaagcagcaggagagaaccccctggagttcctgcgggaccagccccagttccagaacatgcggcaggtgattcagcagaaccctgcgctgctgcccgccctgctccagcagctgggccaggagaaccctcagcttttacagcaaatcagccggcaccaggagcagttcatccagatgctgaacgagccccctggggagctggcggacatctcagatgtggagggggaggtgggcgccataggagaggaggccccgcagatgaactacatccaggtgacgccgcaggagaaagaagctatagagaggttgaaggccctgggcttcccagagagcctggtcatccaggcctatttcgcgtgtgaaaaaaatgagaacttggctgccaacttcctcctgagtcagaactttgatgacgagtgatgccaggaagccaggccaccgaagcccccaccctacccttattccatgaaagttttataaaagaaaaaatatatatatattcatgtttatttaagaaatggaaaaaaaaatcaaaaatcttaaaaaaacaagcaaacagtccagcttcctgtcctcctaaagtggcccctgttcccatctcccgggccagacagctgtccccccgtcctcctccccagcccagcctgctcagagaagctggcaggactgggaggcgacagatgggcccctcttggcctctgtcccagctctctgcagccagacggaaaggcggctgcttgcctctccatcctccgaaaaacccctgaggacccccccccatcctcttctaggatgaggggaagctggagccccaactttgatcctccattggagtggcccaaatctttccatctagggcaagtcctgaaaggcccaaggccccctccccagtctggccttggcctccagcctggagaagggctaacatcagctcattgtcaaggccacccccaccccagaacagaaccgtgtctctgataaaggttttgaagtgaataaagttttaaaaacta

SEQ ID NO: 376277 - DNA, 1354 bp, Homo sapiens
ttcaggtagcagcgggcgagaggaagagggaacagagcctgacacagactctggggacgtcgtgggggcggattcctctgatgggctctgttccctcttcaggtagcagcgggcgagaggaagacgcggcctccacgctagtgacgggctctgagtatgagacgatgctgacggagatcatgtccatgggctatgagcgagagcgggtcgtggccgccctgagagccagctacaacaacccccaccgagccgtggagtatctgctcacgggaattcctgggagccccgagccggaacacggttctgtccaggagagccaggtatcggagcagccggccacggaagcagcaggagagaaccccctggagttcctgcgggaccagccccagttccagaacatgcggcaggtgattcagcagaaccctgcgctgctgcccgccctgctccagcagctgggccaggagaaccctcagcttttacagcaaatcagccggcaccaggagcagttcatccagatgctgaacgagccccctggggagctggcggacatctcagatgtggagggggaggtgggcgccataggagaggaggccccgcagatgaactacatccaggtgacgccgcaggagaaagaagctatagagaggttgaaggccctgggcttcccagagagcctggtcatccaggcctatttcgcgtgtgaaaaaaatgagaacttggctgccaacttcctcctgagtcagaactttgatgacgagtgatgccaggaagccaggccaccgaagcccccaccctacccttattccatgaaagttttataaaagaaaaaatatatatatattcatgtttatttaagaaatggaaaaaaaaatcaaaaatcttaaaaaaacaagcaaacagtccagcttcctgtcctcctaaagtggcccctgttcccatctcccgggccagacagctgtccccccgtcctcctccccagcccagcctgctcagagaagctggcaggactgggaggcgacagatgggcccctcttggcctctgtcccagctctctgcagccagacggaaaggcggctgcttgcctctccatcctccgaaaaacccctgaggacccccccccatcctcttctaggatgaggggaagctggagccccaactttgatcctccattggagtggcccaaatctttccatctagggcaagtcctgaaaggcccaaggccccctccccagtctggccttggcctccagcctggagaagggctaacatcagctcattgtcaaggccacccccaccccagaacagaaccgtgtctctgataaaggttttgaagtgaataaagttttaaaaacta

SEQ ID NO: 376278 - DNA, 2580 bp, Homo sapiens
ttctcatttggaagaggcaaaatgaggtttttacagaagaaatacaaatgtctgtaaccagtacaggtacataaaaactttgttaaaaattcatttgagcgtgagagtggggacaccagagtcactttgcagccccgtgacgtcaccgataacgggcatggcgtcactcaggagaccacgtgtgcgggccgagcaagaagccccgcccacagcgcggagtttagtctgcgcgtacctcgctcgagaacgcgctcgtgcgcatgcccacaaaggccaaggagggagtgcgcaggtcacgtgcgccggtggtcagcgcgcgcattgcctgccccggaagtggtcggcgcgcggcgcggcgcgcctgggcgctaagatggcggcggcgtgagttgcatgttgtgtgaggatcccggggccgccgcgtcgctcgggccccgccatggccgtcaccatcacgctcaaaacgctgcagcagcagaccttcaagatccgcatggagcctgacgagacggtgaaggtgctaaaggagaagatagaagctgagaagggtcgtgatgccttccccgtggctggacagaaactcatctatgccggcaagatcttgagtgacgatgtccctatcagggactatcgcatcgatgagaagaactttgtggtcgtcatggtgaccaagaccaaagccggccagggtacctcagcacccccagaggcctcacccacagctgccccagagtcctctacatccttcccgcctgcccccacctcaggcatgtcccatcccccacctgccgccagagaggacaagagcccatcagaggaatccgcccccacgacgtccccagagtctgtgtcaggctctgttccctcttcaggtagcagcgggcgagaggaagacgcggcctccacgctagtgacgggctctgagtatgagacgatgctgacggagatcatgtccatgggctatgagcgagagcgggtcgtggccgccctgagagccagctacaacaacccccaccgagccgtggagtatctgctcacgggaattcctgggagccccgagccggaacacggttctgtccaggagagccaggtatcggagcagccggccacggaagcagcaggagagaaccccctggagttcctgcgggaccagccccagttccagaacatgcggcaggtgattcagcagaaccctgcgctgctgcccgccctgctccagcagctgggccaggagaaccctcagcttttacagcaaatcagccggcaccaggagcagttcatccagatgctgaacgagccccctggggagctggcggacatctcagatgtggagggggaggtgggcgccataggagaggaggccccgcagatgaactacatccaggtgacgccgcaggagaaagaagctatagagaggttgaaggccctgggcttcccagagagcctggtcatccaggcctatttcgcgtgtgaaaaaaatgagaacttggctgccaacttcctcctgagtcagaactttgatgacgagtgatgccaggaagccaggccaccgaagcccccacccagaacagaaccgtgtctctgataaaggttttgaagtgaataaagttttaaaaactagccctatggtctgtgcctgctggggctccccgcgcccacctgtctgggtcttggggggctggctgggcacaggcaggcatggtgacgggtgcctggaagggggagaggagtctgtgagtccctgcagattgaggcttccggtgtctcctcccccagtgtgtcatttccaggcagtggaccccagcccaacgttacaaggactgcttctccccggcccccaccatcatcaccacagtctgttttggctatacttccccccccaccagccttgtaattggctaattactggagatgaatgttggtaaacagaagccttcttctcttctgccatctgcttctccattatttgcccattgtacaccccccttttcctcccactgaagccccagttagtcagcagggcctagagtccctgtccccttttgagtacagccaagtgggggattccccagctcttaagtattgggggaggaaccaggggacccagagaggcacaccttgagaggacgcagatctcttcaggggtactgccaggtagcaggctttattgggaagggacaaagcctcaggagctgggtgccccagaggctgctgggtcttgagccacagctgcagccaatgcagcagctcgcgcctccttcttccgtttctgtttttcctccttgaggcgcttgcgctccttcttctctaggtcctggagcagctcctggaagcgggcactccttgggtccacctggtagcccaggagctcctgggcctcagcctgcagtcgggccctcctctccttgtcagcctgggccttctcccagttctcccgctgctgctgctgccagttcacaatcatctgtggcatcttggccatgcactctgcgatgtgctgctccctctcccgacgcttctgctcttcggccagtaactgacccgagtctcgggctgggcagaggaaagcagtgtggggtt

SEQ ID NO: 376279 - DNA, 1620 bp, Homo sapiens
ttctcatttggaagaggcaaaatgaggtttttacagaagaaatacaaatgtctgtaaccagtacaggtacataaaaactttgttaaaaattcatttgagcgtgagagtggggacaccagagtcactttgcagccccgtgacgtcaccgataacgggcatggcgtcactcaggagaccacgtgtgcgggccgagcaagaagccccgcccacagcgcggagtttagtctgcgcgtacctcgctcgagaacgcgctcgtgcgcatgcccacaaaggccaaggagggagtgcgcaggtcacgtgcgccggtggtcagcgcgcgcattgcctgccccggaagtggtcggcgcgcggcgcggcgcgcctgggcgctaagatggcggcggcgtgagttgcatgttgtgtgaggatcccggggccgccgcgtcgctcgggccccgccatggccgtcaccatcacgctcaaaacgctgcagcagcagaccttcaagatccgcatggagcctgacgagacggtgaaggtgctaaaggagaagatagaagctgagaagggtcgtgatgccttccccgtggctggacagaaactcatctatgccggcaagatcttgagtgacgatgtccctatcagggactatcgcatcgatgagaagaactttgtggtcgtcatggtgaccaagaccaaagccggccagggtacctcagcacccccagaggcctcacccacagctgccccagagtcctctacatccttcccgcctgcccccacctcaggcatgtcccatcccccacctgccgccagagaggacaagagcccatcagaggaatccgcccccacgacgtccccagagtctgtgtcaggctctgttccctcttcaggtagcagcgggcgagaggaagacgcggcctccacgctagtgacgggctctgagtatgagacgatgctgacggagatcatgtccatgggctatgagcgagagcgggtcgtggccgccctgagagccagctacaacaacccccaccgagccgtggagtatctgctcacgggaattcctgggagccccgagccggaacacggttctgtccaggagagccaggtatcggagcagccggccacggaagcagcaggagagaaccccctggagttcctgcgggaccagccccagttccagaacatgcggcaggtgattcagcagaaccctgcgctgctgcccgccctgctccagcagctgggccaggagaaccctcagcttttacagcaaatcagccggcaccaggagcagttcatccagatgctgaacgagccccctggggagctggcggacatctcagatgtggagggggaggtgggcgccataggagaggaggccccgcagatgaactacatccaggtgacgccgcaggagaaagaagctatagagaggttgaaggccctgggcttcccagagagcctggtcatccaggcctatttcgcgtgtgaaaaaaatgagaacttggctgccaacttcctcctgagtcagaactttgatgacgagtgatgccaggaagccaggccaccgaagcccccacccagaacagaaccgtgtctctgataaaggttttgaagtgaataaagttttaaaaacta

SEQ ID NO: 376280 - DNA, 1321 bp, Homo sapiens
atgcagtggcgggatctctgctcactgcaagctccgcctcccgggttcaggccattctcctgcctcagcctcctgagtagctgggactacaggcgcccgccaccacgcccagctaattttttgtatttttagtagagacagggtttcatcatgtgttggccaggctggactcgaactcctgacctcaagtgatccacctgcctctgcctcccaaagtgctgggattacaggtgtgagccaccgtgcccggcttatttcttggctcacttaaaagcacatcatcagctcttccagggtagggcttgtgtcgactgctatgttgtgtttggccagaacaggctcctctggatatttgcctgactgaatgaaaaagcaagggctgtgatgacctggggagaggaggggaccagggctgtgaattaccttcccttccccaccctctcctgcagcaaatcagccggcaccaggagcagttcatccagatgctgaacgagccccctggggagctggcggacatctcagatgtggagggggaggtgggcgccataggagaggaggccccgcagatgaactacatccaggtgacgccgcaggagaaagaagctatagagaggttgaaggccctgggcttcccagagagcctggtcatccaggcctatttcgcgtgtgaaaaaaatgagaacttggctgccaacttcctcctgagtcagaactttgatgacgagtgatgccaggaagccaggccaccgaagcccccaccctacccttattccatgaaagttttataaaagaaaaaatatatatatattcatgtttatttaagaaatggaaaaaaaaatcaaaaatcttaaaaaaacaagcaaacagtccagcttcctgtcctcctaaagtggcccctgttcccatctcccgggccagacagctgtccccccgtcctcctccccagcccagcctgctcagagaagctggcaggactgggaggcgacagatgggcccctcttggcctctgtcccagctctctgcagccagacggaaaggcggctgcttgcctctccatcctccgaaaaacccctgaggacccccccccatcctcttctaggatgaggggaagctggagccccaactttgatcctccattggagtggcccaaatctttccatctagggcaagtcctgaaaggcccaaggccccctccccagtctggccttggcctccagcctggagaagggctaacatcagctcattgtcaaggccacccccaccccagaacagaaccgtgtctctgataaaggttttgaagtgaataaagttttaaaaacta

SEQ ID NO: 376281 - DNA, 916 bp, Homo sapiens
gctcagatgtggagggggaggtgggcgccagctccccaggggctcgttcagcatctgggatgtccgccagctccccaggggctcgttcagcatctggggagctggcggacatctcagatgtggagggggaggtgggcgccataggagaggaggccccgcagatgaactacatccaggtgacgccgcaggagaaagaagctatagagaggttgaaggccctgggcttcccagagagcctggtcatccaggcctatttcgcgtgtgaaaaaaatgagaacttggctgccaacttcctcctgagtcagaactttgatgacgagtgatgccaggaagccaggccaccgaagcccccaccctacccttattccatgaaagttttataaaagaaaaaatatatatatattcatgtttatttaagaaatggaaaaaaaaatcaaaaatcttaaaaaaacaagcaaacagtccagcttcctgtcctcctaaagtggcccctgttcccatctcccgggccagacagctgtccccccgtcctcctccccagcccagcctgctcagagaagctggcaggactgggaggcgacagatgggcccctcttggcctctgtcccagctctctgcagccagacggaaaggcggctgcttgcctctccatcctccgaaaaacccctgaggacccccccccatcctcttctaggatgaggggaagctggagccccaactttgatcctccattggagtggcccaaatctttccatctagggcaagtcctgaaaggcccaaggccccctccccagtctggccttggcctccagcctggagaagggctaacatcagctcattgtcaaggccacccccaccccagaacagaaccgtgtctctgataaaggttttgaagtgaataaagttttaaaaacta

SEQ ID NO: 376282 - DNA, 1309 bp, Homo sapiens
ttctcatttggaagaggcaaaatgaggtttttacagaagaaatacaaatgtctgtaaccagtacaggtacataaaaactttgttaaaaattcatttgagcgtgagagtggggacaccagagtcactttgcagccccgtgacgtcaccgataacgggcatggcgtcactcaggagaccacgtgtgcgggccgagcaagaagccccgcccacagcgcggagtttagtctgcgcgtacctcgctcgagaacgcgctcgtgcgcatgcccacaaaggccaaggagggagtgcgcaggtcacgtgcgccggtggtcagcgcgcgcattgcctgccccggaagtggtcggcgcgcggcgcggcgcgcctgggcgctaagatggcggcggcgtgagttgcatgttgtgtgaggatcccggggccgccgcgtcgctcgggccccgccatggccgtcaccatcacgctcaaaacgctgcagcagcagaccttcaagatccgcatggagcctgacgagacggtgaaggtgctaaaggagaagatagaagctgagaagggtcgtgatgccttccccgtggctggacagaaactcatctatgccggcaagatcttgagtgacgatgtccctatcagggactatcgcatcgatgagaagaactttgtggtcgtcatggtgaccaagaccaaagccggccagggtacctcagcacccccagaggcctcacccacagctgccccagagtcctctacatccttcccgcctgcccccacctcaggcatgtcccatcccccacctgccgccagagaggacaagagcccatcagaggaatccgcccccacgacgtccccagagtctgtgtcaggctctgttccctcttcaggtagcagcgggcgagaggaagacgcggcctccacgctagtgacgggctctgagtatgagacgatgctgacggagatcatgtccatgggctatgagcgagagcgggtcgtggccgccctgagagccagctacaacaacccccaccgagccgtggagtatctgctcacgggaattcctgggagccccgagccggaacacggttctgtccaggagagccaggtatcggagcagccggccacggaagcagcaggagagaaccccctggagttcctgcgggaccagccccagttccagaacatgcggcaggtgattcagcagaaccctgcgctgctgcccgccctgctccagcagctgggccaggagaaccctcagcttttacagcagaacagaaccgtgtctctgataaaggttttgaagtgaataaagttttaaaaacta

SEQ ID NO: 376283 - DNA, 1403 bp, Homo sapiens
atgcagtggcgggatctctgctcactgcaagctccgcctcccgggttcaggccattctcctgcctcagcctcctgagtagctgggactacaggcgcccgccaccacgcccagctaattttttgtatttttagtagagacagggtttcatcatgtgttggccaggctggactcgaactcctgacctcaagtgatccacctgcctctgcctcccaaagtgctgggattacaggtgtgagccaccgtgcccggcttatttcttggctcacttaaaagcacatcatcagctcttccagggtagggcttgtgtcgactgctatgttgtgtttggccagaacaggctcctctggatatttgcctgactgaatgaaaaagcaagggctgtgatgacctggggagaggaggggaccagggctgtgaattaccttcccttccccaccctctcctgcagcaaatcagccggcaccaggagcagttcatccagatgctgaacgagccccctggggagctggcggacatctcagatgtggagggggaggtgggcgccataggagaggaggccccgcagatgaactacatccaggtgacgccgcaggagaaagaagctatagagagggtaagaggcctggctgaggggtgactgcaggtgggcaggacccctaccctctcctgctcacacttaacctatcttcccacagttgaaggccctgggcttcccagagagcctggtcatccaggcctatttcgcgtgtgaaaaaaatgagaacttggctgccaacttcctcctgagtcagaactttgatgacgagtgatgccaggaagccaggccaccgaagcccccaccctacccttattccatgaaagttttataaaagaaaaaatatatatatattcatgtttatttaagaaatggaaaaaaaaatcaaaaatcttaaaaaaacaagcaaacagtccagcttcctgtcctcctaaagtggcccctgttcccatctcccgggccagacagctgtccccccgtcctcctccccagcccagcctgctcagagaagctggcaggactgggaggcgacagatgggcccctcttggcctctgtcccagctctctgcagccagacggaaaggcggctgcttgcctctccatcctccgaaaaacccctgaggacccccccccatcctcttctaggatgaggggaagctggagccccaactttgatcctccattggagtggcccaaatctttccatctagggcaagtcctgaaaggcccaaggccccctccccagtctggccttggcctccagcctggagaagggctaacatcagctcattgtcaaggccacccccaccccagaacagaaccgtgtctctgataaaggttttgaagtgaataaagttttaaaaacta

SEQ ID NO: 376284 - DNA, 2207 bp, Homo sapiens
ttctcatttggaagaggcaaaatgaggtttttacagaagaaatacaaatgtctgtaaccagtacaggtacataaaaactttgttaaaaattcatttgagcgtgagagtggggacaccagagtcactttgcagccccgtgacgtcaccgataacgggcatggcgtcactcaggagaccacgtgtgcgggccgagcaagaagccccgcccacagcgcggagtttagtctgcgcgtacctcgctcgagaacgcgctcgtgcgcatgcccacaaaggccaaggagggagtgcgcaggtcacgtgcgccggtggtcagcgcgcgcattgcctgccccggaagtggtcggcgcgcggcgcggcgcgcctgggcgctaagatggcggcggcgtgagttgcatgttgtgtgaggatcccggggccgccgcgtcgctcgggccccgccatggccgtcaccatcacgctcaaaacgctgcagcagcagaccttcaagatccgcatggagcctgacgagacggtgaaggtgctaaaggagaagatagaagctgagaagggtcgtgatgccttccccgtggctggacagaaactcatctatgccggcaagatcttgagtgacgatgtccctatcagggactatcgcatcgatgagaagaactttgtggtcgtcatggtgaccaagaccaaagccggccagggtacctcagcacccccagaggcctcacccacagctgccccagagtcctctacatccttcccgcctgcccccacctcaggcatgtcccatcccccacctgccgccagagaggacaagagcccatcagaggaatccgcccccacgacgtccccagagtctgtgtcaggctctgttccctcttcaggtagcagcgggcgagaggaagacgcggcctccacgctagtgacgggctctgagtatgagacgatgctgacggagatcatgtccatgggctatgagcgagagcgggtcgtggccgccctgagagccagctacaacaacccccaccgagccgtggagtatctgctcacgggaattcctgggagccccgagccggaacacggttctgtcccagctctctgcagccagacggaaaggcggctgcttgcctctccatcctccgaaaaacccctgaggacccccccccatcctcttctaggatgaggggaagctggagccccaactttgatcctccattggagtggcccaaatctttccatctagggcaagtcctgaaaggcccaaggccccctccccagtctggccttggcctccagcctggagaagggctaacatcagctcattgtcaaggccacccccaccccagaacagaaccgtgtctctgataaaggttttgaagtgaataaagttttaaaaactaaaaaaaaaaaaaaaaaaaaaaaaaaaaaacacaaaacaaaaaaaaaaaaaaaaaacaacaaaaacaaaaaaaaaaataaaaaacaaaaaacaacaaaaaaaacacacaaaacaaaaaaaaaaaacaaaaacacacaaaaaagggggggggcacggaacaacgatctcaaccaagggggcaacaagaaaaaaacgaccacacagacaagagaagaaagggggaccacaacgcggagacgaagaaaaaaagaggagcaccacgagcaccaaaacaggcgggagaaaggagaaacacaccacagggaacaagatgatagaagaagcgcaaaacacacaggaaggcgggggcaacacagaaagggcaaaaaaccaccaaccagagaacacgagccggagacacaaaacacaggaggcggagcacagaggcgaacaccaacaggacgtagcacactcgcgcggaacaagaaaaaggacagacgacgagaaacaagaaaacacctcccccccgggggaaacaagcaaagcagcacggacagcaaaaagaaacaaagacaaaggagccagcaggcaacgatgaaacagatagaactggagagacgaatagaatgtaaaagtaaggagacaaataagacggcgcagagacaggaagaccacatcagagaacaacacagcacaagcagcagccagagaccaagaaggggaaaaagcggcgccgaaaaaaggctggccactaaaagcacaggacgcacccacacaacaccaccgaacacgaaccaaggcacaacgcaggccagcacagacagaccacagcgacaacaga

SEQ ID NO: 376285 - DNA, 612 bp, Homo sapiens
gctcccatgggacgcaggacactgtgaagccaggccaccgaagcccccaccctacccttattccatgaaagttttataaaagaaaaaatatatatatattcatgtttatttaagaaatggaaaaaaaaatcaaaaatcttaaaaaaacaagcaaacagtccagcttcctgtcctcctaaagtggcccctgttcccatctcccgggccagacagctgtccccccgtcctcctccccagcccagcctgctcagagaagctggcaggactgggaggcgacagatgggcccctcttggcctctgtcccagctctctgcagccagacggaaaggcggctgcttgcctctccatcctccgaaaaacccctgaggacccccccccatcctcttctaggatgaggggaagctggagccccaactttgatcctccattggagtggcccaaatctttccatctagggcaagtcctgaaaggcccaaggccccctccccagtctggccttggcctccagcctggagaagggctaacatcagctcattgtcaaggccacccccaccccagaacagaaccgtgtctctgataaaggttttgaagtgaataaagttttaaaaacta

SEQ ID NO: 376286 - DNA, 1185 bp, Homo sapiens
ttctcatttggaagaggcaaaatgaggtttttacagaagaaatacaaatgtctgtaaccagtacaggtacataaaaactttgttaaaaattcatttgagcgtgagagtggggacaccagagtcactttgcagccccgtgacgtcaccgataacgggcatggcgtcactcaggagaccacgtgtgcgggccgagcaagaagccccgcccacagcgcggagtttagtctgcgcgtacctcgctcgagaacgcgctcgtgcgcatgcccacaaaggccaaggagggagtgcgcaggtcacgtgcgccggtggtcagcgcgcgcattgcctgccccggaagtggtcggcgcgcggcgcggcgcgcctgggcgctaagatggcggcggcgtgagttgcatgttgtgtgaggatcccggggccgccgcgtcgctcgggccccgccatggccgtcaccatcacgctcaaaacgctgcagcagcagaccttcaagatccgcatggagcctgacgagacggtgaaggtgctaaaggagaagatagaagctgagaagggtcgtgatgccttccccgtggctggacagaaactcatctatgccggcaagatcttgagtgacgatgtccctatcagggactatcgcatcgatgagaagaactttgtggtcgtcatggtgaccaagaccaaagccggccagggtacctcagcacccccagaggcctcacccacagctgccccagagtcctctacatccttcccgcctgcccccacctcaggcatgtcccatcccccacctgccgccagagaggacaagagcccatcagaggaatccgcccccacgacgtccccagagtctgtgtcaggctctgttccctcttcaggtagcagcgggcgagaggaagacgcggcctccacgctagtgacgggctctgagtatgagacgatgctgacggagatcatgtccatgggctatgagcgagagcgggtcgtggccgccctgagagccagctacaacaacccccaccgacccgcagatgaactacatccaggtgacgccgcaggagaaagaagctatagagaggttgaaggccctgggcttcccagagagcctggtcatccaggcctatttcgcgtgtgcagaacagaaccgtgtctctgataaaggttttgaagtgaataaagttttaaaaacta

SEQ ID NO: 376287 - DNA, 1364 bp, Homo sapiens
  misc_feature (1233)..(1234): n is a, c, g, or t
  misc_feature (1236)..(1236): n is a, c, g, or t
  misc_feature (1241)..(1241): n is a, c, g, or t
  misc_feature (1250)..(1251): n is a, c, g, or t
  misc_feature (1269)..(1269): n is a, c, g, or t
  misc_feature (1276)..(1276): n is a, c, g, or t
  misc_feature (1285)..(1286): n is a, c, g, or t
  misc_feature (1293)..(1293): n is a, c, g, or t
ttctcatttggaagaggcaaaatgaggtttttacagaagaaatacaaatgtctgtaaccagtacaggtacataaaaactttgttaaaaattcatttgagcgtgagagtggggacaccagagtcactttgcagccccgtgacgtcaccgataacgggcatggcgtcactcaggagaccacgtgtgcgggccgagcaagaagccccgcccacagcgcggagtttagtctgcgcgtacctcgctcgagaacgcgctcgtgcgcatgcccacaaaggccaaggagggagtgcgcaggtcacgtgcgccggtggtcagcgcgcgcattgcctgccccggaagtggtcggcgcgcggcgcggcgcgcctgggcgctaagatggcggcggcgtgagttgcatgttgtgtgaggatcccggggccgccgcgtcgctcgggccccgccatggccgtcaccatcacgctcaaaacgctgcagcagcagaccttcaagatccgcatggagcctgacgagacggtgaaggtgctaaaggagaagatagaagctgagaagggtcgtgatgccttccccgtggctggacagaaactcatctatgccggcaagatcttgagtgacgatgtccctatcagggactatcgcatcgatgagaagaactttgtggtcgtcatggtgaccaagaccaaagccggccagggtacctcagcacccccagaggcctcacccacagtgacgggctctgagtatgagacgatgctgacggagatcatgtccatgggctatgagcgagagcgggtcgtggccgccctgagagccagctacaacaacccccaccgagccgtggagtatctgctcacgggaattcctgggagccccgagccggaacacggttctgtccaggagagccaggtatcggagcagccggccacggaagcagcaggagagaaccccctggagttcctgcgggaccagccccagttccagaacatgcggcaggtgattcagcagaaccctgcgctgctgcccgccctgctccagcagctgggccaggagaaccctcagcttttacagcaaatcagccggcaccaggagcagttcatccagatgctgaacgagccccctggggagctggcggacatctcagatgtggagggggaggtgggcgccataggagaggaggccccgcagatgaactacatccaggtgacgccgcaggagaaagaagctatagagagggtganngncctgngttccaganngctgggcatcaggctaancgcgggngaacaatgnnaactggntgcaattccccggagtcagaattgatgacatgatgcaggagcaggcctgaaacccaactacttatccgaag

SEQ ID NO: 376288 - DNA, 458 bp, Homo sapiens
  misc_feature (38)..(38): n is a, c, g, or t
cgccggcagagctccaccgctgaggccaacgaggccanggctttattgggaagggacaaagcctcaggagctgggtgccccagaggctgctgggtcttgagccacagctgcagccaatgcagcagctcgcgcctccttcttccgtttctgtttttcctccttgaggcgcttgcgctccttcttctctaggtcctggagcagctcctggaagcgggcactccttgggtccacctggtagcccaggagctcctgggcctcagcctgcagtcgggccctcctctccttgtcagcctgggccttctcccagttctcccgctgctgctgctgccagttcacaatcatctgtggcatcttggccatgcactctgcgatgtgctgctccctctcccgacgcttctgctcttcggccagtaactgacccgagtctcgggctgggcagaggaaagcagtgtggggtt

SEQ ID NO: 376289 - DNA, 2124 bp, Homo sapiens
ttctcatttggaagaggcaaaatgaggtttttacagaagaaatacaaatgtctgtaaccagtacaggtacataaaaactttgttaaaaattcatttgagcgtgagagtggggacaccagagtcactttgcagccccgtgacgtcaccgataacgggcatggcgtcactcaggagaccacgtgtgcgggccgagcaagaagccccgcccacagcgcggagtttagtctgcgcgtacctcgctcgagaacgcgctcgtgcgcatgcccacaaaggccaaggagggagtgcgcaggtcacgtgcgccggtggtcagcgcgcgcattgcctgccccggaagtggtcggcgcgcggcgcggcgcgcctgggcgctaagatggcggcggcgtgagttgcatgttgtgtgaggatcccggggccgccgcgtcgctcgggccccgccatggccgtcaccatcacgctcaaaacgctgcagcagcagaccttcaagatccgcatggagcctgacgagacggtgaaggtgctaaaggagaagatagaagctgagaagggtcgtgatgccttccccgtggctggacagaaactcatctatgccggcaagatcttgagtgacgatgtccctatcagggactatcgcatcgatgagaagaactttgtggtcgtcatggtgaccaagaccaaagccggccagggtacctcagcacccccagaggcctcacccacagctgccccagagtcctctacatccttcccgcctgcccccacctcaggcatgtcccatcccccacctgccgccagagaggacaagagcccatcagaggaatccgcccccacgacgtccccagagtctgtgtcaggctctgttccctcttcaggtagcagcgggcgagaggaagacgcggcctccacgctagtgacgggctctgagtatgagacgatgctgacggagatcatgtccatgggctatgagcgagagcgggtcgtggccgccctgagagccagctacaacaacccccaccgagccgtggagtatctgctcacgggaattcctgggagccccgagccggaacacggttctgtccaggagagccaggtatcggagcagccggccacggaagcagcaggagagaaccccctggagttcctgcgggaccagccccagttccagaacatgcggcaggtgattcagcagaaccctgcgctgctgcccgccctgctccagcagctgggccaggagaaccctcagcttttacagcaaatcagccggcaccaggagcagttcatccagatgctgaacgagccccctggggagctggcggacatctcagatgtggagggggaggtgggcgccataggagaggaggccccgcagatgaactacatccaggtgacgccgcaggagaaagaagctatagagaggttgaaggccctgggcttcccagagagcctggtcatccaggcctatttcgcgtgtgaaaaaaatgagaacttggctgccaacttcctcctgagtcagaactttgatgacgagtgatgccaggaagccaggccaccgaagcccccaccctacccttattccatgaaagttttataaaagaaaaaatatatatatattcatgtttatttaagaaatggaaaaaaaaatcaaaaatcttaaaaaaacaagcaaacagtccagcttcctgtcctcctaaagtggcccctgttcccatctcccgggccagacagctgtccccccgtcctcctccccagcccagcctgctcagagaagctggcaggactgggaggcgacagatgggcccctcttggcctctgtcccagctctctgcagccagacggaaaggcggctgcttgcctctccatcctccgaaaaacccctgaggacccccccccatcctcttctaggatgaggggaagctggagccccaactttgatcctccattggagtggcccaaatctttccatctagggcaagtcctgaaaggcccaaggccccctccccagtctggccttggcctccagcctggagaagggctaacatcagctcattgtcaaggccacccccaccccagaacagaaccgtgtctctgataaaggttttgaagtgaataaagttttaaaaacta

SEQ ID NO: 376290 - DNA, 1773 bp, Homo sapiens
ggctggtaccggtccggagatggttaggatggcgtgagttgcatgttgtgtgaggatcccggggccgccgcgtcgctcgggccccgccatggccgtcaccatcacgctcaaaacgctgcagcagcagaccttcaagatccgcatggagcctgacgagacggtgaaggtgctaaaggagaagatagaagctgagaagggtcgtgatgccttccccgtggctggacagaaactcatctatgccggcaagatcttgagtgacgatgtccctatcagggactatcgcatcgatgagaagaactttgtggtcgtcatggtgaccaagaccaaagccggccagggtacctcagcacccccagaggcctcacccacagctgccccagagtcctctacatccttcccgcctgcccccacctcaggcatgtcccatcccccacctgccgccagagaggacaagagcccatcagaggaatccgcccccacgacgtccccagagtctgtgtcaggctctgttccctcttcaggtagcagcgggcgagaggaagacgcggcctccacgctagtgacgggctctgagtatgagacgatgctgacggagatcatgtccatgggctatgagcgagagcgggtcgtggccgccctgagagccagctacaacaacccccaccgagccgtggagtatctgctcacgggaattcctgggagccccgagccggaacacggttctgtccaggagagccaggtatcggagcagccggccacggaagcagcaggagagaaccccctggagttcctgcgggaccagccccagttccagaacatgcggcaggtgattcagcagaaccctgcgctgctgcccgccctgctccagcagctgggccaggagaaccctcagcttttacagcaaatcagccggcaccaggagcagttcatccagatgctgaacgagccccctggggagctggcggacatctcagatgtggagggggaggtgggcgccataggagaggaggccccgcagatgaactacatccaggtgacgccgcaggagaaagaagctatagagaggttgaaggccctgggcttcccagagagcctggtcatccaggcctatttcgcgtgtgaaaaaaatgagaacttggctgccaacttcctcctgagtcagaactttgatgacgagtgatgccaggaagccaggccaccgaagcccccaccctacccttattccatgaaagttttataaaagaaaaaatatatatatattcatgtttatttaagaaatggaaaaaaaaatcaaaaatcttaaaaaaacaagcaaacagtccagcttcctgtcctcctaaagtggcccctgttcccatctcccgggccagacagctgtccccccgtcctcctccccagcccagcctgctcagagaagctggcaggactgggaggcgacagatgggcccctcttggcctctgtcccagctctctgcagccagacggaaaggcggctgcttgcctctccatcctccgaaaaacccctgaggacccccccccatcctcttctaggatgaggggaagctggagccccaactttgatcctccattggagtggcccaaatctttccatctagggcaagtcctgaaaggcccaaggccccctccccagtctggccttggcctccagcctggagaagggctaacatcagctcattgtcaaggccacccccaccccagaacagaaccgtgtctctgataaaggttttgaagtgaataaagttttaaaaacta

SEQ ID NO: 376291 - DNA, 2390 bp, Homo sapiens
ttctcatttggaagaggcaaaatgaggtttttacagaagaaatacaaatgtctgtaaccagtacaggtacataaaaactttgttaaaaattcatttgagcgtgagagtggggacaccagagtcactttgcagccccgtgacgtcaccgataacgggcatggcgtcactcaggagaccacgtgtgcgggccgagcaagaagccccgcccacagcgcggagtttagtctgcgcgtacctcgctcgagaacgcgctcgtgcgcatgcccacaaaggccaaggagggagtgcgcaggtcacgtgcgccggtggtcagcgcgcgcattgcctgccccggaagtggtcggcgcgcggcgcggcgcgcctgggcgctaagatggcggcggcgtgagttgcatgttgtgtgaggatcccggggccgccgcgtcgctcgggccccgccatggccgtcaccatcacgctcaaaacgctgcagcagcagaccttcaagatccgcatggagcctgacgagacggtgaaggtgctaaaggagaagatagaagctgagaagggtcgtgatgccttccccgtggctggacagaaactcatctatgccggcaagatcttgagtgacgatgtccctatcagggactatcgcatcgatgagaagaactttgtggtcgtcatggtgaccaagaccaaagccggccagggtacctcagcacccccagaggcctcacccacagctgccccagagtcctctacatccttcccgcctgcccccacctcaggcatgtcccatcccccacctgccgccagagaggacaagagcccatcagaggaatccgcccccacgacgtccccagagtctgtgtcaggctctgttccctcttcaggtagcagcgggcgagaggaagacgcggcctccacgctagtgacgggctctgagtatgagacgatgctgacggagatcatgtccatgggctatgagcgagagcgggtcgtggccgccctgagagccagctacaacaacccccaccgagccgtggagtatctgctcacggtgaggtggggcttccgcctcccggggaggccttgagggagtacccgggcgtcactgccctgatgggcggttgggaaggcaaaacctgccctgaaaagcctttgggtagtgattctagccactaaaggcttcccacaggaggctggatgtgagtgatgggtgggcctctggagggcagggccgaggcctcatctgtgtcctgccagggcatggaggagggtggcagcaggaggtctgtgcattagaactaaacaggacccctgacaggaattcctgggagccccgagccggaacacggttctgtccaggagagccaggtatcggagcagccggccacggaagcagcaggagagaaccccctggagttcctgcgggaccagccccagttccagaacatgcggcaggtgattcagcagaaccctgcgctgctgcccgccctgctccagcagctgggccaggagaaccctcagcttttacagcaaatcagccggcaccaggagcagttcatccagatgctgaacgagccccctggggagctggcggacatctcagatgtggagggggaggtgggcgccataggagaggaggccccgcagatgaactacatccaggtgacgccgcaggagaaagaagctatagagaggttgaaggccctgggcttcccagagagcctggtcatccaggcctatttcgcgtgtgaaaaaaatgagaacttggctgccaacttcctcctgagtcagaactttgatgacgagtgatgccaggaagccaggccaccgaagcccccaccctacccttattccatgaaagttttataaaagaaaaaatatatatatattcatgtttatttaagaaatggaaaaaaaaatcaaaaatcttaaaaaaacaagcaaacagtccagcttcctgtcctcctaaagtggcccctgttcccatctcccgggccagacagctgtccccccgtcctcctccccagcccagcctgctcagagaagctggcaggactgggaggcgacagatgggcccctcttggcctctgtcccagctctctgcagccagacggaaaggcggctgcttgcctctccatcctccgaaaaacccctgaggacccccccccatcctcttctaggatgaggggaagctggagccccaactttgatcctccattggagtggcccaaatctttccatctagggcaagtcctgaaaggcccaaggccccctccccagtctggccttggcctccagcctggagaagggctaacatcagctcattgtcaaggccacccccaccccagaacagaaccgtgtctctgataaaggttttgaagtgaataaagttttaaaaacta

SEQ ID NO: 376292 - DNA, 1674 bp, Homo sapiens
gacccccatgcctcaggatactcctcaatagccatcgctgtagtatatccaaagacaaccagtgaaggtgctaaaggagaagatagaagctgagaagggtcgtgatgccttccccgtggctggacagaaactcatctatgccggcaagatcttgagtgacgatgtccctatcagggactatcgcatcgatgagaagaactttgtggtcgtcatggtgaccaagaccaaagccggccagggtacctcagcacccccagaggcctcacccacagctgccccagagtcctctacatccttcccgcctgcccccacctcaggcatgtcccatcccccacctgccgccagagaggacaagagcccatcagaggaatccgcccccacgacgtccccagagtctgtgtcaggctctgttccctcttcaggtagcagcgggcgagaggaagacgcggcctccacgctagtgacgggctctgagtatgagacgatgctgacggagatcatgtccatgggctatgagcgagagcgggtcgtggccgccctgagagccagctacaacaacccccaccgagccgtggagtatctgctcacgggaattcctgggagccccgagccggaacacggttctgtccaggagagccaggtatcggagcagccggccacggaagcagcaggagagaaccccctggagttcctgcgggaccagccccagttccagaacatgcggcaggtgattcagcagaaccctgcgctgctgcccgccctgctccagcagctgggccaggagaaccctcagcttttacagcaaatcagccggcaccaggagcagttcatccagatgctgaacgagccccctggggagctggcggacatctcagatgtggagggggaggtgggcgccataggagaggaggccccgcagatgaactacatccaggtgacgccgcaggagaaagaagctatagagaggttgaaggccctgggcttcccagagagcctggtcatccaggcctatttcgcgtgtgaaaaaaatgagaacttggctgccaacttcctcctgagtcagaactttgatgacgagtgatgccaggaagccaggccaccgaagcccccaccctacccttattccatgaaagttttataaaagaaaaaatatatatatattcatgtttatttaagaaatggaaaaaaaaatcaaaaatcttaaaaaaacaagcaaacagtccagcttcctgtcctcctaaagtggcccctgttcccatctcccgggccagacagctgtccccccgtcctcctccccagcccagcctgctcagagaagctggcaggactgggaggcgacagatgggcccctcttggcctctgtcccagctctctgcagccagacggaaaggcggctgcttgcctctccatcctccgaaaaacccctgaggacccccccccatcctcttctaggatgaggggaagctggagccccaactttgatcctccattggagtggcccaaatctttccatctagggcaagtcctgaaaggcccaaggccccctccccagtctggccttggcctccagcctggagaagggctaacatcagctcattgtcaaggccacccccaccccagaacagaaccgtgtctctgataaaggttttgaagtgaataaagttttaaaaacta

SEQ ID NO: 376293 - DNA, 1624 bp, Homo sapiens
ttctcatttggaagaggcaaaatgaggtttttacagaagaaatacaaatgtctgtaaccagtacaggtacataaaaactttgttaaaaattcatttgagcgtgagagtggggacaccagagtcactttgcagccccgtgacgtcaccgataacgggcatggcgtcactcaggagaccacgtgtgcgggccgagcaagaagccccgcccacagcgcggagtttagtctgcgcgtacctcgctcgagaacgcgctcgtgcgcatgcccacaaaggccaaggagggagtgcgcaggtcacgtgcgccggtggtcagcgcgcgcattgcctgccccggaagtggtcggcgcgcggcgcggcgcgcctgggcgctaagatggcggcggcgtgagttgcatgttgtgtgaggatcccggggccgccgcgtcgctcgggccccgccatggccgtcaccatcacgctcaaaacgctgcagcagcagaccttcaagatccgcatggagcctgacgagacggtgaaggtgctaaaggagaagatagaagctgagaagggtcgtgatgccttccccgtggctggacagaaactcatctatgccggcaagatcttgagtgacgatgtccctatcagggactatcgcatcgatgagaagaactttgtggtcgtcatggtgaccaagaccaaagccggccagggtacctcagcacccccagaggcctcacccacagctgccccagagtcctctacatccttcccgcctgcccccacctcaggcatgtcccatcccccacctgccgccagagaggacaagagcccatcagaggaatccgcccccacgacgtccccagagtctgtgtcaggctctgttccctcttcaggtagcagcgggcgagaggaagacgcggcctccacgctagtgacgggctctgagtatgagacgatgctgacggagatcatgtccatgggctatgagcgagagcgggtcgtggccgccctgagagccagctacaacaacccccaccgagccgtggagtatctgctcacgggaattcctgggagccccgagccggaacacggttctgtccaggagagccaggtatcggagcagccggccacggaagcagcaggagagaaccccctggagttcctgcgggaccagccccagttccagaacatgcggcaggtgattcagcagaaccctgcgctgctgcccgccctgctccagcagctgggccaggagaaccctcagcttttacagcaaatcagccggcaccaggagcagttcatccagatgctgaacgagccccctggggagctggcggacatctcagatgtggagggggaggtgggcgccataggagaggaggccccgcagatgaactacatccaggtgacgccgcaggagaaagaagctatagagaggttgaaggccctgggcttcccagagagcctggtcatccaggcctatttcgcgtgtgaaaaaaatgagaacttggctgccaacttcctcctgagtcagaactttgatgacgagtgatgccaggaagccaggccaccgaagcccccaccctacccttattccatgaaagttttataaaagaaaaaatatatatatattcatgtttattta

SEQ ID NO: 376294 - DNA, 1780 bp, Homo sapiens
ttctcatttggaagaggcaaaatgaggtttttacagaagaaatacaaatgtctgtaaccagtacaggtacataaaaactttgttaaaaattcatttgagcgtgagagtggggacaccagagtcactttgcagccccgtgacgtcaccgataacgggcatggcgtcactcaggagaccacgtgtgcgggccgagcaagaagccccgcccacagcgcggagtttagtctgcgcgtacctcgctcgagaacgcgctcgtgcgcatgcccacaaaggccaaggagggagtgcgcaggtcacgtgcgccggtggtcagcgcgcgcattgcctgccccggaagtggtcggcgcgcggcgcggcgcgcctgggcgctaagatggcggcggcgtgagttgcatgttgtgtgaggatcccggggccgccgcgtcgctcgggccccgccatggccgtcaccatcacgctcaaaacgctgcagcagcagaccttcaagatccgcatggagcctgacgagacggtgaaggtgctaaaggagaagatagaagctgagaagggtcgtgatgccttccccgtggctggacagaaactcatctatgccggcaagatcttgagtgacgatgtccctatcagggactatcgcatcgatgagaagaactttgtggtcgtcatggtgaccaagaccaaagccggccagggtacctcagcacccccagaggcctcacccacagctgccccagagtcctctacatccttcccgcctgcccccacctcaggcatgtcccatcccccacctgccgccagagaggacaagagcccatcagaggaatccgcccccacgacgtccccagagtctgtgtcaggctctgttccctcttcaggtagcagcgggcgagaggaagacgcggcctccacgctagtgacgggctctgagtatgagacgatgctgacggagatcatgtccatgggctatgagcgagagcgggtcgtggccgccctgagagccagctacaacaacccccaccgacccgcagatgaactacatccaggtgacgccgcaggagaaagaagctatagagaggttgaaggccctgggcttcccagagagcctggtcatccaggcctatttcgcgtgtgaaaaaaatgagaacttggctgccaacttcctcctgagtcagaactttgatgacgagtgatgccaggaagccaggccaccgaagcccccaccctacccttattccatgaaagttttataaaagaaaaaatatatatatattcatgtttatttaagaaatggaaaaaaaaatcaaaaatcttaaaaaaacaagcaaacagtccagcttcctgtcctcctaaagtggcccctgttcccatctcccgggccagacagctgtccccccgtcctcctccccagcccagcctgctcagagaagctggcaggactgggaggcgacagatgggcccctcttggcctctgtcccagctctctgcagccagacggaaaggcggctgcttgcctctccatcctccgaaaaacccctgaggacccccccccatcctcttctaggatgaggggaagctggagccccaactttgatcctccattggagtggcccaaatctttccatctagggcaagtcctgaaaggcccaaggccccctccccagtctggccttggcctccagcctggagaagggctaacatcagctcattgtcaaggccacccccaccccagaacagaaccgtgtctctgataaaggttttgaagtgaataaagttttaaaaacta

SEQ ID NO: 376295 - DNA, 1109 bp, Homo sapiens
gcacaccacgacgtgcgtattgtcggaattcctgggagccccgagccggaacacggttctgtccaggagagccaggtatcggagcagccggccacggaagcagcaggagagaaccccctggagttcctgcgggaccagccccagttccagaacatgcggcaggtgattcagcagaaccctgcgctgctgcccgccctgctccagcagctgggccaggagaaccctcagcttttacagcaaatcagccggcaccaggagcagttcatccagatgctgaacgagccccctggggagctggcggacatctcagatgtggagggggaggtgggcgccataggagaggaggccccgcagatgaactacatccaggtgacgccgcaggagaaagaagctatagagaggttgaaggccctgggcttcccagagagcctggtcatccaggcctatttcgcgtgtgaaaaaaatgagaacttggctgccaacttcctcctgagtcagaactttgatgacgagtgatgccaggaagccaggccaccgaagcccccaccctacccttattccatgaaagttttataaaagaaaaaatatatatatattcatgtttatttaagaaatggaaaaaaaaatcaaaaatcttaaaaaaacaagcaaacagtccagcttcctgtcctcctaaagtggcccctgttcccatctcccgggccagacagctgtccccccgtcctcctccccagcccagcctgctcagagaagctggcaggactgggaggcgacagatgggcccctcttggcctctgtcccagctctctgcagccagacggaaaggcggctgcttgcctctccatcctccgaaaaacccctgaggacccccccccatcctcttctaggatgaggggaagctggagccccaactttgatcctccattggagtggcccaaatctttccatctagggcaagtcctgaaaggcccaaggccccctccccagtctggccttggcctccagcctggagaagggctaacatcagctcattgtcaaggccacccccaccccagaacagaaccgtgtctctgataaaggttttgaagtgaataaagttttaaaaacta

SEQ ID NO: 376296 - DNA, 1694 bp, Homo sapiens
ttctcatttggaagaggcaaaatgaggtttttacagaagaaatacaaatgtctgtaaccagtacaggtacataaaaactttgttaaaaattcatttgagcgtgagagtggggacaccagagtcactttgcagccccgtgacgtcaccgataacgggcatggcgtcactcaggagaccacgtgtgcgggccgagcaagaagccccgcccacagcgcggagtttagtctgcgcgtacctcgctcgagaacgcgctcgtgcgcatgcccacaaaggccaaggagggagtgcgcaggtcacgtgcgccggtggtcagcgcgcgcattgcctgccccggaagtggtcggcgcgcggcgcggcgcgcctgggcgctaagatggcggcggcgtgagttgcatgttgtgtgaggatcccggggccgccgcgtcgctcgggccccgccatggccgtcaccatcacgctcaaaacgctgcagcagcagaccttcaagatccgcatggagcctgacgagacggtgaaggtgctaaaggagaagatagaagctgagaagggtcgtgatgccttccccgtggctggacagaaactcatctatgccggcaagatcttgagtgacgatgtccctatcagggactatcgcatcgatgagaagaactttgtggtcgtcatggtgaccaagaccaaagccggccagggtacctcagcacccccagaggcctcacccacagctgccccagagtcctctacatccttcccgcctgcccccacctcaggcatgtcccatcccccacctgccgccagagaggacaagagcccatcagaggaatccgcccccacgacgtccccagagtctgtgtcaggctctgttccctcttcaggtagcagcgggcgagaggaagacgcggcctccacgctagtgacgggctctgagtatgagacgatgctgacggagatcatgtccatgggctatgagcgagagcgggtcgtggccgccctgagagccagctacaacaacccccaccgagccgtggagtatctgctcacgggaattcctgggagccccgagccggaacacggttctgtccaggagagccaggtatcggagcagccggccacggaagcagcaggagagaaccccctggagttcctgcgggaccagccccagttccagaacatgcggcaggtgattcagcagaaccctgcgctgctgcccgccctgctccagcagctgggccaggagaaccctcagcttttacagcaaatcagccggcaccaggagcagttcatccagatgctgaacgagccccctggggagctggcggacatctcagatgtggagggggaggtgggcgccataggagaggaggccccgcagatgaactacatccaggtgacgccgcaggagaaagaagctatagagaggttgaaggccctgggcttcccagagagcctggtcatccaggcctatttcgcgtgtggatgaggggaagctggagccccaactttgatcctccattggagtggcccaaatctttccatctagggcaagtcctgaaaggcccaaggccccctccccagtctggccttggcctccagcctggagaagggctaacatcagctcattgtcaaggccacccccaccccagaacagaaccgtgtctctgataaaggttttgaagtgaataaagttttaaaaacta

SEQ ID NO: 376297 - DNA, 1388 bp, Homo sapiens
ttctcatttggaagaggcaaaatgaggtttttacagaagaaatacaaatgtctgtaaccagtacaggtacataaaaactttgttaaaaattcatttgagcgtgagagtggggacaccagagtcactttgcagccccgtgacgtcaccgataacgggcatggcgtcactcaggagaccacgtgtgcgggccgagcaagaagccccgcccacagcgcggagtttagtctgcgcgtacctcgctcgagaacgcgctcgtgcgcatgcccacaaaggccaaggagggagtgcgcaggtcacgtgcgccggtggtcagcgcgcgcattgcctgccccggaagtggtcggcgcgcggcgcggcgcgcctgggcgctaagatggcggcggcgtgagttgcatgttgtgtgaggatcccggggccgccgcgtcgctcgggccccgccatggccgtcaccatcacgctcaaaacgctgcagcagcagaccttcaagatccgcatggagcctgacgagacggtgaaggtgctaaaggagaagatagaagctgagaagggtcgtgatgccttccccgtggctggacagaaactcatctatgccggcaagatcttgagtgacgatgtccctatcagggactatcgcatcgatgagaagaactttgtggtcgtcatggtgaccaagaccaaagccggccagggtacctcagcacccccagaggcctcacccacagctgccccagagtcctctacatccttcccgcctgcccccacctcaggcatgtcccatcccccacctgccgccagagaggacaagagcccatcagaggaatccgcccccacgacgtccccagagtctgtgtcaggctctgttccctcttcaggtagcagcgggcgagaggaagacgcggcctccacgctagtgacgggctctgagtatgagacgatgctgacggagatcatgtccatgggctatgagcgagagcgggtcgtggccgccctgagagccagctacaacaacccccaccgagccgtggagtatctgctcacgggaattcctgggagccccgagccggaacacggttctgtcccagctctctgcagccagacggaaaggcggctgcttgcctctccatcctccgaaaaacccctgaggacccccccccatcctcttctaggatgaggggaagctggagccccaactttgatcctccattggagtggcccaaatctttccatctagggcaagtcctgaaaggcccaaggccccctccccagtctggccttggcctccagcctggagaagggctaacatcagctcattgtcaaggccacccccaccccagaacagaaccgtgtctctgataaaggttttgaagtgaataaagttttaaaaacta

SEQ ID NO: 376298 - DNA, 1048 bp, Homo sapiens
gcaaattaggctaggtagaggccgcgggttaattcggccgaggcgtgagttgcatgttgtgtgaggatcccggggccgccgcgtcgctcgggccccgccatggccgtcaccatcacgctcaaaacgctgcagcagcagaccttcaagatccgcatggagcctgacgagacggtgaaggtgctaaaggagaagatagaagctgagaagggtcgtgatgccttccccgtggctggacagaaactcatctatgccggcaagatcttgagtgacgatgtccctatcagggactatcgcatcgatgagaagaactttgtggtcgtcatggtgaccaagaccaaagccggccagggtacctcagcacccccagaggcctcacccacagctgccccagagtcctctacatccttcccgcctgcccccacctcaggcatgtcccatcccccacctgccgccagagaggacaagagcccatcagaggaatccgcccccacgacgtccccagagtctgtgtcaggctctgttccctcttcaggtagcagcgggcgagaggaagacgcggcctccacgctagtgacgggctctgagtatgagacgatgctgacggagatcatgtccatgggctatgagcgagagcgggtcgtggccgccctgagagccagctacaacaacccccaccgagccgtggagtatctgctcacgggaattcctgggagccccgagccggaacacggttctgtcccagctctctgcagccagacggaaaggcggctgcttgcctctccatcctccgaaaaacccctgaggacccccccccatcctcttctaggatgaggggaagctggagccccaactttgatcctccattggagtggcccaaatctttccatctagggcaagtcctgaaaggcccaaggccccctccccagtctggccttggcctccagcctggagaagggctaacatcagctcattgtcaaggccacccccaccccagaacagaaccgtgtctctgataaaggttttgaagtgaataaagttttaaaaacta

SEQ ID NO: 376299 - DNA, 431 bp, Homo sapiens
acttccggcgacgggccccctccgcgcgtactgcgggccccacgggtgttagtggcgggggcggcagagtccgggtgggttgtcgcgacggagccgggcctcttcgccgtcttgagacggggctggcgagaagggcccctcacggagttgccatgggcgtctaaccgcggcagccaggcccctctctacgtgagaccccggcccccctcccctttctgcagcccgcccgccacctgcgcgccgcgtggcctccgccggcgcctgcccgccccgcgcctccgtctcccacggtaagaggcggtgagggccgcgtcgcctctccctggaggactcgtcgtgaggtgtcggcgagcccctccgcccaccgccccgccccaggccagcgctccattggcgacagaggcgggcacggccgccctcgggcccgagag

SEQ ID NO: 376300 - DNA, 2232 bp, Homo sapiens
acttccggcgacgggccccctccgcgcgtactgcgggccccacgggtgttagtggcgggggcggcagagtccgggtgggttgtcgcgacggagccgggcctcttcgccgtcttgagacggggctggcgagaagggcccctcacggagttgccatgggcgtctaaccgcggcagccaggcccctctctacgtgagaccccggcccccctcccctttctgcagcccgcccgccacctgcgcgccgcgtggcctccgccggcgcctgcccgccccgcgcctccgtctcccacggagcaggccgggctctcgccatgggtcactgtcgcctctgccacgggaagttttcctcgagaagcctgcgcagcatctccgagagggcgcctggagcgagcatggagaggccatccgcagaggagcgcgtgctcgtacgggacttccagcgcctgcttggtgtggctgtccgccaggaccccaccttgtctccgtttgtctgcaagagctgccacgcccagttctaccagtgccacagccttctcaagtccttcctgcagagggtcaacgcctccccggctggtcgccggaagccttgtgcaaaggtcggtgcccagcccccaacaggggcagaggagggagcgtgtctggtggatctgatcacatccagcccccagtgcctgcacggcttggtggggtgggtgcatggacatgcggccagctgcggggccctgccccaccttcagaggacactgtcctccgagtactgcggcgtcatccaggtcgtgtggggctgcgaccagggccacgactacaccatggataccagctccagctgcaaggccttcttgctggacagtgcgctggcagtcaagtggccatgggacaaagagacggcgccacggctgccccagcaccgagggtggaaccctggggatgcccctcagacctcccagggtagagggacagggaccccagttggggctgagaccaagaccctgcccagcacggatgtggcccagcctccttcggacagcgacgcggtggggcccaggtcgggcttcccacctcagccaagcctgcccctttgcagggccccagggcagttgggtgagaagcagcttccatcttcaacctcggatgatcggagacgtcttgagtgaagatgaaaatgacaagaagcaaaatgcccagtcttcggacgagtcctttgagccttacccagaaaggaaagtctctggtaagaagagtgaaagcaaagaagccaagaagtctgaagaaccaagaattcggaagaagccgggacccaagcccggatggaagaagaagcttcgttgtgagagggaggagcttcccaccatctacaagtgtccttaccagggctgcacggccgtgtaccgaggcgctgacggcatgaagaagcacatcaaggagcaccacgaggaggtccgggagcggccctgcccccaccctggctgcaacaaggttttcatgatcgaccgctacctgcagcgccacgtgaagctcatccacacagaggtgcggaactatatctgtgacgaatgtggacaaaccttcaagcagcggaagcaccttctcgtccaccaaatgcgacattcgggagccaagcctttgcagtgtgaggtctgtgggttccagtgcaggcagcgggcatccctcaagtaccacatgaccaaacacaaggctgagactgagctggactttgcctgtgaccagtgtggccggcggtttgagaaggcccacaacctcaatgtacacatgtccatggtgcacccgctgacacagacccaggacaaggccctgcccctggaggcggaaccaccacctgggccaccgagcccctctgtgaccacagagggccaggcggtgaagcccgaacccacctgaggacggcagtgaggatgagcacctctagcagcctggactccgcagtggctgtgtcagcctcacccttcgtgtgcacccgcatgggagggtcggagggtgctgcccgcccttggtgctggaggcgggcttggtgtccggctcaagtagccttcctctgctctgggaccagtggtttattttcccgcaaacgctgagtgactcggggccggacagttcataaataattgattcctttccccactaaagcagtcgaggagatttgtaatccactttttagtgcaacaagagctccatgttatgcttgtaataaattatttacacgggagctgggctg

SEQ ID NO: 376301 - DNA, 2333 bp, Homo sapiens
acttccggcgacgggccccctccgcgcgtactgcgggccccacgggtgttagtggcgggggcggcagagtccgggtgggttgtcgcgacggagccgggcctcttcgccgtcttgagacggggctggcgagaagggcccctcacggagttgccatgggcgtctaaccgcggcagccaggcccctctctacgtgagaccccggcccccctcccctttctgcagcccgcccgccacctgcgcgccgcgtggcctccgccggcgcctgcccgccccgcgcctccgtctcccacggagcaggccgggctctcgccatgggtcactgtcgcctctgccacgggaagttttcctcgagaagcctgcgcagcatctccgagagggcgcctggagcgagcatggagaggccatccgcagaggagcgcgtgctcgtacgggacttccagcgcctgcttggtgtggctgtccgccaggaccccaccttgtctccgtttgtctgcaagagctgccacgcccagttctaccagtgccacagccttctcaagtccttcctgcagagggtcaacgcctccccggctggtcgccggaagccttgtgcaaaggtcggtgcccagcccccaacaggggcagaggagggagcgtgtctggtggatctgatcacatccagcccccagtgcctgcacggcttggtggggtgggtgcatggacatgcggccagctgcggggccctgccccaccttcagaggacactgtcctccgagtactgcggcgtcatccaggtcgtgtggggctgcgaccagggccacgactacaccatggataccagctccagctgcaaggccttcttgctggacagtgcgctggcagtcaagtggccatgggacaaagagacggcgccacggctgccccagcaccgagggtggaaccctggggatgcccctcagacctcccagggtagagggacagggaccccagttggggctgagaccaagaccctgcccagcacggatgtggcccagcctccttcggacagcgacgcggtggggcccaggtcgggcttcccacctcagccaagcctgcccctttgcagggccccagggcagttgggtgagaagcagcttccatcttcaacctcggatgatcgggtaaaagacgagttcagtgacctttctgagggagacgtcttgagtgaagatgaaaatgacaagaagcaaaatgcccagtcttcggacgagtcctttgagccttacccagaaaggaaagtctctggtaagaagagtgaaagcaaagaagccaagaagtctgaagaaccaagaattcggaagaagccgggacccaagcccggatggaagaagaagcttcgttgtgagaggtgatgcctgcaacgcgaggctcgccctgcctgtcggggccggggctccatgcatgctcttcattgcagggaggagcttcccaccatctacaagtgtccttaccagggctgcacggccgtgtaccgaggcgctgacggcatgaagaagcacatcaaggagcaccacgaggaggtccgggagcggccctgcccccaccctggctgcaacaaggttttcatgatcgaccgctacctgcagcgccacgtgaagctcatccacacagaggtgcggaactatatctgtgacgaatgtggacaaaccttcaagcagcggaagcaccttctcgtccaccaaatgcgacattcgggagccaagcctttgcagtgtgaggtctgtgggttccagtgcaggcagcgggcatccctcaagtaccacatgaccaaacacaaggctgagactgagctggactttgcctgtgaccagtgtggccggcggtttgagaaggcccacaacctcaatgtacacatgtccatggtgcacccgctgacacagacccaggacaaggccctgcccctggaggcggaaccaccacctgggccaccgagcccctctgtgaccacagagggccaggcggtgaagcccgaacccacctgaggacggcagtgaggatgagcacctctagcagcctggactccgcagtggctgtgtcagcctcacccttcgtgtgcacccgcatgggagggtcggagggtgctgcccgcccttggtgctggaggcgggcttggtgtccggctcaagtagccttcctctgctctgggaccagtggtttattttcccgcaaacgctgagtgactcggggccggacagttcataaataattgattcctttccccactaaagcagtcgaggagatttgtaatccactttttagtgcaacaagagctccatgttatgcttgtaataaattatttacacgggagctgggctg

SEQ ID NO: 376302 - DNA, 2697 bp, Homo sapiens
acttccggcgacgggccccctccgcgcgtactgcgggccccacgggtgttagtggcgggggcggcagagtccgggtgggttgtcgcgacggagccgggcctcttcgccgtcttgagacggggctggcgagaagggcccctcacggagttgccatgggcgtctaaccgcggcagccaggcccctctctacgtgagaccccggcccccctcccctttctgcagcccgcccgccacctgcgcgccgcgtggcctccgccggcgcctgcccgccccgcgcctccgtctcccacggagcaggccgggctctcgccatgggtcactgtcgcctctgccacgggaagttttcctcgagaagcctgcgcagcatctccgagagggcgcctggagcgagcatggagaggccatccgcagaggagcgcgtgctcgtacgggacttccagcgcctgcttggtgtggctgtccgccaggaccccaccttgtctccgtttgtctgcaagagctgccacgcccagttctaccagtgccacagccttctcaagtccttcctgcagagggtcaacgcctccccggctggtcgccggaagccttgtgcaaaggtcggtgcccagcccccaacaggggcagaggagggagcgtgtctggtggatctgatcacatccagcccccagtgcctgcacggcttggtggggtgggtgcatggacatgcggccagctgcggggccctgccccaccttcagaggacactgtcctccgagtactgcggcgtcatccaggtcgtgtggggctgcgaccagggccacgactacaccatggataccagctccagctgcaaggccttcttgctggacagtgcgctggcagtcaagtggccatgggacaaagagacggcgccacggctgccccagcaccgagggtggaaccctggggatgcccctcagacctcccagggtagagggacagggaccccagttggggctgagaccaagaccctgcccagcacggatgtggcccagcctccttcggacagcgacgcggtggggcccaggtcgggcttcccacctcagccaagcctgcccctttgcagggccccagggcagttgggtgagaagcagcttccatcttcaacctcggatgatcgggtaaaagacgagttcagtgacctttctgagggagacgtcttgagtgaagatgaaaatgacaagaagcaaaatgcccagtcttcggacgagtcctttgagccttacccagaaaggaaagtctctggtaagaagagtgaaagcaaagaagccaagaagtctgaagaaccaagaattcggaagaagccgggacccaagcccggatggaagaagaagcttcgttgtgagaggtgatgcctgcaacgcgaggctcgccctgcctgtcggggccggggctccatgcatgctcttcattgcagggaggagcttcccaccatctacaagtgtccttaccagggctgcacggccgtgtaccgaggcgctgacggcatgaaggtgagcactggctgtgcctgacccaggcccggcagctgtcagtgtgaacctgggggaggtagcaggtgtttctgcagcctaactcagacttgcgcccaaggacactttgacctaggttaaccgagacctgaagcagtcctagccagtgccatccttgggggtagatgtgaggccagactttcacttgagacaccccccgggggggtctagaagtttcttggagtgaagctgtgaaggagccagtggtgtcgctggaggaggagttggatctgccttccaggggcctcagctgtcacctactgagggctcgtgccatgtggcccgggtgcggctctgagggtctctcaccgagtctctccttcagaagcacatcaaggagcaccacgaggaggtccgggagcggccctgcccccaccctggctgcaacaaggttttcatgatcgaccgctacctgcagcgccacgtgaagctcatccacacagaggtgcggaactatatctgtgacgaatgtggacaaaccttcaagcagcggaagcaccttctcgtccaccaaatgcgacattcgggagccaagcctttgcagtgtgaggtctgtgggttccagtgcaggcagcgggcatccctcaagtaccacatgaccaaacacaaggctgagactgagctggactttgcctgtgaccagtgtggccggcggtttgagaaggcccacaacctcaatgtacacatgtccatggtgcacccgctgacacagacccaggacaaggccctgcccctggaggcggaaccaccacctgggccaccgagcccctctgtgaccacagagggccaggcggtgaagcccgaacccacctgaggacggcagtgaggatgagcacctctagcagcctggactccgcagtggctgtgtcagcctcacccttcgtgtgcacccgcatgggagggtcggagggtgctgcccgcccttggtgctggaggcgggcttggtgtccggctcaagtagccttcctctgctctgggaccagtggtttattttcccgcaaacgctgagtgactcggggccggacagttcataaataattgattcctttccccactaaagcagtcgaggagatttgtaatccactttttagtgcaacaagagctccatgttatgcttgtaataaattatttacacgggagctgggctg

SEQ ID NO: 376303 - DNA, 1512 bp, Homo sapiens
tggagagacaaaaaacattttgcaaatggagatcagaaaccattgaatttgggaacctctttttttcagagtctctggtaagaagagtgaaagcaaagaagccaagaagtctgaagaaccaagaattcggaagaagccgggacccaagcccggatggaagaagaagcttcgttgtgagaggtgatgcctgcaacgcgaggctcgccctgcctgtcggggccggggctccatgcatgctcttcattgcagggaggagcttcccaccatctacaagtgtccttaccagggctgcacggccgtgtaccgaggcgctgacggcatgaaggtgagcactggctgtgcctgacccaggcccggcagctgtcagtgtgaacctgggggaggtagcaggtgtttctgcagcctaactcagacttgcgcccaaggacactttgacctaggttaaccgagacctgaagcagtcctagccagtgccatccttgggggtagatgtgaggccagactttcacttgagacaccccccgggggggtctagaagtttcttggagtgaagctgtgaaggagccagtggtgtcgctggaggaggagttggatctgccttccaggggcctcagctgtcacctactgagggctcgtgccatgtggcccgggtgcggctctgagggtctctcaccgagtctctccttcagaagcacatcaaggagcaccacgaggaggtccgggagcggccctgcccccaccctggctgcaacaaggttttcatgatcgaccgctacctgcagcgccacgtgaagctcatccacacagaggtgcggaactatatctgtgacgaatgtggacaaaccttcaagcagcggaagcaccttctcgtccaccaaatgcgacattcgggagccaagcctttgcagtgtgaggtctgtgggttccagtgcaggcagcgggcatccctcaagtaccacatgaccaaacacaaggctgagactgagctggactttgcctgtgaccagtgtggccggcggtttgagaaggcccacaacctcaatgtacacatgtccatggtgcacccgctgacacagacccaggacaaggccctgcccctggaggcggaaccaccacctgggccaccgagcccctctgtgaccacagagggccaggcggtgaagcccgaacccacctgaggacggcagtgaggatgagcacctctagcagcctggactccgcagtggctgtgtcagcctcacccttcgtgtgcacccgcatgggagggtcggagggtgctgcccgcccttggtgctggaggcgggcttggtgtccggctcaagtagccttcctctgctctgggaccagtggtttattttcccgcaaacgctgagtgactcggggccggacagttcataaataattgattcctttccccactaaagcagtcgaggagatttgtaatccactttttagtgcaacaagagctccatgttatgcttgtaataaattatttacacgggagctgggctg

SEQ ID NO: 376304 - DNA, 800 bp, Homo sapiens
gtcttcccagctgtgatggtttcacattgtcatcgtcgtccccccgggaggttggagcatcaggggcctggactcactggactctcccctctcagaggtgcggaactatatctgtgacgaatgtggacaaaccttcaagcagcggaagcaccttctcgtccaccaaatgcgacattcgggagccaagcctttgcagtgtgaggtctgtgggttccagtgcaggcagcgggcatccctcaagtaccacatgaccaaacacaaggctgagactgagctggactttgcctgtgaccagtgtggccggcggtttgagaaggcccacaacctcaatgtacacatgtccatggtgcacccgctgacacagacccaggacaaggccctgcccctggaggcggaaccaccacctgggccaccgagcccctctgtgaccacagagggccaggcggtgaagcccgaacccacctgaggacggcagtgaggatgagcacctctagcagcctggactccgcagtggctgtgtcagcctcacccttcgtgtgcacccgcatgggagggtcggagggtgctgcccgcccttggtgctggaggcgggcttggtgtccggctcaagtagccttcctctgctctgggaccagtggtttattttcccgcaaacgctgagtgactcggggccggacagttcataaataattgattcctttccccactaaagcagtcgaggagatttgtaatccactttttagtgcaacaagagctccatgttatgcttgtaataaattatttacacgggagctgggctg

SEQ ID NO: 376305 - DNA, 240 bp, Homo sapiens
tccgtttgtctgcaagagctgccacgcccagttctaccagtgccacagccttctcaagtccttcctgcagagggtcaacgcctccccggctggtcgccggaagccttgtgcaaagtacgccctagtctgttcagagcacgttcaggctgtcagtactgcagtgtgacgggtgttgagagagggacagggcgtgcctccgcgggagcctctgggtggggggaatgggccatgcccgggttc

SEQ ID NO: 376306 - DNA, 2216 bp, Homo sapiens
  misc_feature (1)..(1): n is a, c, g, or t
nacgccgggtcctctaggaacctcgggccgggcagcacccgcgggattctgctggcgtcctccgctgccatgaagcgggaccggctgggccgcttcctgtctcctgggtcgtcccgacagtgcggggcctcggacggcggcggcggcgtcagccggactcggggccgcccttcccttagcggtgggccgagggtggacggggcgacggcgcggcgcgcctggggcccggtggggtcctgcggggacgcgggcgaggacggcgcggacgaggcaggagcaggccgggctctcgccatgggtcactgtcgcctctgccacgggaagttttcctcgagaagcctgcgcagcatctccgagagggcgcctggagcgagcatggagaggccatccgcagaggagcgcgtgctcgtacgggacttccagcgcctgcttggtgtggctgtccgccaggaccccaccttgtctccgtttgtctgcaagagctgccacgcccagttctaccagtgccacagccttctcaagtccttcctgcagagggtcaacgcctccccggctggtcgccggaagccttgtgcaaaggtcggtgcccagcccccaacaggggcagaggagggagcgtgtctggtggatctgatcacatccagcccccagtgcctgcacggcttggtggggtgggtgcatggacatgcggccagctgcggggccctgccccaccttcagaggacactgtcctccgagtactgcggcgtcatccaggtcgtgtggggctgcgaccagggccacgactacaccatggataccagctccagctgcaaggccttcttgctggacagtgcgctggcagtcaagtggccatgggacaaagagacggcgccacggctgccccagcaccgagggtggaaccctggggatgcccctcagacctcccagggtagagggacagggaccccagttggggctgagaccaagaccctgcccagcacggatgtggcccagcctccttcggacagcgacgcggtggggcccaggtcgggcttcccacctcagccaagcctgcccctttgcagggccccagggcagttgggtgagaagcagcttccatcttcaacctcggatgatcggagacgtcttgagtgaagatgaaaatgacaagaagcaaaatgcccagtcttcggacgagtcctttgagccttacccagaaaggaaagtctctggtaagaagagtgaaagcaaagaagccaagaagtctgaagaaccaagaattcggaagaagccgggacccaagcccggatggaagaagaagcttcgttgtgagagggaggagcttcccaccatctacaagtgtccttaccagggctgcacggccgtgtaccgaggcgctgacggcatgaagaagcacatcaaggagcaccacgaggaggtccgggagcggccctgcccccaccctggctgcaacaaggttttcatgatcgaccgctacctgcagcgccacgtgaagctcatccacacagaggtgcggaactatatctgtgacgaatgtggacaaaccttcaagcagcggaagcaccttctcgtccaccaaatgcgacattcgggagccaagcctttgcagtgtgaggtctgtgggttccagtgcaggcagcgggcatccctcaagtaccacatgaccaaacacaaggctgagactgagctggactttgcctgtgaccagtgtggccggcggtttgagaaggcccacaacctcaatgtacacatgtccatggtgcacccgctgacacagacccaggacaaggccctgcccctggaggcggaaccaccacctgggccaccgagcccctctgtgaccacagagggccaggcggtgaagcccgaacccacctgaggacggcagtgaggatgagcacctctagcagcctggactccgcagtggctgtgtcagcctcacccttcgtgtgcacccgcatgggagggtcggagggtgctgcccgcccttggtgctggaggcgggcttggtgtccggctcaagtagccttcctctgctctgggaccagtggtttattttcccgcaaacgctgagtgactcggggccggacagttcataaataattgattcctttccccactaaagcagtcgaggagatttgtaatccactttttagtgcaacaagagctccatgttatgcttgtaataaattatttacacgggagctgggctg

SEQ ID NO: 376307 - DNA, 2264 bp, Homo sapiens
acttccggcgacgggccccctccgcgcgtactgcgggccccacgggtgttagtggcgggggcggcagagtccgggtgggttgtcgcgacggagccgggcctcttcgccgtcttgagacggggctggcgagaagggcccctcacggagttgccatgggcgtctaaccgcggcagccaggcccctctctacgtgagaccccggcccccctcccctttctgcagcccgcccgccacctgcgcgccgcgtggcctccgccggcgcctgcccgccccgcgcctccgtctcccacggagcaggccgggctctcgccatgggtcactgtcgcctctgccacgggaagttttcctcgagaagcctgcgcagcatctccgagagggcgcctggagcgagcatggagaggccatccgcagaggagcgcgtgctcgtacgggacttccagcgcctgcttggtgtggctgtccgccaggaccccaccttgtctccgtttgtctgcaagagctgccacgcccagttctaccagtgccacagccttctcaagtccttcctgcagagggtcaacgcctccccggctggtcgccggaagccttgtgcaaaggtcggtgcccagcccccaacaggggcagaggagggagcgtgtctggtggatctgatcacatccagcccccagtgcctgcacggcttggtggggtgggtgcatggacatgcggccagctgcggggccctgccccaccttcagaggacactgtcctccgagtactgcggcgtcatccaggtcgtgtggggctgcgaccagggccacgactacaccatggataccagctccagctgcaaggccttcttgctggacagtgcgctggcagtcaagtggccatgggacaaagagacggcgccacggctgccccagcaccgagggtggaaccctggggatgcccctcagacctcccagggtagagggacagggaccccagttggggctgagaccaagaccctgcccagcacggatgtggcccagcctccttcggacagcgacgcggtggggcccaggtcgggcttcccacctcagccaagcctgcccctttgcagggccccagggcagttgggtgagaagcagcttccatcttcaacctcggatgatcgggtaaaagacgagttcagtgacctttctgagggagacgtcttgagtgaagatgaaaatgacaagaagcaaaatgcccagtcttcggacgagtcctttgagccttacccagaaaggaaagtctctggtaagaagagtgaaagcaaagaagccaagaagtctgaagaaccaagaattcggaagaagccgggacccaagcccggatggaagaagaagcttcgttgtgagagggaggagcttcccaccatctacaagtgtccttaccagggctgcacggccgtgtaccgaggcgctgacggcatgaagaagcacatcaaggagcaccacgaggaggtccgggagcggccctgcccccaccctggctgcaacaaggttttcatgatcgaccgctacctgcagcgccacgtgaagctcatccacacagaggtgcggaactatatctgtgacgaatgtggacaaaccttcaagcagcggaagcaccttctcgtccaccaaatgcgacattcgggagccaagcctttgcagtgtgaggtctgtgggttccagtgcaggcagcgggcatccctcaagtaccacatgaccaaacacaaggctgagactgagctggactttgcctgtgaccagtgtggccggcggtttgagaaggcccacaacctcaatgtacacatgtccatggtgcacccgctgacacagacccaggacaaggccctgcccctggaggcggaaccaccacctgggccaccgagcccctctgtgaccacagagggccaggcggtgaagcccgaacccacctgaggacggcagtgaggatgagcacctctagcagcctggactccgcagtggctgtgtcagcctcacccttcgtgtgcacccgcatgggagggtcggagggtgctgcccgcccttggtgctggaggcgggcttggtgtccggctcaagtagccttcctctgctctgggaccagtggtttattttcccgcaaacgctgagtgactcggggccggacagttcataaataattgattcctttccccactaaagcagtcgaggagatttgtaatccactttttagtgcaacaagagctccatgttatgcttgtaataaattatttacacgggagctgggctg

SEQ ID NO: 376308 - DNA, 2213 bp, Homo sapiens
acttccggcgacgggccccctccgcgcgtactgcgggccccacgggtgttagtggcgggggcggcagagtccgggtgggttgtcgcgacggagccgggcctcttcgccgtcttgagacggggctggcgagaagggcccctcacggagttgccatgggcgtctaaccgcggcagccaggcccctctctacgtgagaccccggcccccctcccctttctgcagcccgcccgccacctgcgcgccgcgtggcctccgccggcgcctgcccgccccgcgcctccgtctcccacggagcaggccgggctctcgccatgggtcactgtcgcctctgccacgggaagttttcctcgagaagcctgcgcagcatctccgagagggcgcctggagcgagcatggagaggccatccgcagaggagcgcgtgctcgtacgggacttccagcgcctgcttggtgtggctgtccgccaggaccccaccttgtctccgtttgtctgcaagagctgccacgcccagttctaccagtgccacagccttctcaagtccttcctgcagagggtcaacgcctccccggctggtcgccggaagccttgtgcaaaggtcggtgcccagcccccaacaggggcagaggagggagcgtgtctggcccccagtgcctgcacggcttggtggggtgggtgcatggacatgcggccagctgcggggccctgccccaccttcagaggacactgtcctccgagtactgcggcgtcatccaggtcgtgtggggctgcgaccagggccacgactacaccatggataccagctccagctgcaaggccttcttgctggacagtgcgctggcagtcaagtggccatgggacaaagagacggcgccacggctgccccagcaccgagggtggaaccctggggatgcccctcagacctcccagggtagagggacagggaccccagttggggctgagaccaagaccctgcccagcacggatgtggcccagcctccttcggacagcgacgcggtggggcccaggtcgggcttcccacctcagccaagcctgcccctttgcagggccccagggcagttgggtgagaagcagcttccatcttcaacctcggatgatcggagacgtcttgagtgaagatgaaaatgacaagaagcaaaatgcccagtcttcggacgagtcctttgagccttacccagaaaggaaagtctctggtaagaagagtgaaagcaaagaagccaagaagtctgaagaaccaagaattcggaagaagccgggacccaagcccggatggaagaagaagcttcgttgtgagagggaggagcttcccaccatctacaagtgtccttaccagggctgcacggccgtgtaccgaggcgctgacggcatgaagaagcacatcaaggagcaccacgaggaggtccgggagcggccctgcccccaccctggctgcaacaaggttttcatgatcgaccgctacctgcagcgccacgtgaagctcatccacacagaggtgcggaactatatctgtgacgaatgtggacaaaccttcaagcagcggaagcaccttctcgtccaccaaatgcgacattcgggagccaagcctttgcagtgtgaggtctgtgggttccagtgcaggcagcgggcatccctcaagtaccacatgaccaaacacaaggctgagactgagctggactttgcctgtgaccagtgtggccggcggtttgagaaggcccacaacctcaatgtacacatgtccatggtgcacccgctgacacagacccaggacaaggccctgcccctggaggcggaaccaccacctgggccaccgagcccctctgtgaccacagagggccaggcggtgaagcccgaacccacctgaggacggcagtgaggatgagcacctctagcagcctggactccgcagtggctgtgtcagcctcacccttcgtgtgcacccgcatgggagggtcggagggtgctgcccgcccttggtgctggaggcgggcttggtgtccggctcaagtagccttcctctgctctgggaccagtggtttattttcccgcaaacgctgagtgactcggggccggacagttcataaataattgattcctttccccactaaagcagtcgaggagatttgtaatccactttttagtgcaacaagagctccatgttatgcttgtaataaattatttacacgggagctgggctg

SEQ ID NO: 376309 - DNA, 2302 bp, Homo sapiens
acttccggcgacgggccccctccgcgcgtactgcgggccccacgggtgttagtggcgggggcggcagagtccgggtgggttgtcgcgacggagccgggcctcttcgccgtcttgagacggggctggcgagaagggcccctcacggagttgccatgggcgtctaaccgcggcagccaggcccctctctacgtgagaccccggcccccctcccctttctgcagcccgcccgccacctgcgcgccgcgtggcctccgccggcgcctgcccgccccgcgcctccgtctcccacggagcaggccgggctctcgccatgggtcactgtcgcctctgccacgggaagttttcctcgagaagcctgcgcagcatctccgagagggcgcctggagcgagcatggagaggccatccgcagaggagcgcgtgctcgtacgggacttccagcgcctgcttggtgtggctgtccgccaggaccccaccttgtctccgtttgtctgcaagagctgccacgcccagttctaccagtgccacagccttctcaagtccttcctgcagagggtcaacgcctccccggctggtcgccggaagccttgtgcaaaggtcggtgcccagcccccaacaggggcagaggagggagcgtgtctggtggatctgatcacatccagcccccagtgcctgcacggcttggtggggtgggtgcatggacatgcggccagctgcggggccctgccccaccttcagaggacactgtcctccgagtactgcggcgtcatccaggtcgtgtggggctgcgaccagggccacgactacaccatggataccagctccagctgcaaggccttcttgctggacagtgcgctggcagtcaagtggccatgggacaaagagacggcgccacggctgccccagcaccgagggtggaaccctggggatgcccctcagacctcccagggtagagggacagggaccccagttggggctgagaccaagaccctgcccagcacggatgtggcccagcctccttcggacagcgacgcggtggggcccaggtcgggcttcccacctcagccaagcctgcccctttgcagggccccagggcagttgggtgagaagcagcttccatcttcaacctcggatgatcggagacgtcttgagtgaagatgaaaatgacaagaagcaaaatgcccagtcttcggacgagtcctttgagccttacccagaaaggaaagtctctggtaagaagagtgaaagcaaagaagccaagaagtctgaagaaccaagaattcggaagaagccgggacccaagcccggatggaagaagaagcttcgttgtgagagggaggagcttcccaccatctacaagtgtccttaccagggctgcacggccgtgtaccgaggcgctgacggcatgaagaagcacatcaaggagcaccacgaggaggtccgggagcggccctgcccccaccctggctgcaacaaggttttcatgatcgaccgctacctgcagcgccacgtgaagctcatccacacagaggtgcggaactatatctgtgacgaatgtggacaaaccttcaagcagcggaagcaccttctcgtccaccaaatgcgacattcgggagccaagcctttgcagtaagtgtgagtcaggaccccctcccagggctgtggccctcgcaccttcttatctgcctctgtcccccaggtgtgaggtctgtgggttccagtgcaggcagcgggcatccctcaagtaccacatgaccaaacacaaggctgagactgagctggactttgcctgtgaccagtgtggccggcggtttgagaaggcccacaacctcaatgtacacatgtccatggtgcacccgctgacacagacccaggacaaggccctgcccctggaggcggaaccaccacctgggccaccgagcccctctgtgaccacagagggccaggcggtgaagcccgaacccacctgaggacggcagtgaggatgagcacctctagcagcctggactccgcagtggctgtgtcagcctcacccttcgtgtgcacccgcatgggagggtcggagggtgctgcccgcccttggtgctggaggcgggcttggtgtccggctcaagtagccttcctctgctctgggaccagtggtttattttcccgcaaacgctgagtgactcggggccggacagttcataaataattgattcctttccccactaaagcagtcgaggagatttgtaatccactttttagtgcaacaagagctccatgttatgcttgtaataaattatttacacgggagctgggctg

SEQ ID NO: 376310 - DNA, 1209 bp, Homo sapiens
tgggtatggtgagagtcaggatcttatttaaatcttctgttatagcagaccttttgtagacactgttccccactgtggtgggggaaggggagggcaccaccttgttattgccagcagaggtggaagtccttctcccactcaagtatccaccgttactgggattaggggaaggggctgatgcattacctcccagagagaaggacattttggattccctcttgggccttcgctgaaacctctgtgatggggttgggtgctagggcccattacagcctggtgagggtggggtcacagtgttttctctggtatttgcctgtagtagagcagtttttgtctaaaagttttttgtcttgataggctacctctttcctggtcttttggtagagagcagcttttgtcaggcttttgttatcaaatacacctcttaaagttttggggttgctggttcttctgctccaggtctgcaatatttgaagcaaaaaagaaattccagggaactccctggtgtgttttgccttgagacctccctagctggtgtgccttattctctccacctttcagagttgtcttatgattgttttgcatataatgtctaggatttttagttgtacttattgggggaatagggaagaatatgtgtactccgctttcacaaagcactcatatatagatctagtttctcaaatagctaaagaactaaaagtgtaccagcagttctgaggctcagcagtatagcccaagaactatgaactcagggatgatagaagtgaaataccatcacatggtgaggtcaagggatatctgtaggcacctacttcacagggtccatgctgaaagactgcaaccaatacacagcgcttatctgggggcatacactggaccgatatagtttcacaatcaaaatatttcccaacaaaatgtgcactgttattctggtccccagtcagctgcacctggcctgagttttttagtcaggaaaaatttctcaaagatgattctgtttttcctccataaatactatagggcaattgcccaaaagccaggccataaatggcaagagccacgtgcttcacctaggcccaagtggttgctgtgccctcagtgttgacagactaacaggagggaatgggtgttcaggcttaactaagccactactaccatcaccaccctccaggttaaaaaaaaaaaaaaaaaaaagccagatttgct

SEQ ID NO: 376311 - DNA, 436 bp, Homo sapiens
tgcaaataattgaatgagggtgtattataggggaaaatatatgtattacttggaattttgctgcttatttatggttttgtttttattctgtgtactttattggtgaactgtcttttcctctcatactctacacttggctacagatgacagagctttggtagttagacaattgcagtacaggattatgtgagtgttggttagggctcaattagcttattatgtttggcgatcagtatgtatgagctgaagggcatgctctagcagtgaggagctctgcgctgtgggagacccctcattaatgttctgtaaacttaggattggattcagtgatctctgaagtttcttttagttcttgagattctatgagatatcaggatcttgtgatcttaaaatttataggacaatttagttaataattgggttagtaattaggtga

SEQ ID NO: 376312 - DNA, 2440 bp, Homo sapiens
tctaggaagtccccaagagcacaggagcccagagacctcgcaggaggaagcagcagtatctgtgttccaaatcctgcccagcccccaggcagccatggtatcttctcagctggctcgagggcacacctcccaaaatgcagagaaggcagggtggctaggaatggctctagtagaattctccccttatcttgtctggaaacaaggggcaaagagctatctatttcctcctgccagcctcctgcccccaacaggattcctcacatcccaggaccagctggaaaaggtggtgagagttggaaagagactgctcagtgaggactgccctgcgaaccagcttggattcatcccgttcacctccacgttctgcactcggggccgagggaagggaggcagcccaggcagctagagaacttgatgaaacacactcaatctgaatctcgcttgatcgtcatgctgacccagtgaggccactcctcgacttttcagctcccgcacgattcctgaagcaggaaaagaaacagttctgtgagtctactcagggtcaggcatcctttccgactactcactcagcagcggatccccacccgcctctgactcccagtgtctttcggctccaacgtaagttcaccgaacgtctaagagctgaggattcaaaggcatgtaagaccgcccctgccctcagctgcaagacctgtccgcgatcctacgagccccattccgccctctttccccgaccttggtcccccatgggccctacaaccaggtccccgactgacaccttgaccagcgaacacagcaaacaggcccgcagatgccgcaggtccttcggcaccgtctccagggccatcttcgccgatgggaagaacaacagggagatagacgaccacagcctgtgcacccgcaggaagtaaatagctcgttacccagaatgcccaccacttccggcgcttagacttcctcttccggtgtgggcggacgccagctccgcccctacccccgccagaggagatggtttctcccgccagcaggcggggaggctgggcggccggccgccacctgggccggagcgcgtcgcagccacctgagcccgccgagggcgcggcggaggctgtgtggggtagtcagcgggcccccggggcgggggggcggctgcgcttgcgcgggagtgtgtcgggctgagccgcagcgccgagacgcgggctgtttgatctgggctggtggccctgggcgtcggtcctgttccccgatggtaacccgaagtttgtttttttttgttttgtctccccgttttagaagcattgggggcagtgaatccactgtctccctctggattgtctctgcagagaccgagaagaaatccagggacagccccacccctccttcctaactgcgagagcgctatagggtttccacttgcttcccacaggaatgctggcctgggagctacggcggaaaaaaatgcgtatttatcttttaaaactccgtctgtttgctcgttccggctgataatttatactttgcgcagttcttagcgcttagacacggttcctttactaaagaccatttgtaggagattaggtgtcctttttttccctttcatttcaccgtctaggaagcgaaatgccttgttctataggcactaaaccaccacccctaccaaacctttctcggggaagcagaaggggaacttgtgccttgtgaggaagcgacaaaggccccttctggccctggagacttcacgccaatggagcaccagctctctgtcctcgcaatagcccgagtgcaggcagaacgcagtcatttgtgtttatctgagaggagctttgggatataaatagtttcaggccccgctgcgctgtcattccagcccagcctcctgattgagctgcttccgggcgggctttcttcttgttggcggtcccatgctgtgttcagatgggctctgtgacaggtttggatgttttctatcactgaataaaactttccactttggaacatattttctacactctattatctcatgtaagtcctgcaacaactattaagtaggcccattttatggactgaaaaagcgaggcacagagtatttgcccaaggtctgagtcactgaagtatgataatgtgtgaagtgaacagtataataataatgactgaagcacagtaagaatccagtcatgctttctccttccctgatctcactaagccacacttttaggggcttacaaaccagttcttattgccaagccctctactctaccctatcctttcatgaatcggagcctagcctctgataacataaataatttacttctcttgatgtagaaagagatgacgttgttaccctgagtgacagtcacgacagaacaaaaccacaagaccagaccacatttgtggataaatatattagcaaataaatatatttcttaacataatgcctgat

SEQ ID NO: 376313 - DNA, 2376 bp, Homo sapiens
tctaggaagtccccaagagcacaggagcccagagacctcgcaggaggaagcagcagtatctgtgttccaaatcctgcccagcccccaggcagccatggtatcttctcagctggctcgagggcacacctcccaaaatgcagagaaggcagggtggctaggaatggctctagtagaattctccccttatcttgtctggaaacaaggggcaaagagctatctatttcctcctgccagcctcctgcccccaacaggattcctcacatcccaggaccagctggaaaaggtggtgagagttggaaagagactgctcagtgaggactgccctgcgaaccagcttggattcatcccgttcacctccacgttctgcactcggggccgagggaagggaggcagcccaggcagctagagaacttgatgaaacacactcaatctgaatctcgcttgatcgtcatgctgacccagtgagtctactcagggtcaggcatcctttccgactactcactcagcagcggatccccacccgcctctgactcccagtgtctttcggctccaacgtaagttcaccgaacgtctaagagctgaggattcaaaggcatgtaagaccgcccctgccctcagctgcaagacctgtccgcgatcctacgagccccattccgccctctttccccgaccttggtcccccatgggccctacaaccaggtccccgactgacaccttgaccagcgaacacagcaaacaggcccgcagatgccgcaggtccttcggcaccgtctccagggccatcttcgccgatgggaagaacaacagggagatagacgaccacagcctgtgcacccgcaggaagtaaatagctcgttacccagaatgcccaccacttccggcgcttagacttcctcttccggtgtgggcggacgccagctccgcccctacccccgccagaggagatggtttctcccgccagcaggcggggaggctgggcggccggccgccacctgggccggagcgcgtcgcagccacctgagcccgccgagggcgcggcggaggctgtgtggggtagtcagcgggcccccggggcgggggggcggctgcgcttgcgcgggagtgtgtcgggctgagccgcagcgccgagacgcgggctgtttgatctgggctggtggccctgggcgtcggtcctgttccccgatggtaacccgaagtttgtttttttttgttttgtctccccgttttagaagcattgggggcagtgaatccactgtctccctctggattgtctctgcagagaccgagaagaaatccagggacagccccacccctccttcctaactgcgagagcgctatagggtttccacttgcttcccacaggaatgctggcctgggagctacggcggaaaaaaatgcgtatttatcttttaaaactccgtctgtttgctcgttccggctgataatttatactttgcgcagttcttagcgcttagacacggttcctttactaaagaccatttgtaggagattaggtgtcctttttttccctttcatttcaccgtctaggaagcgaaatgccttgttctataggcactaaaccaccacccctaccaaacctttctcggggaagcagaaggggaacttgtgccttgtgaggaagcgacaaaggccccttctggccctggagacttcacgccaatggagcaccagctctctgtcctcgcaatagcccgagtgcaggcagaacgcagtcatttgtgtttatctgagaggagctttgggatataaatagtttcaggccccgctgcgctgtcattccagcccagcctcctgattgagctgcttccgggcgggctttcttcttgttggcggtcccatgctgtgttcagatgggctctgtgacaggtttggatgttttctatcactgaataaaactttccactttggaacatattttctacactctattatctcatgtaagtcctgcaacaactattaagtaggcccattttatggactgaaaaagcgaggcacagagtatttgcccaaggtctgagtcactgaagtatgataatgtgtgaagtgaacagtataataataatgactgaagcacagtaagaatccagtcatgctttctccttccctgatctcactaagccacacttttaggggcttacaaaccagttcttattgccaagccctctactctaccctatcctttcatgaatcggagcctagcctctgataacataaataatttacttctcttgatgtagaaagagatgacgttgttaccctgagtgacagtcacgacagaacaaaaccacaagaccagaccacatttgtggataaatatattagcaaataaatatatttcttaacataatgcctgat

SEQ ID NO: 376314 - DNA, 2202 bp, Homo sapiens
actgaaccctagagcccctgactgtgggctccacccaggcaagagccaatggaactggagcctcctgcccccaacaggattcctcacatcccaggaccagctggaaaaggtggtgagagttggaaagagactgctcagtgaggactgccctgcgaaccagcttggattcatcccgttcacctccacgttctgcactcggggccgagggaagggaggcagcccaggcagctagagaacttgatgaaacacactcaatctgaatctcgcttgatcgtcatgctgacccagtgagtctactcagggtcaggcatcctttccgactactcactcagcagcggatccccacccgcctctgactcccagtgtctttcggctccaacgtaagttcaccgaacgtctaagagctgaggattcaaaggcatgtaagaccgcccctgccctcagctgcaagacctgtccgcgatcctacgagccccattccgccctctttccccgaccttggtcccccatgggccctacaaccaggtccccgactgacaccttgaccagcgaacacagcaaacaggcccgcagatgccgcaggtccttcggcaccgtctccagggccatcttcgccgatgggaagaacaacagggagatagacgaccacagcctgtgcacccgcaggaagtaaatagctcgttacccagaatgcccaccacttccggcgcttagacttcctcttccggtgtgggcggacgccagctccgcccctacccccgccagaggagatggtttctcccgccagcaggcggggaggctgggcggccggccgccacctgggccggagcgcgtcgcagccacctgagcccgccgagggcgcggcggaggctgtgtggggtagtcagcgggcccccggggcgggggggcggctgcgcttgcgcgggagtgtgtcgggctgagccgcagcgccgagacgcgggctgtttgatctgggctggtggccctgggcgtcggtcctgttccccgatggtaacccgaagtttgtttttttttgttttgtctccccgttttagaagcattgggggcagtgaatccactgtctccctctggattgtctctgcagagaccgagaagaaatccagggacagccccacccctccttcctaactgcgagagcgctatagggtttccacttgcttcccacaggaatgctggcctgggagctacggcggaaaaaaatgcgtatttatcttttaaaactccgtctgtttgctcgttccggctgataatttatactttgcgcagttcttagcgcttagacacggttcctttactaaagaccatttgtaggagattaggtgtcctttttttccctttcatttcaccgtctaggaagcgaaatgccttgttctataggcactaaaccaccacccctaccaaacctttctcggggaagcagaaggggaacttgtgccttgtgaggaagcgacaaaggccccttctggccctggagacttcacgccaatggagcaccagctctctgtcctcgcaatagcccgagtgcaggcagaacgcagtcatttgtgtttatctgagaggagctttgggatataaatagtttcaggccccgctgcgctgtcattccagcccagcctcctgattgagctgcttccgggcgggctttcttcttgttggcggtcccatgctgtgttcagatgggctctgtgacaggtttggatgttttctatcactgaataaaactttccactttggaacatattttctacactctattatctcatgtaagtcctgcaacaactattaagtaggcccattttatggactgaaaaagcgaggcacagagtatttgcccaaggtctgagtcactgaagtatgataatgtgtgaagtgaacagtataataataatgactgaagcacagtaagaatccagtcatgctttctccttccctgatctcactaagccacacttttaggggcttacaaaccagttcttattgccaagccctctactctaccctatcctttcatgaatcggagcctagcctctgataacataaataatttacttctcttgatgtagaaagagatgacgttgttaccctgagtgacagtcacgacagaacaaaaccacaagaccagaccacatttgtggataaatatattagcaaataaatatatttcttaacataatgcctgat

SEQ ID NO: 376315 - DNA, 2239 bp, Homo sapiens
tctaggaagtccccaagagcacaggagcccagagacctcgcaggaggaagcagcagtatctgtgttccaaatcctgcccagcccccaggcagccatgcctcctgcccccaacaggattcctcacatcccaggaccagctggaaaaggtggtgagagttggaaagagactgctcagtgaggactgccctgcgaaccagcttggattcatcccgttcacctccacgttctgcactcggggccgagggaagggaggcagcccaggcagctagagaacttgatgaaacacactcaatctgaatctcgcttgatcgtcatgctgacccagtgagtctactcagggtcaggcatcctttccgactactcactcagcagcggatccccacccgcctctgactcccagtgtctttcggctccaacgtaagttcaccgaacgtctaagagctgaggattcaaaggcatgtaagaccgcccctgccctcagctgcaagacctgtccgcgatcctacgagccccattccgccctctttccccgaccttggtcccccatgggccctacaaccaggtccccgactgacaccttgaccagcgaacacagcaaacaggcccgcagatgccgcaggtccttcggcaccgtctccagggccatcttcgccgatgggaagaacaacagggagatagacgaccacagcctgtgcacccgcaggaagtaaatagctcgttacccagaatgcccaccacttccggcgcttagacttcctcttccggtgtgggcggacgccagctccgcccctacccccgccagaggagatggtttctcccgccagcaggcggggaggctgggcggccggccgccacctgggccggagcgcgtcgcagccacctgagcccgccgagggcgcggcggaggctgtgtggggtagtcagcgggcccccggggcgggggggcggctgcgcttgcgcgggagtgtgtcgggctgagccgcagcgccgagacgcgggctgtttgatctgggctggtggccctgggcgtcggtcctgttccccgatggtaacccgaagtttgtttttttttgttttgtctccccgttttagaagcattgggggcagtgaatccactgtctccctctggattgtctctgcagagaccgagaagaaatccagggacagccccacccctccttcctaactgcgagagcgctatagggtttccacttgcttcccacaggaatgctggcctgggagctacggcggaaaaaaatgcgtatttatcttttaaaactccgtctgtttgctcgttccggctgataatttatactttgcgcagttcttagcgcttagacacggttcctttactaaagaccatttgtaggagattaggtgtcctttttttccctttcatttcaccgtctaggaagcgaaatgccttgttctataggcactaaaccaccacccctaccaaacctttctcggggaagcagaaggggaacttgtgccttgtgaggaagcgacaaaggccccttctggccctggagacttcacgccaatggagcaccagctctctgtcctcgcaatagcccgagtgcaggcagaacgcagtcatttgtgtttatctgagaggagctttgggatataaatagtttcaggccccgctgcgctgtcattccagcccagcctcctgattgagctgcttccgggcgggctttcttcttgttggcggtcccatgctgtgttcagatgggctctgtgacaggtttggatgttttctatcactgaataaaactttccactttggaacatattttctacactctattatctcatgtaagtcctgcaacaactattaagtaggcccattttatggactgaaaaagcgaggcacagagtatttgcccaaggtctgagtcactgaagtatgataatgtgtgaagtgaacagtataataataatgactgaagcacagtaagaatccagtcatgctttctccttccctgatctcactaagccacacttttaggggcttacaaaccagttcttattgccaagccctctactctaccctatcctttcatgaatcggagcctagcctctgataacataaataatttacttctcttgatgtagaaagagatgacgttgttaccctgagtgacagtcacgacagaacaaaaccacaagaccagaccacatttgtggataaatatattagcaaataaatatatttcttaacataatgcctgat

SEQ ID NO: 376316 - DNA, 2185 bp, Homo sapiens
tctaggaagtccccaagagcacaggagcccagagacctcgcaggaggaagcagcagtatctgtgttccaaatcctgcccagcccccaggcagccatgcctcctgcccccaacaggattcctcacatcccaggaccagctggaacttggattcatcccgttcacctccacgttctgcactcggggccgagggaagggaggcagcccaggcagctagagaacttgatgaaacacactcaatctgaatctcgcttgatcgtcatgctgacccagtgagtctactcagggtcaggcatcctttccgactactcactcagcagcggatccccacccgcctctgactcccagtgtctttcggctccaacgtaagttcaccgaacgtctaagagctgaggattcaaaggcatgtaagaccgcccctgccctcagctgcaagacctgtccgcgatcctacgagccccattccgccctctttccccgaccttggtcccccatgggccctacaaccaggtccccgactgacaccttgaccagcgaacacagcaaacaggcccgcagatgccgcaggtccttcggcaccgtctccagggccatcttcgccgatgggaagaacaacagggagatagacgaccacagcctgtgcacccgcaggaagtaaatagctcgttacccagaatgcccaccacttccggcgcttagacttcctcttccggtgtgggcggacgccagctccgcccctacccccgccagaggagatggtttctcccgccagcaggcggggaggctgggcggccggccgccacctgggccggagcgcgtcgcagccacctgagcccgccgagggcgcggcggaggctgtgtggggtagtcagcgggcccccggggcgggggggcggctgcgcttgcgcgggagtgtgtcgggctgagccgcagcgccgagacgcgggctgtttgatctgggctggtggccctgggcgtcggtcctgttccccgatggtaacccgaagtttgtttttttttgttttgtctccccgttttagaagcattgggggcagtgaatccactgtctccctctggattgtctctgcagagaccgagaagaaatccagggacagccccacccctccttcctaactgcgagagcgctatagggtttccacttgcttcccacaggaatgctggcctgggagctacggcggaaaaaaatgcgtatttatcttttaaaactccgtctgtttgctcgttccggctgataatttatactttgcgcagttcttagcgcttagacacggttcctttactaaagaccatttgtaggagattaggtgtcctttttttccctttcatttcaccgtctaggaagcgaaatgccttgttctataggcactaaaccaccacccctaccaaacctttctcggggaagcagaaggggaacttgtgccttgtgaggaagcgacaaaggccccttctggccctggagacttcacgccaatggagcaccagctctctgtcctcgcaatagcccgagtgcaggcagaacgcagtcatttgtgtttatctgagaggagctttgggatataaatagtttcaggccccgctgcgctgtcattccagcccagcctcctgattgagctgcttccgggcgggctttcttcttgttggcggtcccatgctgtgttcagatgggctctgtgacaggtttggatgttttctatcactgaataaaactttccactttggaacatattttctacactctattatctcatgtaagtcctgcaacaactattaagtaggcccattttatggactgaaaaagcgaggcacagagtatttgcccaaggtctgagtcactgaagtatgataatgtgtgaagtgaacagtataataataatgactgaagcacagtaagaatccagtcatgctttctccttccctgatctcactaagccacacttttaggggcttacaaaccagttcttattgccaagccctctactctaccctatcctttcatgaatcggagcctagcctctgataacataaataatttacttctcttgatgtagaaagagatgacgttgttaccctgagtgacagtcacgacagaacaaaaccacaagaccagaccacatttgtggataaatatattagcaaataaatatatttcttaacataatgcctgat

SEQ ID NO: 376317 - DNA, 399 bp, Homo sapiens
caggaggtggagagcaaagatgctggcagccttgcatcttgctaggtctttatagctgtgtctctggatttgtaggccactcctcgacttttcagctcccgcacgattcctgaagcaggaaaagaaacagttctgtgaggtaagattcagaagggtaagataggccactcagctgccaccttgaggggggtactataagcaaactggagttcctagactacttatcaatcgtctgcttggccaggcacggtggctcatgcctgcaatctcagcactttgggaggtcaaggtggatcacttgaggtcaggagttcaagactagcctgggctacagagcaaggccccatctctacaaaaaaattttaaaaattagccaggtgtagtggcttgcacctgtag

SEQ ID NO: 376318 - DNA, 1029 bp, Homo sapiens
tctaggaagtccccaagagcacaggagcccagagacctcgcaggaggaagcagcagtatctgtgttccaaatcctgcccagcccccaggcagccatggtatcttctcagctggctcgagggcacacctcccaaaatgcagagaaggcagggtggctaggaatggctctagtagaattctccccttatcttgtctggaaacaaggggcaaagagctatctatttcctcctgccagcctcctgcccccaacaggattcctcacatcccaggaccagctggaaaaggtggtgagagttggaaagagactgctcagtgaggactgccctgcgaaccagcttggattcatcccgttcacctccacgttctgcactcggggccgagggaagggaggcagcccaggcagctagagaacttgatgaaacacactcaatctgaatctcgcttgatcgtcatgctgacccagtgagggttgtgaaaatctatggaggcacaatggttcagctattccaccttatccagagagttgaaactccaccacagagctctccaaagtggcacatggtgctgtgcagactccaccgctgctgccagtaccagtcctgtgcgtccaaagcctgcctgcagggtagccatcagcagccagggccagagggcagccagctgcagctggtggccaccactcatgctaccagctgcagcaatgcacttcaaccatacatactgcttccactagctaataccaaatgcaggttctcagatccagacaaatggaggaaaagaacatttatgcttccgtttcagaaagccaagtcgtagttttggcccttcctttctctaaagtttattcccaaaaacaggtagcattcctgattgggcagagaagaggatattttcagcccacatctgctgcaggtatgtcattttctcccatcttcactgtgactagtaaagatctcaccacttctctttggaatttccaactttgcttgtgattgaatgtcacttcgtgaatttgtattatgtcagatca

SEQ ID NO: 376319 - DNA, 906 bp, Homo sapiens
tctaggaagtccccaagagcacaggagcccagagacctcgcaggaggaagcagcagtatctgtgttccaaatcctgcccagcccccaggcagccatggtatcttctcagctggctcgagggcacacctcccaaaatgcagagaaggcagggtggctaggaatggctctagtagaattctccccttatcttgtctggaaacaaggggcaaagagctatctatttcctcctgccagcctcctgcccccaacaggattcctcacatcccaggaccagctggaaaaggtggtgagagttggaaagagactgctcagtgaggactgccctgcgaaccagcttggattcatcccgttcacctccacgttctgcactcggggccgagggaagggaggcagcccaggcagctagagaacttgatgaaacacactcaatctgaatctcgcttgatcgtcatgctgacccagtgaggccactcctcgacttttcagctcccgcacgattcctgaagcaggaaaagaaacagttctgtgaggtaagattcagaagggtaagataggccactcagctgccaccttgaggggggtactataagcaaactggagttcctagactacttatcaatcgtctgcttggccaggcacggtggctcatgcctgcaatctcagcactttgggaggtcaaggtggatcacttgaggtcaggagttcaagactagcctgggctacagagcaaggccccatctctacaaaaaaattttaaaaattagccaggtgtagtggcttgcacctgtagtgccagctatttgggaggctgaggcgggaggatcccttgaatccatgagttcaaggctgcagtgagctctgataatgccactatacttcagcctgggtgacagagactctgtctca

SEQ ID NO: 376320 - DNA, 368 bp, Homo sapiens
ctttgatactctaaattcaaccggtcatatttttttttcttttcctttctctttgactggtcaattcagaaaaggaagtccagttcgagtgttcagatgatggtgaggatctatctgccagatttctcctcctgtgaaaattcacacttaggaataaaagtcttatttacctaagatagtgtaagtaagtggagagggtgtaggaccattacaggtcagtgttagtcaactatcaaaacacggtacttctcttacatattacattgttttttctctgaaattgaatttgttatacatgtagatagtatattaagaggtttgctcttttacaaagtcaattttctctttgaaaataaaaagaccatgac

SEQ ID NO: 376321 - DNA, 590 bp, Homo sapiens
ctttctctttctgaaccacattgggtgccaacagaacttgctctctgttctctttcaaaattaccaacatggaccccacccaattcttcccttggaactaaggaacgcctgactgatcatctgatacagcagttcctgagcagaacaaaacaacaaaaacaggacagatggatggaatacccatgtcaatgaagaatgaaatgcccatctcccaactactgatgatcatcgccccctccttgggatttgtgctcttcgcattgtttgtggcgtttctcctgagagggaaactcatggaaacctattgttcgcagaaacacacaaggctagactacattggagatagtaaaaatgtcctcaatgacgtgcagcatggaagggaagacgaagacggcctttttaccctctaacaacgcagtagcatgttagattgaggatgggggcatgacactccagtgtcaaaataagtcttagtagatttccttgtttcataaaaaagactcacttattccatggatgtcattgatccaggcttgctttagtttcatgaatgaagggtactttagagaccacaacttctctgtccatgc

SEQ ID NO: 376322 - DNA, 508 bp, Homo sapiens
ctttctctttctgaaccacattgggtgccaacagaacttgctctctgttctctttcaaaattaccaacatggaccccacccaattcttcccttggaactaaggaacgcctgactgatcatctgatacagcagttcctgagcagaacaaaacaacaaaaacaggacagatggatggaatacccatgtcaatgaagaatgaaatgcccatctcccaactactgatgatcatcgccccctccttgggatttgtgctcttcgcattgtttgtggcgtttctcctgagagggaaactcatggaaacctattgttcgcagaaacacacaaggctagactacattggagatagtaaaaatgtcctcaatgacgtgcagcatggaagggaagacgaagacggcctttttaccctctaacaacgcagtagcatgttagattgaggatgggggcatgacactccagtgtcaaaataagtcttagtagatttccttgtttcataaaaaagactcactta

SEQ ID NO: 376323 - DNA, 1375 bp, Homo sapiens
ataagaggttgggctttggatagatagacagactcctgggtccggtcaaccgtcaaaatgtccaaagaacctctcattctctggctgatgattgagttttggtggctttacctgacaccagtcacttcagagactgttgtgacggaggttttgggtcaccgggtgactttgccctgtctgtactcatcctggtctcacaacagcaacagcatgtgctgggggaaagaccagtgcccctactccggttgcaaggaggcgctcatccgcactgatggaatgagggtgacctcaagaaagtcagcaaaatatagacttcaggggactatcccgagaggtgatgtctccttgaccatcttaaaccccagtgaaagtgacagcggtgtgtactgctgccgcatagaagtgcctggctggttcaacgatgtaaagataaacgtgcgcctgaatctacagagagcctcaacaaccacgcacagaacagcaaccaccaccacacgcagaacaacaacaacaagccccaccaccacccgacaaatgacaacaaccccagctgcacttccaacaacagtcgtgaccacacccgatctcacaaccggaacaccactccagatgacaaccattgccgtcttcacaacagcaaacacgtgcctttcactaaccccaagcacccttccggaggaagcccacaggtcttctgactcccgagccttctaaggaagggcccatcctcactgcagaatcagaaactgtcctccccagtgattcctggagtagtgctgagtctacttctgctgacactgtcctgctgacatccaaagagtccaaagtttgggatctcccatcaacatcccacgtgtcaatgtggaaaacgagtgattctgtgtcttctcctcagcctggagcatctgatacagcagttcctgagcagaacaaaacaacaaaaacaggacagatggatggaatacccatgtcaatgaagaatgaaatgcccatctcccaactactgatgatcatcgccccctccttgggatttgtgctcttcgcattgtttgtggcgtttctcctgagagggaaactcatggaaacctattgttcgcagaaacacacaaggctagactacattggagatagtaaaaatgtcctcaatgacgtgcagcatggaagggaagacgaagacggcctttttaccctctaacaacgcagtagcatgttagattgaggatgggggcatgacactccagtgtcaaaataagtcttagtagatttccttgtttcataaaaaagactcacttattccatggatgtcattgatccaggcttgctttagtttcatgaatgaagggtactttagagaccacaacttctctgtccatgc

SEQ ID NO: 376324 - DNA, 1293 bp, Homo sapiens
ataagaggttgggctttggatagatagacagactcctgggtccggtcaaccgtcaaaatgtccaaagaacctctcattctctggctgatgattgagttttggtggctttacctgacaccagtcacttcagagactgttgtgacggaggttttgggtcaccgggtgactttgccctgtctgtactcatcctggtctcacaacagcaacagcatgtgctgggggaaagaccagtgcccctactccggttgcaaggaggcgctcatccgcactgatggaatgagggtgacctcaagaaagtcagcaaaatatagacttcaggggactatcccgagaggtgatgtctccttgaccatcttaaaccccagtgaaagtgacagcggtgtgtactgctgccgcatagaagtgcctggctggttcaacgatgtaaagataaacgtgcgcctgaatctacagagagcctcaacaaccacgcacagaacagcaaccaccaccacacgcagaacaacaacaacaagccccaccaccacccgacaaatgacaacaaccccagctgcacttccaacaacagtcgtgaccacacccgatctcacaaccggaacaccactccagatgacaaccattgccgtcttcacaacagcaaacacgtgcctttcactaaccccaagcacccttccggaggaagcccacaggtcttctgactcccgagccttctaaggaagggcccatcctcactgcagaatcagaaactgtcctccccagtgattcctggagtagtgctgagtctacttctgctgacactgtcctgctgacatccaaagagtccaaagtttgggatctcccatcaacatcccacgtgtcaatgtggaaaacgagtgattctgtgtcttctcctcagcctggagcatctgatacagcagttcctgagcagaacaaaacaacaaaaacaggacagatggatggaatacccatgtcaatgaagaatgaaatgcccatctcccaactactgatgatcatcgccccctccttgggatttgtgctcttcgcattgtttgtggcgtttctcctgagagggaaactcatggaaacctattgttcgcagaaacacacaaggctagactacattggagatagtaaaaatgtcctcaatgacgtgcagcatggaagggaagacgaagacggcctttttaccctctaacaacgcagtagcatgttagattgaggatgggggcatgacactccagtgtcaaaataagtcttagtagatttccttgtttcataaaaaagactcactta

SEQ ID NO: 376325 - DNA, 241 bp, Homo sapiens
cttggggcatcagagcctagatataaggcgtatttgtgttctgttgacccttaagctaagcacccactcaataaatatttgaatgaacaagtagtaaatataagtattcatgaatgaatgcggaccactgcaaataatgagggctctggaatgtgcaacatgatactagaaatagacttcagcagatgctgtggctgtggtgataactgtatgtgaatctggggaaagaccccatctgacc

SEQ ID NO: 376326 - DNA, 3283 bp, Homo sapiens
  misc_feature (312)..(313): n is a, c, g, or t
gtagtcccggagtccgcgtgcgcggggccgggtccgggagccccagggcagccgccccgccgagtcgcagtgtcgggggctgcggggtgtctcggggccctggggtgagtgcggggcgcgggccgaggtttgcagggccctgtgagcgcgcccaggcacgtgttgcttcgggacgggccagccggtgggtgaaccctgccagccacgcgtggggcgggcccctggcacatctccagaccattgtctcctgtgccagaagctttgtaggtgcaacttccccttggagcagctgtgggtgcggatccagcggannaatcccgaggcgtctcagagagagcctggacagccgctggagcctttcccgagtgggtccttccaacaccgctacagcaggaaagccatccccctagggtcctgtccatcggaaactcctgtcctggggagtctgcctgcctggcctcaggacacaggccaactaagctggccccgaaatccagaatgcatccagagggaaggcacagtgtcaccttcgtcccctccggagctgcacgtggcctgagcaggatggtgccctccagcccagcggtggagaagcaggtgcccgtggaacctgggcctgaccccgagctccggtcctggcggcgcctcgtgtgctacctttgcttctacggcttcatggcgcagatacggccaggggagagcttcatcaccccctacctcctggggcccgacaagaacttcacgcgggagcaggtcacgaacgagatcacgccggtgctgtcgtactcctacctggccgtgctggtgcccgtgttcctgctcaccgactacctgcgctacacgccggtgctgctgctgcaggggctcagcttcgtgtcggtgtggctgctgctgctgctgggccactcggtggcgcacatgcagctcatggagctcttctacagcgtcaccatggccgcgcgcatcgcctattcctcctacatcttctctctcgtgcggcccgcgcgctaccagcgtgtggccggctactcgcgcgctgcggtgctgctgggcgtgttcaccagctccgtgctgggccagctgctggtcactgtgggccgagtctccttctccacgctcaactacatctcgctggccttcctcaccttcagcgtggtcctcgccctcttcctgaagcgccccaagcgcagcctcttcttcaaccgcgacgaccgggggcggtgcgaaacctcggcttcggagctggagcgcatgaatcccggcccaggcgggaagctgggacacgccctgcgggtggcctgtggggactcagtgctggcgcggatgctgcgggagctgggggacagcctgcggcggccgcagctgcgcctgtggtccctctggtgggtcttcaactcggccggctactacctggtggtctactacgtgcacatcctgtggaacgaggtggaccccaccaccaacagtgcgcgggtctacaacggcgcggcagatgctgcctccacgctgctgggcgccatcacgtccttcgccgcgggcttcgtgaagatccgctgggcgcgctggtccaagctgctcatcgcgggcgtcacggccacgcaggcggggctggtcttccttctggcgcacacgcgccacccgagcagcatctggctgtgctatgcggccttcgtgctgttccgcggctcctaccagttcctcgtgcccatcgccacctttcagattgcatcttctctgtctaaagagctctgtgccctggtcttcggggtcaacacgttctttgccaccatcgtcaagaccatcatcactttcattgtctcggacgtgcggggcctgggcctcccggtccgcaagcagttccagttatactccgtgtacttcctgatcctgtccatcatctacttcttgggggccatgctggatggcctgcggcactgccagcggggccaccacccgcggcagcccccggcccagggcctgaggagtgccgcggaggagaaggcagcacaggcactgagcgtgcaggacaagggcctcggaggcctgcagccagcccagagcccgccgctttccccagaagacagcctgggggctgtggggccagcctccctggagcagagacagagcgacccatacctggcccaggccccggccccgcaggcagctgaattcctgagcccagtgacaaccccttccccctgcactctgtgctccgcccaagcctcaggccctgaggctgcagatgagacttgtccccagctggctgtccatcctcctggtgtcagcaagctgggtttgcagtgtcttccaagcgacggtgttcagaatgtgaaccagtgactctcgggcgcccctgtggtaactttgcaggcggccctcagtgcatccccacgacccctgcctcgagggccgcctgccttagcaatgggggcctccgcttatcctgctagcaggccccctaggattccccctgccctgtgccgcactctggcggtggccacagcgtgctggcgacactcagggcagctgcctggccatgctgtccctgcactgtgccccgcgggctttgttgctggaagaggtgggtggtgggcttctgcgtccaccaggcctcactggctcatgccccttggggggcttgagacaaatcctttctgccccccagggctagtgaagtggcctcttggataccagctcaggggacactggccccacaggagttgtgagccctctagggcagggtgggagccgggaccctcaggtgtagctgagctgtgacattgctggtcatccttggtgctcttgcttttttgaaagatgctttttttttttttaactgacgtagaatgaagaactgcatgtggcttctctgtctctgtggaaaagccatctcaggttggcggcagacacattgtcatcagaggggagcagcggctctggtcctcggagctggttcctctctcccaccctaagggcagccctccatggtcctgtctgtccttctgaagtgtgtccatcctgacctgcgggtcctcagctgctcccacacttgtgccagcccggaggggactggtcccggtcaccgcggacgtgctggccttggtatgtgccaggcttgcctgggctgggcagccttgggggggctgcctttgtggtgggcgctggggaagtacgtcccagcggcctcagggtctaaggagcgctagtgccttgcccacaggtgcgggaccatctgatgtgatgtgaatactcttcccacatacattaaacacacttaagtgag

SEQ ID NO: 376327 - DNA, 1850 bp, Homo sapiens
gtagtcccggagtccgcgtgcgcggggccgggtccgggagccccagggcagccgccccgccgagtcgcaggcacagtgtcaccttcgtcccctccggagctgcacgtggcctgagcaggatggtgccctccagcccagcggtggagaagcaggtgcccgtggaacctgggcctgaccccgagctccggtcctggcggcgcctcgtgtgctacctttgcttctacggcttcatggcgcagatacggccaggggagagcttcatcaccccctacctcctggggcccgacaagaacttcacgcgggagcaggtcacgaacgagatcacgccggtgctgtcgtactcctacctggccgtgctggtgcccgtgttcctgctcaccgactacctgcgctacacgccggtgctgctgctgcaggggctcagcttcgtgtcggtgtggctgctgctgctgctgggccactcggtggcgcacatgcagctcatggagctcttctacagcgtcaccatggccgcgcgcatcgcctattcctcctacatcttctctctcgtgcggcccgcgcgctaccagcgtgtggccggctactcgcgcgctgcggtgctgctgggcgtgttcaccagctccgtgctgggccagctgctggtcactgtgggccgagtctccttctccacgctcaactacatctcgctggccttcctcaccttcagcgtggtcctcgccctcttcctgaagcgccccaagcgcagcctcttcttcaaccgcgacgaccgggggcggtgcgaaacctcggcttcggagctggagcgcatgaatcccggcccaggcgggaagctgggacacgccctgcgggtggcctgtggggactcagtgctggcgcggatgctgcgggagctgggggacagcctgcggcggccgcagctgcgcctgtggtccctctggtgggtcttcaactcggccggctactacctggtggtctactacgtgcacatcctgtggaacgaggtggaccccaccaccaacagtgcgcgggtctacaacggcgcggcagatgctgcctccacgctgctgggcgccatcacgtccttcgccgcgggcttcgtgaagatccgctgggcgcgctggtccaagctgctcatcgcgggcgtcacggccacgcaggcggggctggtcttccttctggcgcacacgcgccacccgagcagcatctggctgtgctatgcggccttcgtgctgttccgcggctcctaccagttcctcgtgcccatcgccacctttcagattgcatcttctctgtctaaagagctctgtgccctggtcttcggggtcaacacgttctttgccaccatcgtcaagaccatcatcactttcattgtctcggacgtgcggggcctgggcctcccggtccgcaagcagaatgaagaactgcatgtggcttctctgtctctgtggaaaagccatctcaggttggcggcagacacattgtcatcagaggggagcagcggctctggtcctcggagctggttcctctctcccaccctaagggcagccctccatggtcctgtctgtccttctgaagtgtgtccatcctgacctgcgggtcctcagctgctcccacacttgtgccagcccggaggggactggtcccggtcaccgcggacgtgctggccttggtatgtgccaggcttgcctgggctgggcagccttgggggggctgcctttgtggtgggcgctggggaagtacgtcccagcggcctcagggtctaaggagcgctagtgccttgcccacaggtgcgggaccatctgatgtgatgtgaatactcttcccacatacattaaacacacttaagtgag

SEQ ID NO: 376328 - DNA, 3702 bp, Homo sapiens
gtagtcccggagtccgcgtgcgcggggccgggtccgggagccccagggcagccgccccgccgagtcgcaggcacagtgtcaccttcgtcccctccggagctgcacgtggcctgagcaggatggtgccctccagcccagcggtggagaagcaggtgcccgtggaacctgggcctgaccccgagctccggtcctggcggcgcctcgtgtgctacctttgcttctacggcttcatggcgcagatacggccaggggagagcttcatcaccccctacctcctggggcccgacaagaacttcacgcgggagcaggtcacgaacgagatcacgccggtgctgtcgtactcctacctggccgtgctggtgcccgtgttcctgctcaccgactacctgcgctacacgccggtgctgctgctgcaggggctcagcttcgtgtcggtgtggctgctgctgctgctgggccactcggtggcgcacatgcagctcatggagctcttctacagcgtcaccatggccgcgcgcatcgcctattcctcctacatcttctctctcgtgcggcccgcgcgctaccagcgtgtggccggctactcgcgcgctgcggtgctgctgggcgtgttcaccagctccgtgctgggccagctgctggtcactgtgggccgagtctccttctccacgctcaactacatctcgctggccttcctcaccttcagcgtggtcctcgccctcttcctgaagcgccccaagcgcagcctcttcttcaaccgcgacgaccgggggcggtgcgaaacctcggcttcggagctggagcgcatgaatcccggcccaggcgggaagctgggacacgccctgcgggtggcctgtggggactcagtgctggcgcggatgctgcgggagctgggggacagcctgcggcggccgcagctgcgcctgtggtccctctggtgggtcttcaactcggccggctactacctggtggtctactacgtgcacatcctgtggaacgaggtggaccccaccaccaacagtgcgcgggtctacaacggcgcggcagatgctgcctccacgctgctgggcgccatcacgtccttcgccgcgggcttcgtgaagatccgctgggcgcgctggtccaagctgctcatcgcgggcgtcacggccacgcaggcggggctggtcttccttctggcgcacacgcgccacccgagcagcatctggctgtgctatgcggccttcgtgctgttccgcggctcctaccagttcctcgtgcccatcgccacctttcagattgcatcttctctgtctaaagagctctgtgccctggtcttcggggtcaacacgttctttgccaccatcgtcaagaccatcatcactttcattgtctcggacgtgcggggcctgggcctcccggtccgcaagcagttccagttatactccgtgtacttcctgatcctgtccatcatctacttcttgggggccatgctggatggcctgcggcactgccagcggggccaccacccgcggcagcccccggcccagggcctgaggagtgccgcggaggagaaggcagcacaggcactgagcgtgcaggacaagggcctcggaggcctgcagccagcccagagcccgccgctttccccagaagacagcctgggggctgtggggccagcctccctggagcagagacagagcgacccatacctggcccaggccccggccccgcaggcagctgaattcctgagcccagtgacaaccccttccccctgcactctgtgctccgcccaagcctcaggccctgaggctgcagatgagacttgtccccagctggctgtccatcctcctggtgtcagcaagctgggtttgcagtgtcttccaagcgacggtgttcagaatgtgaaccagtgactctcgggcgcccctgtggtaactttgcaggcggccctcagtgcatccccacgacccctgcctcgagggccgcctgccttagcaatgggggcctccgcttatcctgctagcaggccccctaggattccccctgccctgtgccgcactctggcggtggccacagcgtgctggcgacactcagggcagctgcctggccatgctgtccctgcactgtgccccgcgggctttgttgctggaagaggtgggtggtgggcttctgcgtccaccaggcctcactggctcatgccccttggggggcttgagacaaatcctttctgccccccagggctagtgaagtggcctcttggataccagctcaggggacactggccccacaggagttgtgagccctctagggcagggtgggagccgggaccctcaggtgtagctgagctgtgacattgctggtcatccttggtgctcttgcttttttgaaagatgctttttttttttttaactgacgtagaatgaagaactgcatgtggcttctctgtctctgtggaaaagccatctcaggttggcggcagacacattgtcatcagaggggagcagcggctctggtcctcggagctggttcctcttgctcccacacttgtgccagcccggaggggactggtcccggtcaccgcggacgtgctggccttggtatgtgccaggcttgcctgggctgggcagccttgggggggctgcctttgtggtgggcgctggggaagtacgtcccagcggcctcagggtctaaggagcgctagtgccttgcccacaggtgcgggaccatctgatgtgatgtgaatactcttcccacatacattaaacacacttaagtgagtgtgcgcagggcttctgattcagggccggcctggcctgggggttgagggtcagcagtcagtgaggaggccaggagaggcgtcccagccttctcccgcctccagcccacgcagggccttggtgcccatgagctgagcacccccacaaccctagtcaacggccctatcctgtggggcctctgccacatctcagcggccccaggtgaatggctggctgctcagcacggagagctggggagagaatctctggctggggaggggctgctggagctgctggacccaggggtctcccgaggtggctcaggggagcaggcatcttggggtaccctgggttgaggcagaggctgcacgtggaagatggcccgagtcagtggatggtgccagtcagacagggccatggtcccaggtgcatccaggggctctgtcatggccaccctggggaccctgcttgggggggggtctgcaccagccatttcctgggctcgtagatctagcaggatgtgatgggtggaggtgggctgggcctgtgccatgggctagagcgtcactggggaggcccacaccgccatcagaatcctcctcccagcgcctccccaacctgagggcctgctccctccgcagcctgctcactgcacccactgcctgcctgcctctgagtcctgcactcacccgtccaccaggacagggatggctgtcaggatgtagtgttgctgggagcaagtcaggtcctgctgtgaggagagacctaagagtgttggtgtgtgtccacacacccgtgcatgcctgtgtacctgtgcacactatggatgctcctgcacacctgtgtacaactgcacgcctgtgtatggccatgcatgcataccccatgtaaccgtgcgtgcctgtgcacactcgggatctgccagtggggcagtccagggataaaagactcctgagaactcctt

SEQ ID NO: 376329 - DNA, 2384 bp, Homo sapiens
gtagtcccggagtccgcgtgcgcggggccgggtccgggagccccagggcagccgccccgccgagtcgcaggcacagtgtcaccttcgtcccctccggagctgcacgtggcctgagcaggatggtgccctccagcccagcggtggagaagcaggtgcccgtggaacctgggcctgaccccgagctccggtcctggcggcgcctcgtgtgctacctttgcttctacggcttcatggcgcagatacggccaggggagagcttcatcaccccctacctcctggggcccgacaagaacttcacgcgggagcaggtcacgaacgagatcacgccggtgctgtcgtactcctacctggccgtgctggtgcccgtgttcctgctcaccgactacctgcgctacacgccggtgctgctgctgcaggggctcagcttcgtgtcggtgtggctgctgctgctgctgggccactcggtggcgcacatgcagctcatggagctcttctacagcgtcaccatggccgcgcgcatcgcctattcctcctacatcttctctctcgtgcggcccgcgcgctaccagcgtgtggccggctactcgcgcgctgcggtgctgctgggcgtgttcaccagctccgtgctgggccagctgctggtcactgtgggccgagtctccttctccacgctcaactacatctcgctggccttcctcaccttcagcgtggtcctcgccctcttcctgaagcgccccaagcgcagcctcttcttcaaccgcgacgaccgggggcggtgcgaaacctcggcttcggagctggagcgcatgaatcccggcccaggcgggaagctgggacacgccctgcgggtggcctgtggggactcagtgctggcgcggatgctgcgggagctgggggacagcctgcggcggccgcagctgcgcctgtggtccctctggtgggtcttcaactcggccggctactacctggtggtctactacgtgcacatcctgtggaacgaggtggaccccaccaccaacagtgcgcgggtctacaacggcgcggcagatgctgcctccacgctgctgggcgccatcacgtccttcgccgcgggcttcgtgaagatccgctgggcgcgctggtccaagctgctcatcgcgggcgtcacggccacgcaggcggggctggtcttccttctggcgcacacgcgccacccgagcagcatctggctgtgctatgcggccttcgtgctgttccgcggctcctaccagttcctcgtgcccatcgccacctttcagattgcatcttctctgtctaaagagctctgtgccctggtcttcggggtcaacacgttctttgccaccatcgtcaagaccatcatcactttcattgtctcggacgtgcggggcctgggcctcccggtccgcaagcagttccagttatactccgtgtacttcctgatcctgtccatcatctacttcttgggggccatgctggatggcctgcggcactgccagcggggccaccacccgcggcagcccccggcccagggcctgaggagtgccgcggaggagaaggcagcacaggcactgagcgtgcaggacaagggcctcggaggcctgcagccagcccagagcccgccgctttccccagaagacagcctgggggctgtggggccagcctccctggagcagagacagagcgacccatacctggcccaggccccggccccgcaggcagctgaattcctgagcccagtgacaaccccttccccctgcactctgtgctccgcccaagcctcaggccctgaggctgcagatgagacttgtccccagctggctgtccatcctcctggtgtcagcaagctgggtttgcagtgtcttccaagcgacggtgttcagaatgtgaaccagtgactctcgggcgcccctgtgaatgaagaactgcatgtggcttctctgtctctgtggaaaagccatctcaggttggcggcagacacattgtcatcagaggggagcagcggctctggtcctcggagctggttcctctctcccaccctaagggcagccctccatggtcctgtctgtccttctgaagtgtgtccatcctgacctgcgggtcctcagctgctcccacacttgtgccagcccggaggggactggtcccggtcaccgcggacgtgctggccttgaacgaatgactcgggttgatgttgccggatctcaggggtggctgtgactgacagaggaccttgttgcacctcgtggctgctttgttcacccgcagggcggcctgtgggcaccccggggttccccttcagtcccaaggaggggcgagcacacaccctggaggagcccagatggccttgtgctgagtgtggcctcagctcccattgcctcacgggg

SEQ ID NO: 376330 - DNA, 3542 bp, Homo sapiens
gtagtcccggagtccgcgtgcgcggggccgggtccgggagccccagggcagccgccccgccgagtcgcaggtcacgaacgagatcacgccggtgctgtcgtactcctacctggccgtgctggtgcccgtgttcctgctcaccgactacctgcgctacacgccggtgctgctgctgcaggggctcagcttcgtgtcggtgtggctgctgctgctgctgggccactcggtggcgcacatgcagctcatggagctcttctacagcgtcaccatggccgcgcgcatcgcctattcctcctacatcttctctctcgtgcggcccgcgcgctaccagcgtgtggccggctactcgcgcgctgcggtgctgctgggcgtgttcaccagctccgtgctgggccagctgctggtcactgtgggccgagtctccttctccacgctcaactacatctcgctggccttcctcaccttcagcgtggtcctcgccctcttcctgaagcgccccaagcgcagcctcttcttcaaccgcgacgaccgggggcggtgcgaaacctcggcttcggagctggagcgcatgaatcccggcccaggcgggaagctgggacacgccctgcgggtggcctgtggggactcagtgctggcgcggatgctgcgggagctgggggacagcctgcggcggccgcagctgcgcctgtggtccctctggtgggtcttcaactcggccggctactacctggtggtctactacgtgcacatcctgtggaacgaggtggaccccaccaccaacagtgcgcgggtctacaacggcgcggcagatgctgcctccacgctgctgggcgccatcacgtccttcgccgcgggcttcgtgaagatccgctgggcgcgctggtccaagctgctcatcgcgggcgtcacggccacgcaggcggggctggtcttccttctggcgcacacgcgccacccgagcagcatctggctgtgctatgcggccttcgtgctgttccgcggctcctaccagttcctcgtgcccatcgccacctttcagattgcatcttctctgtctaaagagctctgtgccctggtcttcggggtcaacacgttctttgccaccatcgtcaagaccatcatcactttcattgtctcggacgtgcggggcctgggcctcccggtccgcaagcagttccagttatactccgtgtacttcctgatcctgtccatcatctacttcttgggggccatgctggatggcctgcggcactgccagcggggccaccacccgcggcagcccccggcccagggcctgaggagtgccgcggaggagaaggcagcacaggcactgagcgtgcaggacaagggcctcggaggcctgcagccagcccagagcccgccgctttccccagaagacagcctgggggctgtggggccagcctccctggagcagagacagagcgacccatacctggcccaggccccggccccgcaggcagctgaattcctgagcccagtgacaaccccttccccctgcactctgtgctccgcccaagcctcaggccctgaggctgcagatgagacttgtccccagctggctgtccatcctcctggtgtcagcaagctgggtttgcagtgtcttccaagcgacggtgttcagaatgtgaaccagtgactctcgggcgcccctgtggtaactttgcaggcggccctcagtgcatccccacgacccctgcctcgagggccgcctgccttagcaatgggggcctccgcttatcctgctagcaggccccctaggattccccctgccctgtgccgcactctggcggtggccacagcgtgctggcgacactcagggcagctgcctggccatgctgtccctgcactgtgccccgcgggctttgttgctggaagaggtgggtggtgggcttctgcgtccaccaggcctcactggctcatgccccttggggggcttgagacaaatcctttctgccccccagggctagtgaagtggcctcttggataccagctcaggggacactggccccacaggagttgtgagccctctagggcagggtgggagccgggaccctcaggtgtagctgagctgtgacattgctggtcatccttggtgctcttgcttttttgaaagatgctttttttttttttaactgacgtagaatgaagaactgcatgtggcttctctgtctctgtggaaaagccatctcaggttggcggcagacacattgtcatcagaggggagcagcggctctggtcctcggagctggttcctctctcccaccctaagggcagccctccatggtcctgtctgtccttctgaagtgtgtccatcctgacctgcgggtcctcagctgctcccacacttgtgccagcccggaggggactggtcccggtcaccgcggacgtgctggccttggtatgtgccaggcttgcctgggctgggcagccttgggggggctgcctttgtggtgggcgctggggaagtacgtcccagcggcctcagggtctaaggagcgctagtgccttgcccacaggtgcgggaccatctgatgtgatgtgaatactcttcccacatacattaaacacacttaagtgagtgtgcgcagggcttctgattcagggccggcctggcctgggggttgagggtcagcagtcagtgaggaggccaggagaggcgtcccagccttctcccgcctccagcccacgcagggccttggtgcccatgagctgagcacccccacaaccctagtcaacggccctatcctgtggggcctctgccacatctcagcggccccaggtgaatggctggctgctcagcacggagagctggggagagaatctctggctggggaggggctgctggagctgctggacccaggggtctcccgaggtggctcaggggagcaggcatcttggggtaccctgggttgaggcagaggctgcacgtggaagatggcccgagtcagtggatggtgccagtcagacagggccatggtcccaggtgcatccaggggctctgtcatggccaccctggggaccctgcttgggggggggtctgcaccagccatttcctgggctcgtagatctagcaggatgtgatgggtggaggtgggctgggcctgtgccatgggctagagcgtcactggggaggcccacaccgccatcagaatcctcctcccagcgcctccccaacctgagggcctgctccctccgcagcctgctcactgcacccactgcctgcctgcctctgagtcctgcactcacccgtccaccaggacagggatggctgtcaggatgtagtgttgctgggagcaagtcaggtcctgctgtgaggagagacctaagagtgttggtgtgtgtccacacacccgtgcatgcctgtgtacctgtgcacactatggatgctcctgcacacctgtgtacaactgcacgcctgtgtatggccatgcatgcataccccatgtaaccgtgcgtgcctgtgcacactcgggatctgccagtggggcagtccagggataaaagactcctgagaactcctt

SEQ ID NO: 376331 - DNA, 1226 bp, Homo sapiens
gtagtcccggagtccgcgtgcgcggggccgggtccgggagccccagggcagccgccccgccgagtcgcaggcacagtgtcaccttcgtcccctccggagctgcacgtggcctgagcaggatggtgccctccagcccagcggtggagaagcaggtgcccgtggaacctgggcctgaccccgagctccggtcctggcggcgcctcgtgtgctacctttgcttctacggcttcatggcgcagatacggccaggggagagcttcatcaccccctacctcctggggcccgacaagaacttcacgcgggagcaggcgaggacagggtcttgccctggctccggctgtcggtggcggggctggggctggagcggcggagccatctccttgacccctcatgaaatgccttctgctcctggccagtccgtccctctccctgccacccactgaccagatggcatctctgctcttagtggagggccactgtccaccgccaaggttatttataggggtgagcattatgtgtggcgtttcccttaaaataacaaaataagaaaagtctctagagcaaaaatgtttaaatcccatctgcctgccctctcatgttgtacattaacggattaaaaagtagattccagaaattaagccattccaccaggccttggatatcatcagagggacgatgggtgcaggtgctctgcgcacctgccacttggtggggcccccgatctcagcccctctggctgcaggagaggcccggggagagcttcatcacgccctccctcctggggcccgacaagaacttcacgcgggagcaggcacgtgggcgccggggtgcaggggcagccaccagtaggtgggcggggagcagcttcgggggcaagggaggcccagcctgccaggactcgccagcccctgttgttgccaggcttgtgtctaggaagttcacgtaagtggtgtcttgtgacccagctttcgcaagttgctctcctgcccaatctgacttgagagacgttccacgtgggttcgaggctgttcttaagctgcgcctcctgggttgaactacaaggtgcttatctgctgctttgctggaggtgattaggggattccggcttctcccactgcaggtgatggctgcaggtagagcacgagctggcagcctcaggcagtgggccttgacccagctggcccgggctggcacttccagttcactcctggggcgaatgctgcttc

SEQ ID NO: 376332 - DNA, 2838 bp, Homo sapiens
gtagtcccggagtccgcgtgcgcggggccgggtccgggagccccagggcagccgccccgccgagtcgcaggcacagtgtcaccttcgtcccctccggagctgcacgtggcctgagcaggatggtgccctccagcccagcggtggagaagcaggtgcccgtggaacctgggcctgaccccgagctccggtcctggcggcgcctcgtgtgctacctttgcttctacggcttcatggcgcagatacggccaggggagagcttcatcaccccctacctcctggggcccgacaagaacttcacgcgggagcaggtcacgaacgagatcacgccggtgctgtcgtactcctacctggccgtgctggtgcccgtgttcctgctcaccgactacctgcgctacacgccggtgctgctgctgcaggggctcagcttcgtgtcggtgtggctgctgctgctgctgggccactcggtggcgcacatgcagctcatggagctcttctacagcgtcaccatggccgcgcgcatcgcctattcctcctacatcttctctctcgtgcggcccgcgcgctaccagcgtgtggccggctactcgcgcgctgcggtgctgctgggcgtgttcaccagctccgtgctgggccagctgctggtcactgtgggccgagtctccttctccacgctcaactacatctcgctggccttcctcaccttcagcgtggtcctcgccctcttcctgaagcgccccaagcgcagcctcttcttcaaccgcgacgaccgggggcggtgcgaaacctcggcttcggagctggagcgcatgaatcccggcccaggcgggaagctgggacacgccctgcgggtggcctgtggggactcagtgctggcgcggatgctgcgggagctgggggacagcctgcggcggccgcagctgcgcctgtggtccctctggtgggtcttcaactcggccggctactacctggtggtctactacgtgcacatcctgtggaacgaggtggaccccaccaccaacagtgcgcgggtctacaacggcgcggcagatgctgcctccacgctgctgggcgccatcacgtccttcgccgcgggcttcgtgaagatccgctgggcgcgctggtccaagctgctcatcgcgggcgtcacggccacgcaggcggggctggtcttccttctggcgcacacgcgccacccgagcagcatctggctgtgctatgcggccttcgtgctgttccgcggctcctaccagttcctcgtgcccatcgccacctttcagattgcatcttctctgtctaaagagctctgtgccctggtcttcggggtcaacacgttctttgccaccatcgtcaagaccatcatcactttcattgtctcggacgtgcggggcctgggcctcccggtccgcaagcagttccagttatactccgtgtacttcctgatcctgtccatcatctacttcttgggggccatgctggatggcctgcggcactgccagcggggccaccacccgcggcagcccccggcccagggcctgaggagtgccgcggaggagaaggcagcacaggcactgagcgtgcaggacaagggcctcggaggcctgcagccagcccagagcccgccgctttccccagaagacagcctgggggctgtggggccagcctccctggagcagagacagagcgacccatacctggcccaggccccggccccgcaggcagctgaattcctgagcccagtgacaaccccttccccctgcactctgtgctccgcccaagcctcaggccctgaggctgcagatgagacttgtccccagctggctgtccatcctcctggtgtcagcaagctgggtttgcagtgtcttccaagcgacggtgttcagaatgtgaaccagtgactctcgggcgcccctgtggtaactttgcaggcggccctcagtgcatccccacgacccctgcctcgagggccgcctgccttagcaatgggggcctccgcttatcctgctagcaggccccctaggattccccctgccctgtgccgcactctggcggtggccacagcgtgctggcgacactcagggcagctgcctggccatgctgtccctgcactgtgccccgcgggctttgttgctggaagaggtgggtggtgggcttctgcgtccaccaggcctcactggctcatgccccttggggggcttgagacaaatcctttctgccccccagggctagtgaagtggcctcttggataccagctcaggggacactggccccacaggagttgtgagccctctagggcagggtgggagccgggaccctcaggtgtagctgagctgtgacattgctggtcatccttggtgctcttgcttttttgaaagatgctttttttttttttaactgacgtagaatgaagaactgcatgtggcttctctgtctctgtggaaaagccatctcaggttggcggcagacacattgtcatcagaggggagcagcggctctggtcctcggagctggttcctctctcccaccctaagggcagccctccatggtcctgtctgtccttctgaagtgtgtccatcctgacctgcgggtcctcagctgctcccacacttgtgccagcccggaggggactggtcccggtcaccgcggacgtgctggccttggtatgtgccaggcttgcctgggctgggcagccttgggggggctgcctttgtggtgggcgctggggaagtacgtcccagcggcctcagggtctaaggagcgctagtgccttgcccacaggtgcgggaccatctgatgtgatgtgaatactcttcccacatacattaaacacacttaagtgag

SEQ ID NO: 376333 - DNA, 3780 bp, Homo sapiens
gtagtcccggagtccgcgtgcgcggggccgggtccgggagccccagggcagccgccccgccgagtcgcaggcacagtgtcaccttcgtcccctccggagctgcacgtggcctgagcaggatggtgccctccagcccagcggtggagaagcaggtgcccgtggaacctgggcctgaccccgagctccggtcctggcggcgcctcgtgtgctacctttgcttctacggcttcatggcgcagatacggccaggggagagcttcatcaccccctacctcctggggcccgacaagaacttcacgcgggagcaggtcacgaacgagatcacgccggtgctgtcgtactcctacctggccgtgctggtgcccgtgttcctgctcaccgactacctgcgctacacgccggtgctgctgctgcaggggctcagcttcgtgtcggtgtggctgctgctgctgctgggccactcggtggcgcacatgcagctcatggagctcttctacagcgtcaccatggccgcgcgcatcgcctattcctcctacatcttctctctcgtgcggcccgcgcgctaccagcgtgtggccggctactcgcgcgctgcggtgctgctgggcgtgttcaccagctccgtgctgggccagctgctggtcactgtgggccgagtctccttctccacgctcaactacatctcgctggccttcctcaccttcagcgtggtcctcgccctcttcctgaagcgccccaagcgcagcctcttcttcaaccgcgacgaccgggggcggtgcgaaacctcggcttcggagctggagcgcatgaatcccggcccaggcgggaagctgggacacgccctgcgggtggcctgtggggactcagtgctggcgcggatgctgcgggagctgggggacagcctgcggcggccgcagctgcgcctgtggtccctctggtgggtcttcaactcggccggctactacctggtggtctactacgtgcacatcctgtggaacgaggtggaccccaccaccaacagtgcgcgggtctacaacggcgcggcagatgctgcctccacgctgctgggcgccatcacgtccttcgccgcgggcttcgtgaagatccgctgggcgcgctggtccaagctgctcatcgcgggcgtcacggccacgcaggcggggctggtcttccttctggcgcacacgcgccacccgagcagcatctggctgtgctatgcggccttcgtgctgttccgcggctcctaccagttcctcgtgcccatcgccacctttcagattgcatcttctctgtctaaagagctctgtgccctggtcttcggggtcaacacgttctttgccaccatcgtcaagaccatcatcactttcattgtctcggacgtgcggggcctgggcctcccggtccgcaagcagttccagttatactccgtgtacttcctgatcctgtccatcatctacttcttgggggccatgctggatggcctgcggcactgccagcggggccaccacccgcggcagcccccggcccagggcctgaggagtgccgcggaggagaaggcagcacaggcactgagcgtgcaggacaagggcctcggaggcctgcagccagcccagagcccgccgctttccccagaagacagcctgggggctgtggggccagcctccctggagcagagacagagcgacccatacctggcccaggccccggccccgcaggcagctgaattcctgagcccagtgacaaccccttccccctgcactctgtgctccgcccaagcctcaggccctgaggctgcagatgagacttgtccccagctggctgtccatcctcctggtgtcagcaagctgggtttgcagtgtcttccaagcgacggtgttcagaatgtgaaccagtgactctcgggcgcccctgtggtaactttgcaggcggccctcagtgcatccccacgacccctgcctcgagggccgcctgccttagcaatgggggcctccgcttatcctgctagcaggccccctaggattccccctgccctgtgccgcactctggcggtggccacagcgtgctggcgacactcagggcagctgcctggccatgctgtccctgcactgtgccccgcgggctttgttgctggaagaggtgggtggtgggcttctgcgtccaccaggcctcactggctcatgccccttggggggcttgagacaaatcctttctgccccccagggctagtgaagtggcctcttggataccagctcaggggacactggccccacaggagttgtgagccctctagggcagggtgggagccgggaccctcaggtgtagctgagctgtgacattgctggtcatccttggtgctcttgcttttttgaaagatgctttttttttttttaactgacgtagaatgaagaactgcatgtggcttctctgtctctgtggaaaagccatctcaggttggcggcagacacattgtcatcagaggggagcagcggctctggtcctcggagctggttcctctctcccaccctaagggcagccctccatggtcctgtctgtccttctgaagtgtgtccatcctgacctgcgggtcctcagctgctcccacacttgtgccagcccggaggggactggtcccggtcaccgcggacgtgctggccttggtatgtgccaggcttgcctgggctgggcagccttgggggggctgcctttgtggtgggcgctggggaagtacgtcccagcggcctcagggtctaaggagcgctagtgccttgcccacaggtgcgggaccatctgatgtgatgtgaatactcttcccacatacattaaacacacttaagtgagtgtgcgcagggcttctgattcagggccggcctggcctgggggttgagggtcagcagtcagtgaggaggccaggagaggcgtcccagccttctcccgcctccagcccacgcagggccttggtgcccatgagctgagcacccccacaaccctagtcaacggccctatcctgtggggcctctgccacatctcagcggccccaggtgaatggctggctgctcagcacggagagctggggagagaatctctggctggggaggggctgctggagctgctggacccaggggtctcccgaggtggctcaggggagcaggcatcttggggtaccctgggttgaggcagaggctgcacgtggaagatggcccgagtcagtggatggtgccagtcagacagggccatggtcccaggtgcatccaggggctctgtcatggccaccctggggaccctgcttgggggggggtctgcaccagccatttcctgggctcgtagatctagcaggatgtgatgggtggaggtgggctgggcctgtgccatgggctagagcgtcactggggaggcccacaccgccatcagaatcctcctcccagcgcctccccaacctgagggcctgctccctccgcagcctgctcactgcacccactgcctgcctgcctctgagtcctgcactcacccgtccaccaggacagggatggctgtcaggatgtagtgttgctgggagcaagtcaggtcctgctgtgaggagagacctaagagtgttggtgtgtgtccacacacccgtgcatgcctgtgtacctgtgcacactatggatgctcctgcacacctgtgtacaactgcacgcctgtgtatggccatgcatgcataccccatgtaaccgtgcgtgcctgtgcacactcgggatctgccagtggggcagtccagggataaaagactcctgagaactcctt

SEQ ID NO: 376334 - DNA, 3293 bp, Homo sapiens
gtagtcccggagtccgcgtgcgcggggccgggtccgggagccccagggcagccgccccgccgagtcgcaggcacagtgtcaccttcgtcccctccggagctgcacgtggcctgagcaggatggtgccctccagcccagcggtggagaagcaggtgcccgtggaacctgggcctgaccccgagctccggtcctggcggcgcctcgtgtgctacctttgcttctacggcttcatggcgcagatacggccaggggagagcttcatcaccccctacctcctggggcccgacaagaacttcacgcgggagcaggtcacgaacgagatcacgccggtgctgtcgtactcctacctggccgtgctggtgcccgtgttcctgctcaccgactacctgcgctacacgccggtgctgctgctgcaggggctcagcttcgtgtcggtgtggctgctgctgctgctgggccactcggtggcgcacatgcagctcatggagctcttctacagcgtcaccatggccgcgcgcatcgcctattcctcctacatcttctctctcgtgcggcccgcgcgctaccagcgtgtggccggctactcgcgcgctgcggtgctgctgggcgtgttcaccagctccgtgctgggccagctgctggtcactgtgggccgagtctccttctccacgctcaactacatctcgctggccttcctcaccttcagcgtggtcctcgccctcttcctgaagcgccccaagcgcagcctcttcttcaaccgcgacgaccgggggcggtgcgaaacctcggcttcggagctggagcgcatgaatcccggcccaggcgggaagctgggacacgccctgcgggtggcctgtggggactcagtgctggcgcggatgctgcgggagctgggggacagcctgcggcggccgcagctgcgcctgtggtccctctggtgggtcttcaactcggccggctactacctggtggtctactacgtgcacatcctgtggaacgaggtggaccccaccaccaacagtgcgcgggtctacaacggcgcggcagatgctgcctccacgctgctgggcgccatcacgtccttcgccgcgggcttcgtgaagatccgctgggcgcgctggtccaagctgctcatcgcgggcgtcacggccacgcaggcggggctggtcttccttctggcgcacacgcgccacccgagcagcatctggctgtgctatgcggccttcgtgctgttccgcggctcctaccagttcctcgtgcccatcgccacctttcagattgcatcttctctgtctaaagagctctgtgccctggtcttcggggtcaacacgttctttgccaccatcgtcaagaccatcatcactttcattgtctcggacgtgcggggcctgggcctcccggtccgcaagcagttccagttatactccgtgtacttcctgatcctgtccatcatctacttcttgggggccatgctggatggcctgcggcactgccagcggggccaccacccgcggcagcccccggcccagggcctgaggagtgccgcggaggagaaggcagcacaggcactgagcgtgcaggacaagggcctcggaggcctgcagccagcccagagcccgccgctttccccagaagacagcctgggggctgtggggccagcctccctggagcagagacagagcgacccatacctggcccaggccccggccccgcaggcagctgaattcctgagcccagtgacaaccccttccccctgcactctgtgctccgcccaagcctcaggccctgaggctgcagatgagacttgtccccagctggctgtccatcctcctggtgtcagcaagctgggtttgcagtgtcttccaagcgacggtgttcagaatgtgaaccagtgactctcgggcgcccctgtgaatgaagaactgcatgtggcttctctgtctctgtggaaaagccatctcaggttggcggcagacacattgtcatcagaggggagcagcggctctggtcctcggagctggttcctctctcccaccctaagggcagccctccatggtcctgtctgtccttctgaagtgtgtccatcctgacctgcgggtcctcagctgctcccacacttgtgccagcccggaggggactggtcccggtcaccgcggacgtgctggccttggtatgtgccaggcttgcctgggctgggcagccttgggggggctgcctttgtggtgggcgctggggaagtacgtcccagcggcctcagggtctaaggagcgctagtgccttgcccacaggtgcgggaccatctgatgtgatgtgaatactcttcccacatacattaaacacacttaagtgagtgtgcgcagggcttctgattcagggccggcctggcctgggggttgagggtcagcagtcagtgaggaggccaggagaggcgtcccagccttctcccgcctccagcccacgcagggccttggtgcccatgagctgagcacccccacaaccctagtcaacggccctatcctgtggggcctctgccacatctcagcggccccaggtgaatggctggctgctcagcacggagagctggggagagaatctctggctggggaggggctgctggagctgctggacccaggggtctcccgaggtggctcaggggagcaggcatcttggggtaccctgggttgaggcagaggctgcacgtggaagatggcccgagtcagtggatggtgccagtcagacagggccatggtcccaggtgcatccaggggctctgtcatggccaccctggggaccctgcttgggggggggtctgcaccagccatttcctgggctcgtagatctagcaggatgtgatgggtggaggtgggctgggcctgtgccatgggctagagcgtcactggggaggcccacaccgccatcagaatcctcctcccagcgcctccccaacctgagggcctgctccctccgcagcctgctcactgcacccactgcctgcctgcctctgagtcctgcactcacccgtccaccaggacagggatggctgtcaggatgtagtgttgctgggagcaagtcaggtcctgctgtgaggagagacctaagagtgttggtgtgtgtccacacacccgtgcatgcctgtgtacctgtgcacactatggatgctcctgcacacctgtgtacaactgcacgcctgtgtatggccatgcatgcataccccatgtaaccgtgcgtgcctgtgcacactcgggatctgccagtggggcagtccagggataaaagactcctgagaactcctt

SEQ ID NO: 376335 - DNA, 3641 bp, Homo sapiens
ggccgttgaggaggtgcagggagaggagcgggagggctctgggtggctgccaagggggagctctgcgctcagaccctcaactaagaccaggaggtgcctgatgaggccccagcctgcagagccagctcctggtggaagaggaaatgaggcatgctccattcattcggaggtcacgaacgagatcacgccggtgctgtcgtactcctacctggccgtgctggtgcccgtgttcctgctcaccgactacctgcgctacacgccggtgctgctgctgcaggggctcagcttcgtgtcggtgtggctgctgctgctgctgggccactcggtggcgcacatgcagctcatggagctcttctacagcgtcaccatggccgcgcgcatcgcctattcctcctacatcttctctctcgtgcggcccgcgcgctaccagcgtgtggccggctactcgcgcgctgcggtgctgctgggcgtgttcaccagctccgtgctgggccagctgctggtcactgtgggccgagtctccttctccacgctcaactacatctcgctggccttcctcaccttcagcgtggtcctcgccctcttcctgaagcgccccaagcgcagcctcttcttcaaccgcgacgaccgggggcggtgcgaaacctcggcttcggagctggagcgcatgaatcccggcccaggcgggaagctgggacacgccctgcgggtggcctgtggggactcagtgctggcgcggatgctgcgggagctgggggacagcctgcggcggccgcagctgcgcctgtggtccctctggtgggtcttcaactcggccggctactacctggtggtctactacgtgcacatcctgtggaacgaggtggaccccaccaccaacagtgcgcgggtctacaacggcgcggcagatgctgcctccacgctgctgggcgccatcacgtccttcgccgcgggcttcgtgaagatccgctgggcgcgctggtccaagctgctcatcgcgggcgtcacggccacgcaggcggggctggtcttccttctggcgcacacgcgccacccgagcagcatctggctgtgctatgcggccttcgtgctgttccgcggctcctaccagttcctcgtgcccatcgccacctttcagattgcatcttctctgtctaaagagctctgtgccctggtcttcggggtcaacacgttctttgccaccatcgtcaagaccatcatcactttcattgtctcggacgtgcggggcctgggcctcccggtccgcaagcagttccagttatactccgtgtacttcctgatcctgtccatcatctacttcttgggggccatgctggatggcctgcggcactgccagcggggccaccacccgcggcagcccccggcccagggcctgaggagtgccgcggaggagaaggcagcacaggcactgagcgtgcaggacaagggcctcggaggcctgcagccagcccagagcccgccgctttccccagaagacagcctgggggctgtggggccagcctccctggagcagagacagagcgacccatacctggcccaggccccggccccgcaggcagctgaattcctgagcccagtgacaaccccttccccctgcactctgtgctccgcccaagcctcaggccctgaggctgcagatgagacttgtccccagctggctgtccatcctcctggtgtcagcaagctgggtttgcagtgtcttccaagcgacggtgttcagaatgtgaaccagtgactctcgggcgcccctgtggtaactttgcaggcggccctcagtgcatccccacgacccctgcctcgagggccgcctgccttagcaatgggggcctccgcttatcctgctagcaggccccctaggattccccctgccctgtgccgcactctggcggtggccacagcgtgctggcgacactcagggcagctgcctggccatgctgtccctgcactgtgccccgcgggctttgttgctggaagaggtgggtggtgggcttctgcgtccaccaggcctcactggctcatgccccttggggggcttgagacaaatcctttctgccccccagggctagtgaagtggcctcttggataccagctcaggggacactggccccacaggagttgtgagccctctagggcagggtgggagccgggaccctcaggtgtagctgagctgtgacattgctggtcatccttggtgctcttgcttttttgaaagatgctttttttttttttaactgacgtagaatgaagaactgcatgtggcttctctgtctctgtggaaaagccatctcaggttggcggcagacacattgtcatcagaggggagcagcggctctggtcctcggagctggttcctctctcccaccctaagggcagccctccatggtcctgtctgtccttctgaagtgtgtccatcctgacctgcgggtcctcagctgctcccacacttgtgccagcccggaggggactggtcccggtcaccgcggacgtgctggccttggtatgtgccaggcttgcctgggctgggcagccttgggggggctgcctttgtggtgggcgctggggaagtacgtcccagcggcctcagggtctaaggagcgctagtgccttgcccacaggtgcgggaccatctgatgtgatgtgaatactcttcccacatacattaaacacacttaagtgagtgtgcgcagggcttctgattcagggccggcctggcctgggggttgagggtcagcagtcagtgaggaggccaggagaggcgtcccagccttctcccgcctccagcccacgcagggccttggtgcccatgagctgagcacccccacaaccctagtcaacggccctatcctgtggggcctctgccacatctcagcggccccaggtgaatggctggctgctcagcacggagagctggggagagaatctctggctggggaggggctgctggagctgctggacccaggggtctcccgaggtggctcaggggagcaggcatcttggggtaccctgggttgaggcagaggctgcacgtggaagatggcccgagtcagtggatggtgccagtcagacagggccatggtcccaggtgcatccaggggctctgtcatggccaccctggggaccctgcttgggggggggtctgcaccagccatttcctgggctcgtagatctagcaggatgtgatgggtggaggtgggctgggcctgtgccatgggctagagcgtcactggggaggcccacaccgccatcagaatcctcctcccagcgcctccccaacctgagggcctgctccctccgcagcctgctcactgcacccactgcctgcctgcctctgagtcctgcactcacccgtccaccaggacagggatggctgtcaggatgtagtgttgctgggagcaagtcaggtcctgctgtgaggagagacctaagagtgttggtgtgtgtccacacacccgtgcatgcctgtgtacctgtgcacactatggatgctcctgcacacctgtgtacaactgcacgcctgtgtatggccatgcatgcataccccatgtaaccgtgcgtgcctgtgcacactcgggatctgccagtggggcagtccagggataaaagactcctgagaactcctt

SEQ ID NO: 376336 - DNA, 492 bp, Homo sapiens
ctctactaaaaatacaaaaattagccaggcaaggtggcgcatgcctataatcccagctactctggaggctggggcagaagaattgcttgaacccgggaggcagagtttgcagtgagccgagatcgtgccactgcactccagcctgggtgacagagcaagattctgtctcaaaaaaagagtagtgctcaaaaaattaaacttggaatccagctttcagaatcttcacccagagttaggaggatcccttgaggccaggagttagagaccagcctgggtagcatagccagatgctgtctctacaaaagaaatttaaaaagattattggggtgtagtggcccatgcctgtagtcctagctacttgggaggctgaggtgaaaggatcacttgagcccaggattctaggttacagtgagctttgatcatgccactcacaccactgcactcctgcaacatttcactccagtcagggcaacacagcaagaccctgtctac

SEQ ID NO: 376337 - DNA, 186 bp, Homo sapiens
ggtcaaggaaggggcaaggaaatggaacagagtagagtggggccaagttttctgaattccaaggataataagacaattgtttgggttgtacaggaccaggctacagaggaatattgaaagttggcggaaggcacagacttgatgaactgagtggtagtggaataagtcgaatgtagatttactggt

SEQ ID NO: 376338 - DNA, 529 bp, Homo sapiens
gtggtgcaatcacggctcactgcagccttcacctctggggctccagcaatcctcccacctcagcttcctagctgggactacaagcatgcaccaccacacccaggtcaccatgcttggctaatttttctatatgttttgtagagatgggcttttgccttgttgcccaggctggtctcaaactcctgagctcaagcaatctgccgaccttggcctcctaaagtgctgggattacaggtgtgggccaccatgcccagcctatgctataatttttaacgctgcatattaatccactgcctggctgtgttttaatatattttcctagtctcctattcatggatatataggttgcttctgttttttccctattataaaaagtgtggtgattattttctttgagaatacatctttgtatacttgtctaaaatatttaaaattggaattgcttagtcagactgggcacagaggcttatacctgtaattccagcacttggggaggctggtgagggagaattgcttgaggccaggagtt

SEQ ID NO: 376339 - DNA, 299 bp, Homo sapiens
caccctcccttcacttgtgccatccccacgctttgtccttaagctgtagtggtcccaggagataacctgtttacagcagcccattcagtattgaaaaatgaactccctcctgcagaatgttagaagaaacaacctcaaagacctcaggccacctgtggtcattagtatgtggcagcaagattgaacctgcctgcctcctacctgtgtgagcctgtggtgtgggtgtggtaccaaggccctggctctgggcagtctgttggctcctggtgttcactaaggcgtggggtgacaggccatct

SEQ ID NO: 376340 - DNA, 413 bp, Homo sapiens
aatgcctagatttcaatcctggccctgtctcttaataattatgtgatcttgtgcaagtcctgagcctcagtttccttaacttgaaaattgggataatagtatctatcttggagttggtatgaaaattaaacacaatttggctgggcacggtggcccacgcctgtaatcacagcactttgggaggccaaggcgggtggatcatctgaggtcaagagttcgagaccagcctggccaacatggtgaaaccctgcctctattaaagatacaaaaaattagctgggtgtaatcctgtaatcccagctactcaggaggctgaggcaggagaatcacttgaacccaggaggtggaggttgcagtgagccaagatagcgccattgcactccagcctgagcaacagggtgagactccatcta

SEQ ID NO: 376341 - DNA, 309 bp, Homo sapiens
gtgattagtgacatcttaagctaactgaaatcagctggtgcattgtcctacaccggtgcattgtgctacactatgctgttactgctctgtttgcaaatttatcaaattgtgtaattttgaaagctgacaaaattgttacttttgaactgattatttttgtattagagattatttaatttggtgaatggttacgcaagtgagatccttgaagattatagagcttcatcttttgatgacttggagtcagggaagagttaactatatggaaataggcagaatgcctaggttcttgtatcttttgtttttaaa

SEQ ID NO: 376342 - DNA, 1351 bp, Homo sapiens
tccagaagccctgaggagccgccccatgcctgacgccacatcccacaagctcccgaagtcgcggatggctcagtgacattccagatgctgtcccatcgctcagagtcccgagacacagacatgaacaccaagtccatcctttgaggaaggcagacttggcgggaatgtggttttcttcaaaggtgagggggtagggggagctgccagggcccagccggcaggggcaggaggggcggggcttcggcccagggccctgcacgggggtgaccatcagtgccccccatcaccgtgacagtcctatccccagtctgcaaaatgccccctggatggagcatcccatgagagccgggccatggagaggctggaatgtgccagactctgaggcacccagggggtcagcctttccctctggttggtccccctgtgccacaccgcagcctgcgcctggccagcttcccgtccctgcgagcacagcctgcgcctggccagcttcccgtccctgctgcgaccccattactaggtcatcgtctcatgccagagaactcgcaggaatcgcatgcaatgtttaacgagaggcagaatgtgggcaccaggtgtgaagcagtccccggctgtggacgggagactccaggctgcgccaggcagggcgccttcccctggaccttgaagggcacccgatgtcctggggccgtgaggggcggggtgcttatccatgtgacaggactcttccagtagcaacagggagggcccagcaaaacccgcagtttgtttcgggccacgttccaacaagtgactcggcggcgtctcccacctgcacactcagtcaggaggctgcagtctcccgtccagccccacagcctgagggattcctgttggttacccagaactgcctgccacaggtgccagggcaagagatgtcactcaattttccagcccccagtcctgtagacatcctgggtgtgcggcacacatcggctcactcacactgaccctctgagccggtgagaactccacaagaagagggccagcgcctcacaagatcaaggcggaacaacgcgtttgtgggatgatgaagacctcataacagacgtgccagtgggttgattactgtgaaattctcaactgtggtttctgtaacttaaaaaaaaaaatttccactttgggaggccgaggcgggcagatcacgaggtcagaagatcgagaccatcctggctaacacagtgaaaccccgtctctactaaaaatacaaaaaattagccgggcgtggtggctggtgcctgtagtcccagctatctgggaggctgaggcaggagaatggcgtgaacccaggaggaggagcttgcagtgagcc

SEQ ID NO: 376343 - DNA, 336 bp, Homo sapiens
tctcctaatgctacaaaacatcttttgccttcatgtttgaataaaaatgttgtatggcctggcgtggtggctcaggcctgtaatcccaccactttgggaggccaaggtgggtggatcatttgaggtcaggagttctagaaaagcccggccaatatggtgaaaccttgcctctaccaaaaatacaaaaattagccgggcatggtggtgggcgcctgtagtgtcagctactcaggaggctgaggcaggagaatcgcttgaactcgggaggtggaggtagcagtgagccaagatcgcgccactgcactccagcctgggcgacagagcggaactgtgtct

SEQ ID NO: 376344 - DNA, 435 bp, Homo sapiens
gagctcaatgtagagttttttgtgtggattgtttttaatgcatctttttttttccacacagatctgcaaaatcactcttagattctgttaagtccctgtcatacccctttctattaaacacgattctcacagaccacaacagactcattccttccttctgcctcatgctaactaaggtcattcggtaaacacaggagtatttaagttcagtaatataacttcctccgagtctctgttggcatagttttttcttcctttctctttcactagtcagagcttttacgagcatctttagaaacagttctgccctgtgctaaaccttttgcctgaataaaggtactaacagtggttgtattttctaatgatgttgactgcttaatcagagcaactttgggaatggattttggcagacttagtactcaaaccctttacagc

SEQ ID NO: 376345 - DNA, 380 bp, Homo sapiens
gtgtgtctatcagtagcattttacatacacagacacccatatgtaaatatgaatgttatattacatgaagtattttaaacttgcgtttgctattgtgactatatttccgtttcaatttctaactggtgattaataatatataaaaaaactgtcaatttttggccgggcgcggtggctcatgcctgtaatcccagcactttgggaggccaaggtgggcggatcacgagatcaggagatcaagaccatcctggctaacacggtgaaaccctgtctctactaaaaataaaaaaaaaattagccaggcgtggtggtgggtgcctggagtcccagctactcaggaggctgagacaggagaatggcgtgaacccgggaggcggagc

SEQ ID NO: 376346 - DNA, 515 bp, Homo sapiens
gtcacatacttctagcaatttatccatttttttctaggttttccaatttgttgacacaattgttcctagtaatttcttatgattctttgtatttctgctaagggttagtctgcgaagggttggtcaactttgttcagctcttcaaaacaccatcttttagtttgttgatctttttcagttttttcattgtccttattttagttacttctactctgaatcttattttctttctgctaacttttgatttacatttgacccttacacagcatacagttgaattgcatggatccactaatttacagaatatttcaaccaaatgcagatgaaaaatacagtacttgtggaatgtaaaacctgcatatacagaggacaacattttgtaaccaagggttctgcaggtctgactgtgggatttgagtatgcagattttggtatacatagggggtcctggaacctatcctctctgtatatcgagggatcgttgtatttggcttttttttccttttccctagttt

SEQ ID NO: 376347 - DNA, 632 bp, Homo sapiens
ttaagtccaactcagcccaaaatacagcatcctgacgacaaaactcaggttaaagaggaaatgatggacaacagaggcaactctagtctacctgacaaacttcctatcttccctgattctgcccgcttgccactgaccaggtccttctatctggagcccatggtcactttccacgtgcacccagaggccccggtgtcatccccttactctgaggagctgccacggctgccttttcccagcgactctcttatcctgggaaattacagtgaaccctgccccttctctttcccgatgccttatccaaattacagagggtgcgagtactcctacgggccagccttcacccggaaaaggaatgagcgggaaaggcagcgggtgaaatgtgtcaatgaaggctatgcccagctccgccatcatctgccagaggagtatttggagaagcgactcagcaaagtggaaaccctcagagctgcgatcaagtacattaactacctgcagtctcttctgtaccctgataaagctgagaccaagaataaccctggaaaagtttcctccatgatagcaaccaccagccaccatgctgaccctatgttcagaattgtttgagttgctgtttccaaatagaaatgaat

SEQ ID NO: 376348 - DNA, 635 bp, Homo sapiens
gtgagcgcgatcattagctatctgcccgtctatcttatactgattatttcggttaaagaggaaatgatggacaacagaggcaactctagtctacctgacaaacttcctatcttccctgattctgcccgcttgccactgaccaggtccttctatctggagcccatggtcactttccacgtgcacccagaggccccggtgtcatccccttactctgaggagctgccacggctgccttttcccagcgactctcttatcctgggaaattacagtgaaccctgccccttctctttcccgatgccttatccaaattacagagggtgcgagtactcctacgggccagccttcacccggaaaaggaatgagcgggaaaggcagcgggtgaaatgtgtcaatgaaggctatgcccagctccgccatcatctgccagaggagtatttggagaagcgactcagcaaagtggaaaccctcagagctgcgatcaagtacattaactacctgcagtctcttctgtaccctgataaagctgagaccaagaataaccctggaaaagtttcctccatgatagcaaccaccagccaccatgctgaccctatgttcagaattgtttgagttgctgtttccaaatagaaatgaat

SEQ ID NO: 376349 - DNA, 341 bp, Homo sapiens
ccaggctgaagtgcagtggagcaatcacagctcatggcagcctcgacctccccaggctcaggtgatccttccatttcagcctcccagatagctgggactacaggcatgcaccaccactccgggataattttttcatgtgtgtatttttagtagagacagggttttgccctgtttctcaggctggtctctaactcctgggctcaagtgatctgcctgccttggccttccaaaatgctaggattacaggtgtgagccactgtgcctgacctgttcctgatttttaaatacctggttgtcctcttcttttgtcatttctttattattatgtaatcctattcacc

SEQ ID NO: 376350 - DNA, 439 bp, Homo sapiens
ttcatttctcatactaatgctagtgaatcactagcattagtatgagaaatgaaatgcctctggaattgtttttttcttaaatttggggacagtgtcacttaggataaggttcaactaatagcaacataaaatctaaactaaaaatgacttaattaacacagaaagccaggcacagtggctcacacctgtaatcccagcactttaggaggccgaggtgggcagatcacctgaggtcaggagttcgagaccagctttaccaacatagtgaaacctcatctctactaaatatacaaaaaaaaaaaattagtcaggtgtggtggtgggcgcctgtaatcccagctactggggagaatcgcttgaacccgggaagcggaggttgcagtgagccgagatcacaccactggactccagcctgggcaacagagtgagactccgtctc

SEQ ID NO: 376351 - DNA, 1234 bp, Homo sapiens
caggtggagaagtccaggttttccactggcctctgttgacacctcggggtgtctagtgatttcttgttactgcttagtgggaatgagagttccagctcccccatagcctccagtgagaccgctgtggagatggccttgttacacttgggtgatggtgaaagtcctgaccctcctccaggcctctgaggccaccccagtaggcaggcggagggacatatattttgccaggttgcggtggaagtccaggctccccaaatggcctctactgacaccacaggggtaggaaaatttttttacttggccattggggatgaacttcctggttccatacttagccttctctggcaccatcttggtgggagtattagggtgccttgttactgccttgtgagggtagaaattgtagctgcccacccagcctttgctggttcaggtgggtcagggccacagtttttcctctcatttttgcccggagtacagtggttattatctaagattgttccgtcttgctaggctgctttagtcctttggctagagaaagtgggtgttttttgttgttttgttttgtttgagtctgtgctcaatgacaatttgccagcttcctcagctccaaattcagagtatatgaggcataagaaagcccaaggaactcactgctgtgcatccttgggtcccaaggtctttagtttttctgtcttctctccacctttaaaagtcttcttatgtttggtttacataagatgcccgaagttttcagttgtacttagtgggaggaatagagaaaagtatatattctattccttcctcgaaatcctctgaaaacattttgatcatgcttacacttttctaattataacagtatggtttcattttagaaaatttgaatatgttttaaaaaataagaaaatttaaattacctagaatcattatttaaagttaactatttccagcttttttctacgtaaagtgtattattgtgtgtgtgtgtatatatatatatatttttaatttctttacaaaattggaatcttactacaaattgaggtttctattcaatttttcccataacattaataaaattataagctttttctgatatttgaaatatccatctgttcagtggagataccagttcactcgtttgtgggtacaccattatccagcttctgtggtaagcagagcacttaagaggaaaggcaggcatatgggcctccgtgagctcacagtggtgggg

SEQ ID NO: 376352 - DNA, 576 bp, Homo sapiens
gaggagcatggctggcaattcgaaaggaggtaatctctctggggtacaatggagtagaaaacttagggacagaaggaatatacgaatggagaaattcgatttgcccaatctttattgctcacctattaaagtgctaaacaagctgatggtgattcctgttctcagaagcctgtgttctagcaggttataagaagatgagtctggttaaagagaagagcagggaagtggcttagattatggcataaactgaagttgaaactcagaatgaaaagtaggagtttgctgaggggaaagcaatatataaagtgatttgtgctataggacataagacagattatagataagagaactcagaaatagtaaggacagtggtaaaaagttaaaggatcctccctttccccagttaaccaggagaccaaataagggacttggtggtaggagtggtaggagcaggatcaatcacttatttattaagcacctgcacatgattcaaagaaggataagacggcccctacccttaaggagtttatgttctttctagttgtgaatagagaaagcatatgcaaaaaaaaaaaa

SEQ ID NO: 376353 - DNA, 2825 bp, Homo sapiens
gcagggcgaaggcgcgggagcagtttccagcagagggcggcaccactccctgctccatggaaactgagcaagttgtacaggtagccaggtgtcggtctccagcctgagaactctggctgttgttccttgtgtcgtcccatattcctgcctggcctgcgatggacatcagcaagggcctcccaggcatgcagggaggcctccacatatggatctctgagaaccggaagatggtgccggtacccgagggggcttacgggaacttttttgaggaacactgctatgtcatcctccacgtcccccagagcccgaaggccacgcagggggcgtccagcgacctgcactactgggtcgggaagcaggcgggtgcggaagcgcagggcgctgcggaggccttccagcagcgcctacaggacgagctggggggccagaccgtgctgcaccgcgaggcgcagggccacgagtccgactgcttctgcagctacttccgcccgggaatcatctacaggaagggaggcctagcatctgacctcaagcatgtggagaccaacttgttcaacatccagcgactgctgcacatcaaagggaggaagcacgtgtctgccactgaggtggagctctcctggaacagctttaataagggtgacatcttcctgctggacctaggcaagatgatgattcagtggaatgggcccaagaccagcatttctgagaaggctcgggggctggctttgacctacagcctccgggacagggaacgtggtggtggtcgtgcacagattggtgtggtggatgatgaggccaaagccccggacctcatgcagatcatggaggctgtgctgggccgcagggtgggcagcctgcgtgccgccacgcccagcaaggatatcaaccagctgcagaaggccaatgttcgcctgtaccatgtctatgagaagggcaaagacctggtggtcctggagacttctacatcctggaccagggtggcttcaagatctatgtgtggcagggacgcatgtctagcctccaggagagaaaggctgccttcagccgggctgtgggcttcatccaggccaagggctacccgacctacaccaacgtggaggtggtgaacgacggcgccgagtcggccgcgttcaagcagctcttccggacttggtctgagaagcggcgcaggaaccagaagctcggcgggagggataaatcgattcatgtaaagctggacgtgggcaagctgcacacccagcctaagttagcggcccagctcaggatggtggacgacggctctgggaaggtggaggtgtggtgcatccaggacttacacaggcagcccgtggaccccaagcgtcatggacagctgtgtgcaggcaactgctaccttgtgctctacacataccagaggctgggccgtgtccagtacatcctgtacctatggcagggccaccaggccactgcggatgagattgaggccctgaacagcaacgctgaggaactagatgtcatgtatggtggcgtcctagtacaggagcatgtgaccatgggcagcgagcccccccacttcctcgccatcttccagggccagctggtgatcttccaggagagagctgggcaccatggaaaggggcagtcagcatccaccacaaggcttttccaagtgcaaggcactgacagccacaacaccaggaccatggaggtgccagcccgtgcctcatccctcaactccagtgacatcttcttgctggtcacagccagcgtctgctacctctggtttgggaagggctgtaatggtgatcagcgtgagatggcacgggtggtggtcactgtcatttccaggaagaatgaggaaacggtgctggagggtcaggagcctccccacttctgggaggccctgggaggccgggccccctaccccagcaacaagaggctccctgaggaggtccccagcttccagccacgactgtttgagtgctccagccacatgggctgcctggtcctcgcagaagtggggttcttcagccaggaggacctggacaagtatgacatcatgttactggacacctggcaggagatcttcctgtggcttggggaagctgcaagtgagtggaaggaggcggtggcctggggccaggagtacctgaagactcacccagcagggaggagcccggccacacccatcgtgctggtcaagcagggccatgagcctcccaccttcattggatggttcttcacttgggacccctacaagtggactagccacccgtcccacaaggaagtggtggatggcagcccggcagcagcatcaaccatctctgagataacagcagaagtcaacaacttgcggctatccagatggccgggcaatggcagggcaggtgccgtggccctgcaggccctcaagggctcccaggacagctcagagaatgatctggtgcgaagccccaagtcggctggcagcagaaccagcagctccgtcagcagcaccagcgccacgatcaacgggggcctgcgccgggaacaactgatgcaccaggctgttgaggacctgccagagggcgtggaccctgcccgcagggagttctatctctcagactctgacttccaagatatctttgggaaatccaaggaggaattctacagcatggccacgtggaggcagcggcaggagaaaaagcagctgggcttcttctgaacccaagccctctcgactgcccctatcccctggaccccaacatacctacaatgctggggaggccctgcttccactcccctcagaggcttttggtcatcctctgcgtgtcagtaaaagcaggcagcccataaaaaaaaag

SEQ ID NO: 376354 - DNA, 1102 bp, Homo sapiens
agctttctccatgagcagagagggaccctgtacccagagcagagcggagtgctcggggagaaaccacggggctcagaggagggcccagggctcccactcctgagaagtggcttcccaggccctggggtggggcacttgtgccatgggctggggtgcccctctgggtggctcacagccttgctgtccgtgctggccaggctccctgaggaggtccccagcttccagccacgactgtttgagtgctccagccacatgggctgcctggtcctcgcagaagtggggttcttcagccaggaggacctggacaagtatgacatcatgttactggacacctggcaggagatcttcctgtggcttggggaagctgcaagtgagtggaaggaggcggtggcctggggccaggagtacctgaagactcacccagcagggaggagcccggccacacccatcgtgctggtcaagcagggccatgagcctcccaccttcattggatggttcttcacttgggacccctacaagtggactagccacccgtcccacaaggaagtggtggatggcagcccggcagcagcatcaaccatctctgagataacagcagaagtcaacaacttgcggctatccagatggccgggcaatggcagggcaggtgccgtggccctgcaggccctcaagggctcccaggacagctcagagaatgatctggtgcgaagccccaagtcggctggcagcagaaccagcagctccgtcagcagcaccagcgccacgatcaacgggggcctgcgccgggaacaactgatgcaccaggctgttgaggacctgccagagggcgtggaccctgcccgcagggagttctatctctcagactctgacttccaagatatctttgggaaatccaaggaggaattctacagcatggccacgtggaggcagcggcaggagaaaaagcagctgggcttcttctgaacccaagccctctcgactgcccctatcccctggaccccaacatacctacaatgctggggaggccctgcttccactcccctcagaggcttttggtcatcctctgcgtgtcagtaaaagcaggcagcccataaaaaaaaag

SEQ ID NO: 376355 - DNA, 411 bp, Homo sapiens
gagcctgtgctgtttgcagagcctgtgtttatacagagttcagctctgtttcaagaatttgtcagttgctgcagaatctgagtcttcatagtctgtgtgctgacatttgtgtgtttacagagccctcctaataaaagtcatgttctataatgaagttgtacaggtagccaggtgtcggtctccagcctgagaactctggctgttgttccttgtgtcgtcccatattcctgcctggcctgcgatggacatcagcaagggcctcccaggcatgcagggaggcctccacatatggatctctgagaaccggaagatggtgccggtacccgagggggcttacgggaacttttttgaggaacactgctatgtcatcctccacgtgagtcgcttggggaagtctgcctgagaggggtg

SEQ ID NO: 376356 - DNA, 2643 bp, Homo sapiens
atcctccccttctccacccgcacctccgtcttccccgcaacacatatacacaaacacccggaccctaggtcccccagagcccgaaggccacgcagggggcgtccagcgacctgcactactgggtcgggaagcaggcgggtgcggaagcgcagggcgctgcggaggccttccagcagcgcctacaggacgagctggggggccagaccgtgctgcaccgcgaggcgcagggccacgagtccgactgcttctgcagctacttccgcccgggaatcatctacaggaagggaggcctagcatctgacctcaagcatgtggagaccaacttgttcaacatccagcgactgctgcacatcaaagggaggaagcacgtgtctgccactgaggtggagctctcctggaacagctttaataagggtgacatcttcctgctggacctaggcaagatgatgattcagtggaatgggcccaagaccagcatttctgagaaggctcgggggctggctttgacctacagcctccgggacagggaacgtggtggtggtcgtgcacagattggtgtggtggatgatgaggccaaagccccggacctcatgcagatcatggaggctgtgctgggccgcagggtgggcagcctgcgtgccgccacgcccagcaaggatatcaaccagctgcagaaggccaatgttcgcctgtaccatgtctatgagaagggcaaagacctggtggtcctggagttggcgacccccccactgacccaggacctgctgcaggaggaggacttctacatcctggaccagggtggcttcaagatctatgtgtggcagggacgcatgtctagcctccaggagagaaaggctgccttcagccgggctgtgggcttcatccaggccaagggctacccgacctacaccaacgtggaggtggtgaacgacggcgccgagtcggccgcgttcaagcagctcttccggacttggtctgagaagcggcgcaggaaccagaagctcggcgggagggataaatcgattcatgtaaagctggacgtgggcaagctgcacacccagcctaagttagcggcccagctcaggatggtggacgacggctctgggaaggtggaggtgtggtgcatccaggacttacacaggcagcccgtggaccccaagcgtcatggacagctgtgtgcaggcaactgctaccttgtgctctacacataccagaggctgggccgtgtccagtacatcctgtacctatggcagggccaccaggccactgcggatgagattgaggccctgaacagcaacgctgaggaactagatgtcatgtatggtggcgtcctagtacaggagcatgtgaccatgggcagcgagcccccccacttcctcgccatcttccagggccagctggtgatcttccaggagagagctgggcaccatggaaaggggcagtcagcatccaccacaaggcttttccaagtgcaaggcactgacagccacaacaccaggaccatggaggtgccagcccgtgcctcatccctcaactccagtgacatcttcttgctggtcacagccagcgtctgctacctctggtttgggaagggctgtaatggtgatcagcgtgagatggcacgggtggtggtcactgtcatttccaggaagaatgaggaaacggtgctggagggtcaggagcctccccacttctgggaggccctgggaggccgggccccctaccccagcaacaagaggctccctgaggaggtccccagcttccagccacgactgtttgagtgctccagccacatgggctgcctggtcctcgcagaagtggggttcttcagccaggaggacctggacaagtatgacatcatgttactggacacctggcaggagatcttcctgtggcttggggaagctgcaagtgagtggaaggaggcggtggcctggggccaggagtacctgaagactcacccagcagggaggagcccggccacacccatcgtgctggtcaagcagggccatgagcctcccaccttcattggatggttcttcacttgggacccctacaagtggactagccacccgtcccacaaggaagtggtggatggcagcccggcagcagcatcaaccatctctgagataacagcagaagtcaacaacttgcggctatccagatggccgggcaatggcagggcaggtgccgtggccctgcaggccctcaagggctcccaggacagctcagagaatgatctggtgcgaagccccaagtcggctggcagcagaaccagcagctccgtcagcagcaccagcgccacgatcaacgggggcctgcgccgggaacaactgatgcaccaggctgttgaggacctgccagagggcgtggaccctgcccgcagggagttctatctctcagactctgacttccaagatatctttgggaaatccaaggaggaattctacagcatggccacgtggaggcagcggcaggagaaaaagcagctgggcttcttctgaacccaagccctctcgactgcccctatcccctggaccccaacatacctacaatgctggggaggccctgcttccactcccctcagaggcttttggtcatcctctgcgtgtcagtaaaagcaggcagcccataaaaaaaaag

SEQ ID NO: 376357 - DNA, 2951 bp, Homo sapiens
gagcctgtgctgtttgcagagcctgtgtttatacagagttcagctctgtttcaagaatttgtcagttgctgcagaatctgagtcttcatagtctgtgtgctgacatttgtgtgtttacagagccctcctaataaaagtcatgttctataatgaagttgtacaggtagccaggtgtcggtctccagcctgagaactctggctgttgttccttgtgtcgtcccatattcctgcctggcctgcgatggacatcagcaagggcctcccaggcatgcagggaggcctccacatatggatctctgagaaccggaagatggtgccggtacccgagggggcttacgggaacttttttgaggaacactgctatgtcatcctccacgtcccccagagcccgaaggccacgcagggggcgtccagcgacctgcactactgggtcgggaagcaggcgggtgcggaagcgcagggcgctgcggaggccttccagcagcgcctacaggacgagctggggggccagaccgtgctgcaccgcgaggcgcagggccacgagtccgactgcttctgcagctacttccgcccgggaatcatctacaggaagggaggcctagcatctgacctcaagcatgtggagaccaacttgttcaacatccagcgactgctgcacatcaaagggaggaagcacgtgtctgccactgaggtggagctctcctggaacagctttaataagggtgacatcttcctgctggacctaggcaagatgatgattcagtggaatgggcccaagaccagcatttctgagaaggctcgggggctggctttgacctacagcctccgggacagggaacgtggtggtggtcgtgcacagattggtgtggtggatgatgaggccaaagccccggacctcatgcagatcatggaggctgtgctgggccgcagggtgggcagcctgcgtgccgccacgcccagcaaggatatcaaccagctgcagaaggccaatgttcgcctgtaccatgtctatgagaagggcaaagacctggtggtcctggagttggcgacccccccactgacccaggacctgctgcaggaggaggacttctacatcctggaccagggtggcttcaagatctatgtgtggcagggacgcatgtctagcctccaggagagaaaggctgccttcagccgggctgtgggcttcatccaggccaagggctacccgacctacaccaacgtggaggtggtgaacgacggcgccgagtcggccgcgttcaagcagctcttccggacttggtctgagaagcggcgcaggaaccagaagctcggcgggagggataaatcgattcatgtaaagctggacgtgggcaagctgcacacccagcctaagttagcggcccagctcaggatggtggacgacggctctgggaaggtggaggtgtggtgcatccaggacttacacaggcagcccgtggaccccaagcgtcatggacagctgtgtgcaggcaactgctaccttgtgctctacacataccagaggctgggccgtgtccagtacatcctgtacctatggcagggccaccaggccactgcggatgagattgaggccctgaacagcaacgctgaggaactagatgtcatgtatggtggcgtcctagtacaggagcatgtgaccatgggcagcgagcccccccacttcctcgccatcttccagggccagctggtgatcttccaggagagagctgggcaccatggaaaggggcagtcagcatccaccacaaggcttttccaagtgcaaggcactgacagccacaacaccaggaccatggaggtgccagcccgtgcctcatccctcaactccagtgacatcttcttgctggtcacagccagcgtctgctacctctggtttgggaagggctgtaatggtgatcagcgtgagatggcacgggtggtggtcactgtcatttccaggaagaatgaggaaacggtgctggagggtcaggagcctccccacttctgggaggccctgggaggccgggccccctaccccagcaacaagaggctccctgaggaggtccccagcttccagccacgactgtttgagtgctccagccacatgggctgcctggtcctcgcagaagtggggttcttcagccaggaggacctggacaagtatgacatcatgttactggacacctggcaggagatcttcctgtggcttggggaagctgcaagtgagtggaaggaggcggtggcctggggccaggagtacctgaagactcacccagcagggaggagcccggccacacccatcgtgctggtcaagcagggccatgagcctcccaccttcattggatggttcttcacttgggacccctacaagtggactagccacccgtcccacaaggaagtggtggatggcagcccggcagcagcatcaaccatctctgagataacagcagaagtcaacaacttgcggctatccagatggccgggcaatggcagggcaggtgccgtggccctgcaggccctcaagggctcccaggacagctcagagaatgatctggtgcgaagccccaagtcggctggcagcagaaccagcagctccgtcagcagcaccagcgccacgatcaacgggggcctgcgccgggaacaactgatgcaccaggctgttgaggacctgccagagggcgtggaccctgcccgcagggagttctatctctcagactctgacttccaagatatctttgggaaatccaaggaggaattctacagcatggccacgtggaggcagcggcaggagaaaaagcagctgggcttcttctgaacccaagccctctcgactgcccctatcccctggaccccaacatacctacaatgctggggaggccctgcttccactcccctcagaggcttttggtcatcctctgcgtgtcagtaaaagcaggcagcccataaaaaaaaag

SEQ ID NO: 376358 - DNA, 1736 bp, Homo sapiens
cgcggcgggacctggaatcttggagggatggttgaggagtgggcggggcggagatggtgttgggggggggcagagggcgccactgacgcctactgtccccccttcagataaatcgattcatgtaaagctggacgtgggcaagctgcacacccagcctaagttagcggcccagctcaggatggtggacgacggctctgggaaggtggaggtgtggtgcatccaggacttacacaggcagcccgtggaccccaagcgtcatggacagctgtgtgcaggcaactgctaccttgtgctctacacataccagaggctgggccgtgtccagtacatcctgtacctatggcagggccaccaggccactgcggatgagattgaggccctgaacagcaacgctgaggaactagatgtcatgtatggtggcgtcctagtacaggagcatgtgaccatgggcagcgagcccccccacttcctcgccatcttccagggccagctggtgatcttccaggagagagctgggcaccatggaaaggggcagtcagcatccaccacaaggcttttccaagtgcaaggcactgacagccacaacaccaggaccatggaggtgccagcccgtgcctcatccctcaactccagtgacatcttcttgctggtcacagccagcgtctgctacctctggtttgggaagggctgtaatggtgatcagcgtgagatggcacgggtggtggtcactgtcatttccaggaagaatgaggaaacggtgctggagggtcaggagcctccccacttctgggaggccctgggaggccgggccccctaccccagcaacaagaggctccctgaggaggtccccagcttccagccacgactgtttgagtgctccagccacatgggctgcctggtcctcgcagaagtggggttcttcagccaggaggacctggacaagtatgacatcatgttactggacacctggcaggagatcttcctgtggcttggggaagctgcaagtgagtggaaggaggcggtggcctggggccaggagtacctgaagactcacccagcagggaggagcccggccacacccatcgtgctggtcaagcagggccatgagcctcccaccttcattggatggttcttcacttgggacccctacaagtggactagccacccgtcccacaaggaagtggtggatggcagcccggcagcagcatcaaccatctctgagataacagcagaagtcaacaacttgcggctatccagatggccgggcaatggcagggcaggtgccgtggccctgcaggccctcaagggctcccaggacagctcagagaatgatctggtgcgaagccccaagtcggctggcagcagaaccagcagctccgtcagcagcaccagcgccacgatcaacgggggcctgcgccgggaacaactgatgcaccaggctgttgaggacctgccagagggcgtggaccctgcccgcagggagttctatctctcagactctgacttccaagatatctttgggaaatccaaggaggaattctacagcatggccacgtggaggcagcggcaggagaaaaagcagctgggcttcttctgaacccaagccctctcgactgcccctatcccctggaccccaacatacctacaatgctggggaggccctgcttccactcccctcagaggcttttggtcatcctctgcgtgtcagtaaaagcaggcagcccataaaaaaaaag

SEQ ID NO: 376359 - DNA, 1348 bp, Homo sapiens
atcctccccttctccacccgcacctccgtcttccccgcaacacatatacacaaacacccggaccctaggtcccccagagcccgaaggccacgcagggggcgtccagcgacctgcactactgggtcgggaagcaggcgggtgcggaagcgcagggcgctgcggaggccttccagcagcgcctacaggacgagctggggggccagaccgtgctgcaccgcgaggcgcagggccacgagtccgactgcttctgcagctacttccgcccgggaatcatctacaggaagggaggcctagcatctgacctcaagcatgtggagaccaacttgttcaacatccagcgactgctgcacatcaaagggaggaagcacgtgtctgccactgaggtggagctctcctggaacagctttaataagggtgacatcttcctgctggacctaggcaagatgatgattcagtggaatgggcccaagaccagcatttctgagaaggctcgggggctggctttgacctacagcctccgggacagggaacgtggtggtggtcgtgcacagattggtgtggtggatgatgaggccaaagccccggacctcatgcagatcatggaggctgtgctgggccgcagggtgggcagcctgcgtgccgccacgcccagcaaggatatcaaccagctgcagaaggccaatgttcgcctgtaccatgtctatgagaagggcaaagacctggtggtcctggagttggcgacccccccactgacccaggacctgctgcaggaggaggacttctacatcctggaccagggtggcttcaagatctatgtgtggcagggacgcatgtctagcctccaggagagaaaggctgccttcagccgggctgtgggcttcatccaggccaagggctacccgacctacaccaacgtggaggtggtgaacgacggcgccgagtcggccgcgttcaagcagctcttccggacttggtctgagaagcggcgcaggaaccagaagctcggcgggagggataaatcgattcatgtaaagctggacgtgggcaagctgcacacccagcctaagttagcggcccagctcaggatggtggacgacggctctgggaaggtggaggtgtggtgcatccaggacttacacaggcagcccgtggaccccaagcgtcatggacagctgtgtgcaggcaactgctaccttgtgctctacacataccagaggctgggccgtgtccagtacatcctgtacctatggcagggccaccaggccactgcggatgagattgaggtcctgcaaggcttatcgcccgaggaacatagatatcgtgtgtgctcggagtaaaggccccaggt

SEQ ID NO: 376360 - DNA, 120 bp, Homo sapiens
aaatcgctatttgcagagcctgtgctgtttgcagagcctgtgtttatacagagttcagctctgtttcaagaatttgtcagctgaagcggaggatcacttgaacccagaaggtggaggttg

SEQ ID NO: 376361 - DNA, 2868 bp, Homo sapiens
gcagggcgaaggcgcgggagcagtttccagcagagggcggcaccactccctgctccatggaaactgagcaagttgtacaggtagccaggtgtcggtctccagcctgagaactctggctgttgttccttgtgtcgtcccatattcctgcctggcctgcgatggacatcagcaagggcctcccaggcatgcagggaggcctccacatatggatctctgagaaccggaagatggtgccggtacccgagggggcttacgggaacttttttgaggaacactgctatgtcatcctccacgtcccccagagcccgaaggccacgcagggggcgtccagcgacctgcactactgggtcgggaagcaggcgggtgcggaagcgcagggcgctgcggaggccttccagcagcgcctacaggacgagctggggggccagaccgtgctgcaccgcgaggcgcagggccacgagtccgactgcttctgcagctacttccgcccgggaatcatctacaggaagggaggcctagcatctgacctcaagcatgtggagaccaacttgttcaacatccagcgactgctgcacatcaaagggaggaagcacgtgtctgccactgaggtggagctctcctggaacagctttaataagggtgacatcttcctgctggacctaggcaagatgatgattcagtggaatgggcccaagaccagcatttctgagaaggctcgggggctggctttgacctacagcctccgggacagggaacgtggtggtggtcgtgcacagattggtgtggtggatgatgaggccaaagccccggacctcatgcagatcatggaggctgtgctgggccgcagggtgggcagcctgcgtgccgccacgcccagcaaggatatcaaccagctgcagaaggccaatgttcgcctgtaccatgtctatgagaagggcaaagacctggtggtcctggagttggcgacccccccactgacccaggacctgctgcaggaggaggacttctacatcctggaccagggtggcttcaagatctatgtgtggcagggacgcatgtctagcctccaggagagaaaggctgccttcagccgggctgtgggcttcatccaggccaagggctacccgacctacaccaacgtggaggtggtgaacgacggcgccgagtcggccgcgttcaagcagctcttccggacttggtctgagaagcggcgcaggaaccagaagctcggcgggagggataaatcgattcatgtaaagctggacgtgggcaagctgcacacccagcctaagttagcggcccagctcaggatggtggacgacggctctgggaaggtggaggtgtggtgcatccaggacttacacaggcagcccgtggaccccaagcgtcatggacagctgtgtgcaggcaactgctaccttgtgctctacacataccagaggctgggccgtgtccagtacatcctgtacctatggcagggccaccaggccactgcggatgagattgaggccctgaacagcaacgctgaggaactagatgtcatgtatggtggcgtcctagtacaggagcatgtgaccatgggcagcgagcccccccacttcctcgccatcttccagggccagctggtgatcttccaggagagagctgggcaccatggaaaggggcagtcagcatccaccacaaggcttttccaagtgcaaggcactgacagccacaacaccaggaccatggaggtgccagcccgtgcctcatccctcaactccagtgacatcttcttgctggtcacagccagcgtctgctacctctggtttgggaagggctgtaatggtgatcagcgtgagatggcacgggtggtggtcactgtcatttccaggaagaatgaggaaacggtgctggagggtcaggagcctccccacttctgggaggccctgggaggccgggccccctaccccagcaacaagaggctccctgaggaggtccccagcttccagccacgactgtttgagtgctccagccacatgggctgcctggtcctcgcagaagtggggttcttcagccaggaggacctggacaagtatgacatcatgttactggacacctggcaggagatcttcctgtggcttggggaagctgcaagtgagtggaaggaggcggtggcctggggccaggagtacctgaagactcacccagcagggaggagcccggccacacccatcgtgctggtcaagcagggccatgagcctcccaccttcattggatggttcttcacttgggacccctacaagtggactagccacccgtcccacaaggaagtggtggatggcagcccggcagcagcatcaaccatctctgagataacagcagaagtcaacaacttgcggctatccagatggccgggcaatggcagggcaggtgccgtggccctgcaggccctcaagggctcccaggacagctcagagaatgatctggtgcgaagccccaagtcggctggcagcagaaccagcagctccgtcagcagcaccagcgccacgatcaacgggggcctgcgccgggaacaactgatgcaccaggctgttgaggacctgccagagggcgtggaccctgcccgcagggagttctatctctcagactctgacttccaagatatctttgggaaatccaaggaggaattctacagcatggccacgtggaggcagcggcaggagaaaaagcagctgggcttcttctgaacccaagccctctcgactgcccctatcccctggaccccaacatacctacaatgctggggaggccctgcttccactcccctcagaggcttttggtcatcctctgcgtgtcagtaaaagcaggcagcccataaaaaaaaag

SEQ ID NO: 376362 - DNA, 2721 bp, Homo sapiens
atcctccccttctccacccgcacctccgtcttccccgcaacacatatacacaaacacccggaccctaggtcccccagagcccgaaggccacgcagggggcgtccagcgacctgcactactgggtcgggaagcaggcgggtgcggaagcgcagggcgctgcggaggccttccagcagcgcctacaggacgagctggggggccagaccgtgctgcaccgcgaggcgcagggccacgagtccgactgcttctgcagctacttccgcccgggaatcatctacaggaagggaggcctagcatctgacctcaagcatgtggagaccaacttgttcaacatccagcgactgctgcacatcaaagggaggaagcacgtgtctgccactgaggtggagctctcctggaacagctttaataagggtgacatcttcctgctggacctaggcaagatgatgattcagtggaatgggcccaagaccagcatttctgagaaggctcgggggctggctttgacctacagcctccgggacagggaacgtggtggtggtcgtgcacagattggtgtggtggatgatgaggccaaagccccggacctcatgcagatcatggaggctgtgctgggccgcagggtgggcagcctgcgtgccgccacgcccagcaaggatatcaaccagctgcagaaggccaatgttcgcctgtaccatgtctatgagaagggcaaagacctggtggtcctggagttggcgacccccccactgacccaggacctgctgcaggaggaggacttctacatcctggaccagggtggcttcaagatctatgtgtggcagggacgcatgtctagcctccaggagagaaaggctgccttcagccgggctgtgggcttcatccaggccaagggctacccgacctacaccaacgtggaggtggtgaacgacggcgccgagtcggccgcgttcaagcagctcttccggacttggtctgagaagcggcgcaggaaccagaagctcggcgggagggataaatcgattcatgtaaagctggacgtgggcaagctgcacacccagcctaagttagcggcccagctcaggatggtggacgacggctctgggaaggtggagggcctacctgggatttgaccagagtccgcctggctccaggtctgcaccccacaggaagaagaaactacactgacagatgtgtggtgcatccaggacttacacaggcagcccgtggaccccaagcgtcatggacagctgtgtgcaggcaactgctaccttgtgctctacacataccagaggctgggccgtgtccagtacatcctgtacctatggcagggccaccaggccactgcggatgagattgaggccctgaacagcaacgctgaggaactagatgtcatgtatggtggcgtcctagtacaggagcatgtgaccatgggcagcgagcccccccacttcctcgccatcttccagggccagctggtgatcttccaggagagagctgggcaccatggaaaggggcagtcagcatccaccacaaggcttttccaagtgcaaggcactgacagccacaacaccaggaccatggaggtgccagcccgtgcctcatccctcaactccagtgacatcttcttgctggtcacagccagcgtctgctacctctggtttgggaagggctgtaatggtgatcagcgtgagatggcacgggtggtggtcactgtcatttccaggaagaatgaggaaacggtgctggagggtcaggagcctccccacttctgggaggccctgggaggccgggccccctaccccagcaacaagaggctccctgaggaggtccccagcttccagccacgactgtttgagtgctccagccacatgggctgcctggtcctcgcagaagtggggttcttcagccaggaggacctggacaagtatgacatcatgttactggacacctggcaggagatcttcctgtggcttggggaagctgcaagtgagtggaaggaggcggtggcctggggccaggagtacctgaagactcacccagcagggaggagcccggccacacccatcgtgctggtcaagcagggccatgagcctcccaccttcattggatggttcttcacttgggacccctacaagtggactagccacccgtcccacaaggaagtggtggatggcagcccggcagcagcatcaaccatctctgagataacagcagaagtcaacaacttgcggctatccagatggccgggcaatggcagggcaggtgccgtggccctgcaggccctcaagggctcccaggacagctcagagaatgatctggtgcgaagccccaagtcggctggcagcagaaccagcagctccgtcagcagcaccagcgccacgatcaacgggggcctgcgccgggaacaactgatgcaccaggctgttgaggacctgccagagggcgtggaccctgcccgcagggagttctatctctcagactctgacttccaagatatctttgggaaatccaaggaggaattctacagcatggccacgtggaggcagcggcaggagaaaaagcagctgggcttcttctgaacccaagccctctcgactgcccctatcccctggaccccaacatacctacaatgctggggaggccctgcttccactcccctcagaggcttttggtcatcctctgcgtgtcagtaaaagcaggcagcccataaaaaaaaag

SEQ ID NO: 376363 - DNA, 3201 bp, Homo sapiens
atcctccccttctccacccgcacctccgtcttccccgcaacacatatacacaaacacccggaccctaggtcccccagagcccgaaggccacgcagggggcgtccagcgacctgcactactgggtcgggaagcaggcgggtgcggaagcgcagggcgctgcggaggccttccagcagcgcctacaggacgagctggggggccagaccgtgctgcaccgcgaggcgcagggccacgagtccgactgcttctgcagctacttccgcccgggaatcatctacaggaagggaggcctagcatctgacctcaagcatgtggagaccaacttgttcaacatccagcgactgctgcacatcaaagggaggaagcacgtgtctgccactgaggtggagctctcctggaacagctttaataagggtgacatcttcctgctggacctaggcaagatgatgattcagtggaatgggcccaagaccagcatttctgagaaggctcgggggctggctttgacctacagcctccgggacagggaacgtggtggtggtcgtgcacagattggtgtggtggatgatgaggccaaagccccggacctcatgcagatcatggaggctgtgctgggccgcagggtgggcagcctgcgtgccgccacgcccagcaaggatatcaaccagctgcagaaggccaatgttcgcctgtaccatgtctatgagaagggcaaagacctggtggtcctggagttggcgacccccccactgacccaggacctgctgcaggaggaggacttctacatcctggaccagggtggcttcaagatctatgtgtggcagggacgcatgtctagcctccaggagagaaaggctgccttcagccgggctgtgggcttcatccaggccaagggctacccgacctacaccaacgtggaggtggtgaacgacggcgccgagtcggccgcgttcaagcagctcttccggacttggtctgagaagcggcgcaggaaccagaagctcggcgggagggataaatcgattcatgtaaagctggacgtgggcaagctgcacacccagcctaagttagcggcccagctcaggatggtggacgacggctctgggaaggtggagggcctacctgggatttgaccagagtccgcctggctccaggtctgcaccccacaggaagaagaaactacactgacagatgtgtggtgcatccaggacttacacaggcagcccgtggaccccaagcgtcatggacagctgtgtgcaggcaactgctaccttgtgctctacacataccagaggctgggccgtgtccagtacatcctgtacctatggcagggccaccaggccactgcggatgagattgaggccctgaacagcaacgctgaggaactagatgtcatgtatggtggcgtcctagtacaggagcatgtgaccatgggcagcgagcccccccacttcctcgccatcttccagggccagctggtgatcttccaggagagagctgggcaccatggaaaggggcagtcagcatccaccacaaggcttttccaagtgcaaggcactgacagccacaacaccaggaccatggaggtgccagcccgtgcctcatccctcaactccagtgacatcttcttgctggtcacagccagcgtctgctacctctggtttgggaagggctgtaatggtgatcagcgtgagatggcacgggtggtggtcactgtcatttccaggaagaatgaggaaacggtgctggagggtcaggagcctccccacttctgggaggccctgggaggccgggccccctaccccagcaacaagaggctccctgaggaggtccccagcttccagccacgactgtttgagtgctccagccacatgggctgcctggtcctcgcagaagtggggttcttcagccaggaggacctggacaagtatgacatcatgttactggacacctggcaggaggtaaggtggctatccctgcctggtggggctgtgaacgggggtgtgtttctgtttgtgtaactgggtgtgtgtgtatctagccatctgcctctgtacacagggctgtgggtgagtctgaccctgtcactgagcaattgcattgcggtgcatatgagaccatggatgagtgtgcatcaccaggtggcagcagtgagactccgggagattaggagtgtgttggaactcaggggtaactgagaccatgtttgcagttgtgtgtggccctgtgtgccttatgatactatgtgtggctccagcgacagtgcctgcggccgagcatgtgtcggtgctgcatgagtgactgtgattggaatgcccaatcgcatcattcatgtgtgtggcttggtgtgagtgtttgccttcgtgcacctgtgtgtgacactttgtcagtgactgtgaggtcacgtgatgctagaactggccagaccagtggcaactggtgaaaatgtgtctgtgagcaagactatgactggctgtgggcgaatgatggatgggtgtgtttgtgggtctgtgtttctgcgcacagtggtataactggccgggtgtgcgtggctgtgtaaacaagtgctgttgtgtttgcatgcagctctgtgtctgacaacagtggatgacagtgtgtggctatggtttgctgtctggctgtgtggcgatggatgactgtgtgtctgtgtaagctgcaataatgtgtgttctctgcatctctgtggggccgtgtctacagcactgtttgaattggtgatgaagctgtgtgctcccatctactcagaacaaacccagagctcttaccacagccctacgtgacctggccagccccaactctttgacccaatttccccctgctcccccctcactgcttctgctgcagccacaatggcctctttgtgttccctgaacatgccggcacacggccacctcggggcttttacaccggttgtttcttctggttaggacacttttcctccagacatacatgtgacttgctctctcatgaaagctctataagggcagggatttttgtccattttctttcattgttgactccccaaagcctagaccaatgcccggcacacagtaggtgctcaataagtatttgtggattgatctccaggtaaatcatgcaagaaaaaaaaaatgtgtggattgaacgtgtgtgtgcatgtatgcatgcattcctgtgaccttctcgtgtgttcacgggtgt

SEQ ID NO: 376364 - DNA, 537 bp, Homo sapiens
ggttatttttaatttttgtcccttaaatttttaccttcttcagaattacattttatggctaatatattggaaagtgatgatatcttccattgaatcttatctgaagactgtattatttttaatggagaaaatatactgtaaatatacttgtaagcttgcttatttatttatttatttttagagacaggatctcaccttgttgcccaggctggagtgcagtgacacgaccgtagctcactgcagcctcaaacttctgggctcaagcgatccttctacctcaccctcccaagtagctaggactacaggtgtgtgctgccatgcccagctatttttttaaagtttgtatagagatgaggtctcactgtgttgcccaggctagtttcaaactcctgggctcaagtgatcctcctacctcagcctcccaaagtgttgggattacaggcatgagccactgtgcctggccaaacttgctatcttaaagttggaggtacaaaatggacgcttaacaaacagtaatgacaatgataataatttgct

SEQ ID NO: 376365 - DNA, 320 bp, Homo sapiens
ctactactactaaattagcggaacgtcgacgaaaggaacaatccatggactggtaggcgcacatcatcgaacggaatcgaatggtatcattgaatggaatcgaatggaatcatcatcagatggaaatgaatggaatcgtcatagaatggaatcgaatggattcattgaatggaatcgaatggaatcatcgaatggaatggaatggaacagtcaatgaactcgaatggaatcatcattgaatggaatcgaatggaatcatcgagtggaatcgaatggaattatgatcaaatggaatcgaatgtaatcatcatcaaatggaa

SEQ ID NO: 376366 - DNA, 274 bp, Homo sapiens
aagtttttaaatttttaagccaaacttccttctcccagcctcacccatctctccagaaccttaaatagttgatcacctcctcccctacctgtagatggagccacacccactcaaacagagcctttctcagccatgtttaaacatggtcggatgctcacggctttcagaactcacccaaccccatatcccttgctaacttttgccttctcccctatcttcggggtcagatgcttgagaaacttttctatattgacttcccacctcctcacctcaa

SEQ ID NO: 376367 - DNA, 504 bp, Homo sapiens
tcaatttaatgataatttcaggcccccaccctgctaaattgtctactaattgctgaaatgccccactgtctcagcccaagtgtttccttgaagtctgaagtcagctatttccacactatgttttatccttggtcatccttggcatgccatggcgccacccttgggcccagccactgaggtctgttccagtccctgggacttcatcttgagaaaagtcttctttgatcatacttccccagaaggactcctctctcacctcaaattctgatcccaacaatgagtttaggcttttgaaagtaaaagacagggccgggtgcggcagctaacgcctgtaatcccagcactttgggaggccaaggtgagtggatcatttgaggtcaggagttcgagaccagcctggccaacatggtgaaaccccgtctctactaaaaatacaaaaattagctgggcgtggtggcggacacctgtaatcccaactacttgggaagctgcagcaggagaatt

SEQ ID NO: 376368 - DNA, 925 bp, Homo sapiens
acttgctatgctgcccaggctggagtgcagtggctgttcacaggtgtgatcatagtgcactgaggcctcaaactcctggcttcaagcagtcctgcctcagcctcccgaaaaggtggaactacaggcacatgccactgtgccttagccaataggtattagaggtagtcaagtaggtatagcataaccaattacaaactttaaaatcaaatgatactgaatgctttttcataaaatccttcttaacatcactttcataactgaagcgtttggaaaaattctggagttcatatttgttcacaagaatgggtgggtgtatttagaatctgccagtctatcagctttactgaggggagatactaaaaatatttaacaagtagtataatatagagaccgagtcaaaatggatactagctggaaacaactggttcaactgttgcctcctgactaaatgtcagcccagggtatagtaaccatgacacagtactatccttggtgaagagttgggaataggattaattgcggaaaaaatatatataaatgccataggacacttttagcacaaaagtagttgtttacctcccattctcctcctttaatctcagtgcttttactatttggtttcttttttggcattttacaaaagggaagaaatggaaaacataccccttcttggtcattgggtaacagcaccatttcggtaacagtcatacttgatgacaagtatgatgatattttaaggacatgaacatgggtgaaatcaatgtgtagatggtacaaattaaccgaattctttttaaagcatttcctgtggatcccaggatcatgaggacataacagaagaataaggtctgaatcttgttcaccagtttgctctcagcctaattgggaagtaaggttaagcacctgaaaattatgtcatacaaaa

SEQ ID NO: 376369 - DNA, 346 bp, Homo sapiens
tgcagattcaaggcagactgtgaggtatttgatagtcctactcgtgtgttctcatgtgcatcccatctttccaaaagtgcacacttgaaacagatgattttgagaagagctgcttctaccaacttgatcttggccacttgttgtattgttgtgcgttcttagtttttctacttttaccatttctggccagagctgtcacttttaaaaattactccgttgatgttgcctagcaagagccactcagctctttgtggggaattaaagtagattataggttgaggccagttgcacttactgtgctgcaaattggggactgatgatctagtcatcctcttcctttcttaca

SEQ ID NO: 376370 - DNA, 447 bp, Homo sapiens
ggccgcctttcatctcaacctctgaggacagaagggggctctcaaatccgcccatgcattgagatcttcgctcttcacagaggtgggattagtagcttagtctcagtttcaagtggatgaggttgtgtaatttcaagggaaaattacatccggcaatacctcttttgctaatggaactcaggaaggaaaggccctcagaaaggctggagtctggaatctaggcaggtagctggcctgacagtaaccttgatccaggtaaaccaaagtggaattctcgagcctggaattgatgactcataattgttttcatttaacagctcaggatgtgtgaaaaaaaaatgctgtttaatttgtaagacctaagtttacgactgattttggagaatacatttgtgataatgtatctatgttttcctggggtggcggaggaaatgatttctacctaaa

SEQ ID NO: 376371 - DNA, 560 bp, Homo sapiens
tgaacagatcaacaagtatttggtacttgttagaaacctttcagagctcactaaagcaacatttcttttgcagtctggtgcctttggccttgcagtcagtcacttaaccctttcaagtgtgaagagcgttcatcatttggaacctccattgcccatagcgatggctggatttctaaagggtttactcaggggaataacttattcggaaaatatattcccattgtcacattttaaaacttgacagccatcataacaaaaactggtactgacagtaggcagacattctgaatgtattcattcttaatttggatctattggctgtgatttgaatgatctttggtagtaagttaaaaggatttttttttccttagctaagcgagaaacgatagaggcctatagctagaggactgatagtgcatggtgcttttggacaataaacatgtactttattttaggatgtaatttagtgagcagttagaaagcagtattctagtctttgcattagggcaccactgatgaagctggctaagcaaagagaaataatattatggcaaaaagga

SEQ ID NO: 376372 - DNA, 3393 bp, Homo sapiens
gaaggctacagagagagccaggttttggtgccatgcacacagggaaacttagagttcagagagggggtgtgatttgcctgaggtcacacagcaagttagagacccagctccacgactcattgtcttgctgcccagagctgctggctcccctgtttactctgagctgatcgatcaccttagcacacagctggctaggagagaaccatgcagtcacttcggccacacctgcccgttgacccttgctacctcggcaggctttgatcccttctgacctggaggccagaggctaggctgaggtcactcagcagacatcaaggacctgggcagatgggccggctgggatggtggcgagctgtacagataaaaagggacatgaaaatgaaaagcccgagcctgagttttcatcacggttccactcctgagtggtcttgggtgaatcacttcatctgccaaggcctggatttcctcatctgcaaactcagaaaactaaggctttggccctcgtcatcctgcccacccagcggggcttcccaacccaccacacagccatggacgggaaggtggcagtgcaagagtgtgggcctcctgcagtctcctgggtccccgaggagggagagaagttggaccaggaagacgaggaccaggtgaaggatcggggccaatggaccaacaagatggagtttgtgctgtcagtggccggggagatcattgggctgggcaatgtctggaggtttccctatctctgctacaaaaacggaggtggagccttcttcatcccctacttcatcttcttctttgtctgcggcatcccggtgttcttcctggaggtggcgttgggccaatacaccagccaagggagtgtcacagcctggaggaagatctgccccctcttccagggcattggtctggcatctgtggtcatcgagtcatatttgaatgtctactacatcatcatccttgcctgggctctcttctacctgttcagctccttcacctctgagctgccctggacgacctgcaacaacttttggaacacagagcattgcacggactttctgaaccactcaggagccggcacagtgaccccatttgagaattttacctcacctgtcatggaattctgggagagacgagttctgggcatcacctcgggcatccatgacctgggctccctgcgctgggagctggccctgtgcctcctgctcgcctgggtcatctgctatttctgcatctggaagggggtcaagtccacaggcaaggtggtttatttcacagccacgtttccgtacctgatgcttgtcattttgctgatcagaggtgtcacccttcccggagcctaccagggcatcatctactacttgaagccagatttgttccgcctcaaggaccctcaggtgtggatggatgcgggcacccagatcttcttctcctttgccatctgccaggggtgcctgacagccctgggcagctacaacaagtatcacaacaactgctacaaggactgcatcgccctctgcttcctgaacagtgccaccagctttgtggctgggtttgttgtcttctccatcctgggcttcatgtcccaagagcaaggggtgcccatttctgaagtggccgagtcaggtcctgggctggccttcatcgccttccccaaggctgtgactatgatgcccttatcccagctgtggtcctgcctgttctttatcatgctcatattcctagggctggacagccagtttgtctgtgtggagtgcctggtgacagcctccatagacatgttccccaggcagctccggaagagcgggcggcgcgagctcctcatcctcaccatcgccgtcatgtgctacctgatagggcttttcctggtcaccgagggcgggatgtacatcttccagctgtttgactactatgcttccagtggcatatgcctgctgttcctgtcattgtttgaagtggtctgcataagctgggtgtatggggcggaccgtttctatgacaacattgaggacatgattggctaccggccatggcccctggtgaagatctcctggctcttcctgacccctggactttgcctggccactttcctcttctccttgagcaagtacacccccctcaagtacaacaacgtctatgtgtacccgccctggggatactccattggctggttcctggctctgtcctccatggtctgtgtcccactcttcgtcgtcatcaccctcctgaagactcggggtcctttcaggaagcgtctgcgtcagctcatcacccctgactccagtctgccacagcccaagcaacatccctgcttggatggcagtgctggccggaactttgggccctccccaacaagggaaggactgatagccggggagaaggagacccatttgtagggtgtggccagaggccaggcggctcctaagccgggaacctaggtcagggccaccctccattctcagcggacagcctctgcctctgtctcctgccacaatcctgctgggaacctctggagagccacaggcacccccagctggaggccagactcctctcttgtgctagctggagcagctccttcccctttgctgataacaccaccactgggacgtgccatgttgggacgccactccctgtgggaaggcaccatcgtttttataaaggggggtctttttggaggccgccatctgattgcaacacctcgagttatgaggattccactgtggggatgcctcttgttagagcgtactgcatttgtacacggggagaggagctataattggaacgcacactgccgtccaatgtggagagcctgatgggacaataccctgttggaagtgacaactgaacacactgtgttggatcggaggttccgttaggggatccttccttaggcttaacgacagaggcaagccttcgcatgccgttcagtctggagtttcctccgagtctctcatggcatctccagctcctgccctagttccgcactgttcttgcagtgtttcatcaactcctggagcattggaatggaaggggcttgggagatgattcctagacttcacaaacactcggcatgcctccctgcactgtccgttcctctgcccaaggccgatattgctaactgatcacagattctttcccacctcacaatccttccgaatgtgctccaggcagcaccatttgccatcctgcttctaacgcaaacccctgacttcatggatgaggaacctggagaccaaagagacaaagggactttttcaagttcacatggggacccccttcttgggggccagagatatgactaaaaccttatctccttgtgctcaggccagtgtcttcccattaaccccctgccttagttaacaagtgtgtatggattgccttccatgcgtgctggtc

SEQ ID NO: 376373 - DNA, 3156 bp, Homo sapiens
acatgggattctgcgctgggaggaacagggtaaggcgtgaacgtggagggcagtttccctttcaggtcccggctctcttggctttcccataagcagctgccttgggactctcctggagacctgatgcccacagccaagctgaccacaggagccggtgctggggactgagggaaacttagagttcagagagggggtgtgatttgcctgaggtcacacagcaagttagagacccagctccacgactcattgtcttggctttggccctcgtcatcctgcccacccagcggggcttcccaacccaccacacagccatggacgggaaggtggcagtgcaagagtgtgggcctcctgcagtctcctgggtccccgaggagggagagaagttggaccaggaagacgaggaccaggtgaaggatcggggccaatggaccaacaagatggagtttgtgctgtcagtggccggggagatcattgggctgggcaatgtctggaggtttccctatctctgctacaaaaacggaggtggagccttcttcatcccctacttcatcttcttctttgtctgcggcatcccggtgttcttcctggaggtggcgttgggccaatacaccagccaagggagtgtcacagcctggaggaagatctgccccctcttccagggcattggtctggcatctgtggtcatcgagtcatatttgaatgtctactacatcatcatccttgcctgggctctcttctacctgttcagctccttcacctctgagctgccctggacgacctgcaacaacttttggaacacagagcattgcacggactttctgaaccactcaggagccggcacagtgaccccatttgagaattttacctcacctgtcatggaattctgggagagacgagttctgggcatcacctcgggcatccatgacctgggctccctgcgctgggagctggccctgtgcctcctgctcgcctgggtcatctgctatttctgcatctggaagggggtcaagtccacaggcaaggtggtttatttcacagccacgtttccgtacctgatgcttgtcattttgctgatcagaggtgtcacccttcccggagcctaccagggcatcatctactacttgaagccagatttgttccgcctcaaggaccctcaggtgtggatggatgcgggcacccagatcttcttctcctttgccatctgccaggggtgcctgacagccctgggcagctacaacaagtatcacaacaactgctacaaggactgcatcgccctctgcttcctgaacagtgccaccagctttgtggctgggtttgttgtcttctccatcctgggcttcatgtcccaagagcaaggggtgcccatttctgaagtggccgagtcaggtcctgggctggccttcatcgccttccccaaggctgtgactatgatgcccttatcccagctgtggtcctgcctgttctttatcatgctcatattcctagggctggacagccagtttgtctgtgtggagtgcctggtgacagcctccatagacatgttccccaggcagctccggaagagcgggcggcgcgagctcctcatcctcaccatcgccgtcatgtgctacctgatagggcttttcctggtcaccgagggcgggatgtacatcttccagctgtttgactactatgcttccagtggcatatgcctgctgttcctgtcattgtttgaagtggtctgcataagctgggtgtatggggcggaccgtttctatgacaacattgaggacatgattggctaccggccatggcccctggtgaagatctcctggctcttcctgacccctggactttgcctggccactttcctcttctccttgagcaagtacacccccctcaagtacaacaacgtctatgtgtacccgccctggggatactccattggctggttcctggctctgtcctccatggtctgtgtcccactcttcgtcgtcatcaccctcctgaagactcggggtcctttcaggaagcgtctgcgtcagctcatcacccctgactccagtctgccacagcccaagcaacatccctgcttggatggcagtgctggccggaactttgggccctccccaacaagggaaggactgatagccggggagaaggagacccatttgtagggtgtggccagaggccaggcggctcctaagccgggaacctaggtcagggccaccctccattctcagcggacagcctctgcctctgtctcctgccacaatcctgctgggaacctctggagagccacaggcacccccagctggaggccagactcctctcttgtgctagctggagcagctccttcccctttgctgataacaccaccactgggacgtgccatgttgggacgccactccctgtgggaaggcaccatcgtttttataaaggggggtctttttggaggccgccatctgattgcaacacctcgagttatgaggattccactgtggggatgcctcttgttagagcgtactgcatttgtacacggggagaggagctataattggaacgcacactgccgtccaatgtggagagcctgatgggacaataccctgttggaagtgacaactgaacacactgtgttggatcggaggttccgttaggggatccttccttaggcttaacgacagaggcaagccttcgcatgccgttcagtctggagtttcctccgagtctctcatggcatctccagctcctgccctagttccgcactgttcttgcagtgtttcatcaactcctggagcattggaatggaaggggcttgggagatgattcctagacttcacaaacactcggcatgcctccctgcactgtccgttcctctgcccaaggccgatattgctaactgatcacagattctttcccacctcacaatccttccgaatgtgctccaggcagcaccatttgccatcctgcttctaacgcaaacccctgacttcatggatgaggaacctggagaccaaagagacaaagggactttttcaagttcacatggggacccccttcttgggggccagagatatgactaaaaccttatctccttgtgctcaggccagtgtcttcccattaaccccctgccttagttaacaagtgtgtatggattgccttccatgcgtgctggtc

SEQ ID NO: 376374 - DNA, 798 bp, Homo sapiens
gaggggttaagtgagcagccttaggtggcgcaggtcggcagcagagccaggactggaacccaggcagcgcacactcattcgtagtcacggtattgctgcctcccttctcacctcaaacggttcattcattgactcactcatactgtgcggtgctggccatgtgctccgctctgggctgggccctggggttgcacacatgaggaaccttctgcgcctccctcaccatcagctccaaatccctgcctcttctctccacagcgtctgcgtcagctcatcacccctgactccagtctgccacagcccaagcaacatccctgcttggatggcagtgctggccggaactttgggccctccccaacaagggaaggactgatagccggggagaaggagacccatttgtagggtgtggccagaggccaggcggctcctaagccgggaacctaggtcagggccaccctccattctcagcggacagcctctgcctctgtctcctgccacaatcctgctgggaacctctggagagccacaggcacccccagctggaggccagactcctctcttgtgctagctggagcagctccttcccctttgctgataacaccaccactgggacgtgccatgttgggacgccactccctgtgggaaggcaccatcgtttttataaaggggggtctttttggaggccgccatctgattgcaacacctcgagttatgaggattccactgtggggatgcctcttgttagagcgtactgcatttgtacacggggagaggagctataattggaacgcacactgc

SEQ ID NO: 376375 - DNA, 3125 bp, Homo sapiens
ggcagtgggtgaaagcaggggtggtcatctgacgaggggaggggaagcaggtggtgcccagcaaggtggaaggagaagtggacaggagaaacctcggggcattcccgagggcccaggaactgcaataaatgatcacagggaaacttagagttcagagagggggtgtgatttgcctgaggtcacacagcaagttagagacccagctccacgactcattgtcttggctttggccctcgtcatcctgcccacccagcggggcttcccaacccaccacacagccatggacgggaaggtggcagtgcaagagtgtgggcctcctgcagtctcctgggtccccgaggagggagagaagttggaccaggaagacgaggaccaggtgaaggatcggggccaatggaccaacaagatggagtttgtgctgtcagtggccggggagatcattgggctgggcaatgtctggaggtttccctatctctgctacaaaaacggaggtggagccttcttcatcccctacttcatcttcttctttgtctgcggcatcccggtgttcttcctggaggtggcgttgggccaatacaccagccaagggagtgtcacagcctggaggaagatctgccccctcttccagggcattggtctggcatctgtggtcatcgagtcatatttgaatgtctactacatcatcatccttgcctgggctctcttctacctgttcagctccttcacctctgagctgccctggacgacctgcaacaacttttggaacacagagcattgcacggactttctgaaccactcaggagccggcacagtgaccccatttgagaattttacctcacctgtcatggaattctgggagagacgagttctgggcatcacctcgggcatccatgacctgggctccctgcgctgggagctggccctgtgcctcctgctcgcctgggtcatctgctatttctgcatctggaagggggtcaagtccacaggcaaggtggtttatttcacagccacgtttccgtacctgatgcttgtcattttgctgatcagaggtgtcacccttcccggagcctaccagggcatcatctactacttgaagccagatttgttccgcctcaaggaccctcaggtgtggatggatgcgggcacccagatcttcttctcctttgccatctgccaggggtgcctgacagccctgggcagctacaacaagtatcacaacaactgctacaaggactgcatcgccctctgcttcctgaacagtgccaccagctttgtggctgggtttgttgtcttctccatcctgggcttcatgtcccaagagcaaggggtgcccatttctgaagtggccgagtcaggtcctgggctggccttcatcgccttccccaaggctgtgactatgatgcccttatcccagctgtggtcctgcctgttctttatcatgctcatattcctagggctggacagccagtttgtctgtgtggagtgcctggtgacagcctccatagacatgttccccaggcagctccggaagagcgggcggcgcgagctcctcatcctcaccatcgccgtcatgtgctacctgatagggcttttcctggtcaccgagggcgggatgtacatcttccagctgtttgactactatgcttccagtggcatatgcctgctgttcctgtcattgtttgaagtggtctgcataagctgggtgtatggggcggaccgtttctatgacaacattgaggacatgattggctaccggccatggcccctggtgaagatctcctggctcttcctgacccctggactttgcctggccactttcctcttctccttgagcaagtacacccccctcaagtacaacaacgtctatgtgtacccgccctggggatactccattggctggttcctggctctgtcctccatggtctgtgtcccactcttcgtcgtcatcaccctcctgaagactcggggtcctttcaggaagcgtctgcgtcagctcatcacccctgactccagtctgccacagcccaagcaacatccctgcttggatggcagtgctggccggaactttgggccctccccaacaagggaaggactgatagccggggagaaggagacccatttgtagggtgtggccagaggccaggcggctcctaagccgggaacctaggtcagggccaccctccattctcagcggacagcctctgcctctgtctcctgccacaatcctgctgggaacctctggagagccacaggcacccccagctggaggccagactcctctcttgtgctagctggagcagctccttcccctttgctgataacaccaccactgggacgtgccatgttgggacgccactccctgtgggaaggcaccatcgtttttataaaggggggtctttttggaggccgccatctgattgcaacacctcgagttatgaggattccactgtggggatgcctcttgttagagcgtactgcatttgtacacggggagaggagctataattggaacgcacactgccgtccaatgtggagagcctgatgggacaataccctgttggaagtgacaactgaacacactgtgttggatcggaggttccgttaggggatccttccttaggcttaacgacagaggcaagccttcgcatgccgttcagtctggagtttcctccgagtctctcatggcatctccagctcctgccctagttccgcactgttcttgcagtgtttcatcaactcctggagcattggaatggaaggggcttgggagatgattcctagacttcacaaacactcggcatgcctccctgcactgtccgttcctctgcccaaggccgatattgctaactgatcacagattctttcccacctcacaatccttccgaatgtgctccaggcagcaccatttgccatcctgcttctaacgcaaacccctgacttcatggatgaggaacctggagaccaaagagacaaagggactttttcaagttcacatggggacccccttcttgggggccagagatatgactaaaaccttatctccttgtgctcaggccagtgtcttcccattaaccccctgccttagttaacaagtgtgtatggattgccttccatgcgtgctggtc

SEQ ID NO: 376376 - DNA, 2653 bp, Homo sapiens
acccccgcggcggacgcccgggccgccccaacgccgctgcgcggtggagaccgcggtggaacccgtccttgccagggtgggctcgccgggccccaaaggagaggttttgttcatagtcagcattgatttttcagccaggctgttctgaaaggtccacagtccttcgttaagtagtgagcacttcgggaggctgaggcaggaggatcgcctgagcccgggagttcgagaccagcctgggcagcatagcattggtctggcatctgtggtcatcgagtcatatttgaatgtctactacatcatcatccttgcctgggctctcttctacctgttcagctccttcacctctgagctgccctggacgacctgcaacaacttttggaacacaggagacgagttctgggcatcacctcgggcatccatgacctgggctccctgcgctgggagctggccctgtgcctcctgctcgcctgggtcatctgctatttctgcatctggaagggggtcaagtccacaggcaaggtggtttatttcacagccacgtttccgtacctgatgcttgtcattttgctgatcagaggtgtcacccttcccggagcctaccagggcatcatctactacttgaagccagatttgttccgcctcaaggaccctcaggtgtggatggatgcgggcacccagatcttcttctcctttgccatctgccaggggtgcctgacagccctgggcagctacaacaagtatcacaacaactgctacaaggactgcatcgccctctgcttcctgaacagtgccaccagctttgtggctgggtttgttgtcttctccatcctgggcttcatgtcccaagagcaaggggtgcccatttctgaagtggccgagtcaggtcctgggctggccttcatcgccttccccaaggctgtgactatgatgcccttatcccagctgtggtcctgcctgttctttatcatgctcatattcctagggctggacagccagtttgtctgtgtggagtgcctggtgacagcctccatagacatgttccccaggcagctccggaagagcgggcggcgcgagctcctcatcctcaccatcgccgtcatgtgctacctgatagggcttttcctggtcaccgagggcgggatgtacatcttccagctgtttgactactatgcttccagtggcatatgcctgctgttcctgtcattgtttgaagtggtctgcataagctgggtgtatggggcggaccgtttctatgacaacattgaggacatgattggctaccggccatggcccctggtgaagatctcctggctcttcctgacccctggactttgcctggccactttcctcttctccttgagcaagtacacccccctcaagtacaacaacgtctatgtgtacccgccctggggatactccattggctggttcctggctctgtcctccatggtctgtgtcccactcttcgtcgtcatcaccctcctgaagactcggggtcctttcaggaagcgtctgcgtcagctcatcacccctgactccagtctgccacagcccaagcaacatccctgcttggatggcagtgctggccggaactttgggccctccccaacaagggaaggactgatagccggggagaaggagacccatttgtagggtgtggccagaggccaggcggctcctaagccgggaacctaggtcagggccaccctccattctcagcggacagcctctgcctctgtctcctgccacaatcctgctgggaacctctggagagccacaggcacccccagctggaggccagactcctctcttgtgctagctggagcagctccttcccctttgctgataacaccaccactgggacgtgccatgttgggacgccactccctgtgggaaggcaccatcgtttttataaaggggggtctttttggaggccgccatctgattgcaacacctcgagttatgaggattccactgtggggatgcctcttgttagagcgtactgcatttgtacacggggagaggagctataattggaacgcacactgccgtccaatgtggagagcctgatgggacaataccctgttggaagtgacaactgaacacactgtgttggatcggaggttccgttaggggatccttccttaggcttaacgacagaggcaagccttcgcatgccgttcagtctggagtttcctccgagtctctcatggcatctccagctcctgccctagttccgcactgttcttgcagtgtttcatcaactcctggagcattggaatggaaggggcttgggagatgattcctagacttcacaaacactcggcatgcctccctgcactgtccgttcctctgcccaaggccgatattgctaactgatcacagattctttcccacctcacaatccttccgaatgtgctccaggcagcaccatttgccatcctgcttctaacgcaaacccctgacttcatggatgaggaacctggagaccaaagagacaaagggactttttcaagttcacatggggacccccttcttgggggccagagatatgactaaaaccttatctccttgtgctcaggccagtgtcttcccattaaccccctgccttagttaacaagtgtgtatggattgccttccatgcgtgctggtc

SEQ ID NO: 376377 - DNA, 481 bp, Homo sapiens
aaacctgttttcagatgatgattttgagtgagatacaagtgtagctacttggaaaagattcagtagcatccctgagctatagtgatagaaaccccgtccttgtcccttctgtggagcagcctgttggagcttctctgggttggcctaggcccagagatgaggtcagcagctcaagggtctagtgtttttagctgtcttcccagccctgctccagagcccccatgtaacctgctgccctgcagtgcccagcacagagcagtgtctgttgaatgcgtgagtcaagcaaaacatcaaacagaatccttgacatgggaaaaacatgctcccagccaccaccagctgaacattgacatccagctgctttcccactgggcagtggcttgtgaagatggggacagagtatcataaatcatctcctttgtggacagcagggatgatcctgaccttcttgtcacagactaaacagactaagtagccagaa

SEQ ID NO: 376378 - DNA, 281 bp, Homo sapiens
gccatcccagcctctgtgcaaccctggggaacacggcctgtgagccaaagcagacttggcgtcctgctaagtaggaacatctctgtgggctccctcctccctctctctctctgtctcttttgaacagtttgagtaggattggtatttgttcttttaatgtttggtaaaattcaacagtaaagctatcaggtccctggcttttctttgaggggagattttttataatggcttcgatatcattatttgttattgattggtttgggttttgtatttcttcatgt

SEQ ID NO: 376379 - DNA, 459 bp, Homo sapiens
tgagtggccgttccgacctccggtcaggagggggaggaacagagcacggccggcggctgcacgggcagggcctctctgggctgagaggaagaaaccagtgagacatcgagaggaagtcgctgtggcactcagtcctacggcctccgaggctgggtagtgagtgtgtcgctggccttagccagactccacaggccacgctggctgcgaatggagccgaggactcgcgcggaggcgagatgctaccagccggcgagatcggcgcctctcctgcagccccgagctgctctgtagggaccaaaggacaaggcagagaaagtgcagataagggtgagctgactccatatgggcctgcgttcatcgataacgaactgtgtgaccctagatcgatgcgagactttagaaccccatagagcagacgacaggattatgatgcagtaccagccatgtactcacgagtcg

SEQ ID NO: 376380 - DNA, 2982 bp, Homo sapiens
tgagtggccgttccgacctccggtcaggagggggaggaacagagcacggccggcggctgcacgggcagggcctctctgggctgagaggaagaaaccagtgagacatcgagaggaagtcgctgtggcactcagtcctacggcctccgaggctgggtagtgagtgtgtcgctggccttagccagactccacaggccacgctggctgcgaatggagccgaggactcgcgcggaggcgagatgctaccagccggcgagatcggcgcctctcctgcagccccgtgctgctctgaaagtggtgacgaaaggaagaacctcgaggagaaaagtgacataaatgttacagttcttattggaagtaaacaagtcagtgaaggtacagataatggtgatctcccttcttatgtgtctgcattcatagaaaaggaagttggaaatgaccttaaatctttaaagaaacttgataaactcatagaacagaggacagtaagtaaaatgcagttagaagaacaggtacttacaatttcatcagaaattcctaaaagaattcgaagtgccttaaaaaatgcagaagaatcaaagcaatttcttaatcagtttctggagcaggaaactcatctcttcagcgccattaacagccatttgctgactgcgcaaccttggatggacgatcttggaaccatgattagccagattgaagagatcgaacgtcatcttgcttaccttaaatggatttcacaaattgaagaactaagtgataacattcagcaatatctgatgaccaataatgtaccggaggcagcctccactctagtgtctatggcagaacttgacattaaacttcaggaatcatcttgtactcatcttcttggtttcatgagagccacagttaaattctggcataaaattctcaaggacaagcttacaagtgattttgaggaaattttagcacagcttcattggccattcatcgcaccccctcaatcacaaactgttggcttaagtcgacctgccagtgccccggagatatacagttacctggagacactgttttgtcagcttttgaaactacaaacctcagatgaattacttactgagccaaagcaactcccagaaaaatactctcttcctgcctccccttctgtcatcctgcccatccaggttatgctgactcctcttcagaagaggttcaggtatcacttcagagggaaccggcagactaatgtgttaagcaagccagaatggtacttggctcaagtacttatgtggattggaaaccatactgaatttctggatgagaagattcagccaatattagacaaagtaggctctttggtaaacgcaaggcttgaattttctcggggccttatgatgctggttcttgagaagttagccactgatattccttgtctgctatatgatgacaatctcttctgtcatttggtggatgaagtactcttgtttgaaagggagctacacagtgttcatggctatcctggcacttttgctagttgtatgcatattctatcagaggaaacctgttttcagagatggttgacggtggagagaaaatttgctcttcaaaaaatggactcaatgctttcctcagaagctgcctgggtatcgcaatataaggatatcactgacgtggatgaaatgaaagttccagattgtgcagaaacttttatgactctactcttggttataactgacaggtataaaaatcttcccacagcttcccgaaagcttcagttcctggagttacagaaggacttagtagatgattttaggatacgattaacacaagtgatgaaagaagagactagagcttcccttggctttcgatactgtgcaattcttaatgctgtgaactacatctcaacagtactagcagattgggctgacaatgttttctttctacaacttcaacaggctgcactggaggtgtttgcagagaataatactctgagtaaattgcagctaggacagctagcctctatggagagctctgtctttgatgacatgattaacctcttagaacgtttaaagcatgatatgttgacccgtcaagtagaccacgtttttagagaagttaaagatgctgcaaaattgtataaaaaagaaagatggttgtccttgccatctcagtcagagcaggcagtgatgtccctgtccagttcggcttgcccgttgctgctgacgttacgagaccatttacttcagttggagcagcagctttgtttctccttatttaaaattttctggcaaatgcttgtagagaagctggatgtatacatctaccaagaaataattcttgctaatcacttcaatgaaggaggagcagcccagctgcagtttgatatgactcggaatcttttccctttgttttctcactattgcaagagaccagaaaattattttaaacatataaaagaagcctgtattgttttgaatttgaacgtcggttctgcactactgctgaaagatgtactgcagtcagcttcagggcagcttcctgccacagcagcattaaatgaagttggaatttacaaactggctcaacaagatgttgagattctacttaatttgaggacaaattggcctaatactggaaaataatgtctttcagaaaaaggtttctttggtttttgtttctaagaaagaggaagccaattggatttcaagttatatgatgaaattctgaattaatgaaactggaaaactttatagaattacttattatcttggatttatggtgttattaaaatgctgaccatatttccttcatcctcttgttcctaaggaaacaaaaacagaaaacgaaacaatgaaaactcaattctatttacaagtataaatgctgagtatgtctgttgaagacgagcagagatattaaattataaccaactttcaatttcctgtgctaattaagggaaattctgttgtggataatcaaacatagccaataaatttttttaaaactccc

SEQ ID NO: 376381 - DNA, 2898 bp, Homo sapiens
tgagtggccgttccgacctccggtcaggagggggaggaacagagcacggccggcggctgcacgggcagggcctctctgggctgagaggaagaaaccagtgagacatcgagaggaagtcgctgtggcactcagtcctacggcctccgaggctgggtagtgagtgtgtcgctggccttagccagactccacaggccacgctggctgcgaatggagccgaggactcgcgcggaggcgagatgctaccagccggcgagatcggcgcctctcctgcagccccgtgctgctctgaaagtggtgacgaaaggaagaacctcgaggagaaaagtgacataaatgttacagttcttattggaagtaaacaagtcagtgaaggtacagataatggtgatctcccttcttatgtgtctgcattcatagaaaaggaagttggaaatgaccttaaatctttaaagaaacttgataaactcatagaacagaggacagtaagtaaaatgcagttagaagaacagtttctggagcaggaaactcatctcttcagcgccattaacagccatttgctgactgcgcaaccttggatggacgatcttggaaccatgattagccagattgaagagatcgaacgtcatcttgcttaccttaaatggatttcacaaattgaagaactaagtgataacattcagcaatatctgatgaccaataatgtaccggaggcagcctccactctagtgtctatggcagaacttgacattaaacttcaggaatcatcttgtactcatcttcttggtttcatgagagccacagttaaattctggcataaaattctcaaggacaagcttacaagtgattttgaggaaattttagcacagcttcattggccattcatcgcaccccctcaatcacaaactgttggcttaagtcgacctgccagtgccccggagatatacagttacctggagacactgttttgtcagcttttgaaactacaaacctcagatgaattacttactgagccaaagcaactcccagaaaaatactctcttcctgcctccccttctgtcatcctgcccatccaggttatgctgactcctcttcagaagaggttcaggtatcacttcagagggaaccggcagactaatgtgttaagcaagccagaatggtacttggctcaagtacttatgtggattggaaaccatactgaatttctggatgagaagattcagccaatattagacaaagtaggctctttggtaaacgcaaggcttgaattttctcggggccttatgatgctggttcttgagaagttagccactgatattccttgtctgctatatgatgacaatctcttctgtcatttggtggatgaagtactcttgtttgaaagggagctacacagtgttcatggctatcctggcacttttgctagttgtatgcatattctatcagaggaaacctgttttcagagatggttgacggtggagagaaaatttgctcttcaaaaaatggactcaatgctttcctcagaagctgcctgggtatcgcaatataaggatatcactgacgtggatgaaatgaaagttccagattgtgcagaaacttttatgactctactcttggttataactgacaggtataaaaatcttcccacagcttcccgaaagcttcagttcctggagttacagaaggacttagtagatgattttaggatacgattaacacaagtgatgaaagaagagactagagcttcccttggctttcgatactgtgcaattcttaatgctgtgaactacatctcaacagtactagcagattgggctgacaatgttttctttctacaacttcaacaggctgcactggaggtgtttgcagagaataatactctgagtaaattgcagctaggacagctagcctctatggagagctctgtctttgatgacatgattaacctcttagaacgtttaaagcatgatatgttgacccgtcaagtagaccacgtttttagagaagttaaagatgctgcaaaattgtataaaaaagaaagatggttgtccttgccatctcagtcagagcaggcagtgatgtccctgtccagttcggcttgcccgttgctgctgacgttacgagaccatttacttcagttggagcagcagctttgtttctccttatttaaaattttctggcaaatgcttgtagagaagctggatgtatacatctaccaagaaataattcttgctaatcacttcaatgaaggaggagcagcccagctgcagtttgatatgactcggaatcttttccctttgttttctcactattgcaagagaccagaaaattattttaaacatataaaagaagcctgtattgttttgaatttgaacgtcggttctgcactactgctgaaagatgtactgcagtcagcttcagggcagcttcctgccacagcagcattaaatgaagttggaatttacaaactggctcaacaagatgttgagattctacttaatttgaggacaaattggcctaatactggaaaataatgtctttcagaaaaaggtttctttggtttttgtttctaagaaagaggaagccaattggatttcaagttatatgatgaaattctgaattaatgaaactggaaaactttatagaattacttattatcttggatttatggtgttattaaaatgctgaccatatttccttcatcctcttgttcctaaggaaacaaaaacagaaaacgaaacaatgaaaactcaattctatttacaagtataaatgctgagtatgtctgttgaagacgagcagagatattaaattataaccaactttcaatttcctgtgctaattaagggaaattctgttgtggataatcaaacatagccaataaatttttttaaaactccc

SEQ ID NO: 376382 - DNA, 429 bp, Homo sapiens
attccttgtctgctatatgatgacaatctcttctgtcatttggtggatgaagtactcttgtttgaaagggagctacacagtgttcatggctatcctggcacttttgctagttgtatgcatattctatcagaggaaacctgttttcagagatggttgacggtggagagaaaatgtaagtgctgatgtggccagatggtagggagatatgtctgtttctgtgggtatacatttttgatatttttcttctccagttctaaataggaactagagccatttgaaatttccttttcagggttttctgtttccttcagagataatcttttctttacttcacatgaaacttccatttttcctgaaattacactctacatatttctagagtggaatagtcaagccagtggggtgtttgttttatagattttatcatat

SEQ ID NO: 376383 - DNA, 2981 bp, Homo sapiens
tgagtggccgttccgacctccggtcaggagggggaggaacagagcacggccggcggctgcacgggcagggcctctctgggctgagaggaagaaaccagtgagacatcgagaggaagtcgctgtggcactcagtcctacggcctccgaggctgggtagtgagtgtgtcgctggccttagccagactccacaggccacgctggctgcgaatggagccgaggactcgcgcggaggcgagatgctaccagccggcgagatcggcgcctctcctgcagccccgtgctgctctgaaagtggtgacgaaaggaagaacctcgaggagaaaagtgacataaatgttacagttcttattggaagtaaacaagtcagtgaaggtacagataatggtgatctcccttcttatgtgtctgcattcatagaaaaggaagttggaaatgaccttaaatctttaaagaaacttgataaactcatagaacagaggacagtaagtaaaatgcagttagaagaacaggtacttacaatttcatcagaaattcctaaaagaattcgaagtgccttaaaaaatgcagaagaatcaaagcaatttcttaatcagtttctggagcaggaaactcatctcttcagcgccattaacagccatttgctgactgcgcaaccttggatggacgatcttggaaccatgattagccagattgaagagatcgaacgtcatcttgcttaccttaaatggatttcacaaattgaagaactaagtgataacattcagcaatatctgatgaccaataatgtaccggaggcagcctccactctagtgtctatggcagaacttgacattaaacttcaggaatcatcttgtactcatcttcttggtttcatgagagccacagttaaattctggcataaaattctcaaggacaagcttacaagtgattttgaggaaattttagcacagcttcattggccattcatcgcaccccctcaatcacaaactgttggcttaagtcgacctgccagtgccccggagatatacagttacctggagacactgttttgtcagcttttgaaactacaaacctcagatgaattacttactgagccaaagcaactcccagaaaaatactctcttcctgcctccccttctgtcatcctgcccatccaggttatgctgactcctcttcagaagaggttcaggtatcacttcagagggaaccggcagactaatgtgttaagcaagccagaatggtacttggctcaagtacttatgtggattggaaaccatactgaatttctggatgagaagattcagccaatattagacaaagtaggctctttggtaaacgcaaggcttgaattttctcggggccttatgatgctggttcttgagaagttagccactgatattccttgtctgctatatgatgacaatctcttctgtcatttggtggatgaagtactcttgtttgaaagggagctacacagtgttcatggctatcctggcacttttgctagttgtatgcatattctatcagaggaaacctgttttcagagatggttgacggtggagagaaaatttgctcttcaaaaaatggactcaatgctttcctcagaagctgcctgggtatcgcaatataaggatatcactgacgtggatgaaatgaaagttccagattgtgcagaaacttttatgactctactcttggttataactgacaggtataaaaatcttcccacagcttcccgaaagcttcagttcctggagttacagaaggacttagtagatgattttaggatacgattaacacaagtgatgaaagaagagactagagcttcccttggctttcgatactgtgcaattcttaatgctgtgaactacatctcaacagtactagcagattgggctgacaatgttttctttctacaacttcaacaggctgcactggaggtgtttgcagagaataatactctgagtaaattgcagctaggacagctagcctctatggagagctctgtctttgatgacatgattaacctcttagaacgtttaaagcatgatatgttgacccgtcaagtagaccacgtttttagagaagttaaagatgctgcaaaattgtataaaaaagaaagatggttgtccttgccatctcagtcagagcaggcagtgatgtccctgtccagttcggcttgcccgttgctgctgacgttacgagaccatttacttcagttggagcagcagctttgtttctccttatttaaaattttctggcaaatgcttgtagagaagctggatgtatacatctaccaagaaataattcttgctaatcacttcaatgaaggaggagcagcccagctgcagtttgatatgactcggaatcttttccctttgttttctcactattgcaagagaccagaaaattattttaaacatataaaagaagcctgtattgttttgaatttgaacgtcggttctgcactactgctgaaagatgtactgcagtcagcttcagggcagcttcctgccacagcagcattaaatgaagttggaatttacaaactggctcaacaagatgttgagattctacttaatttgaggacaaattggcctaatactggaaaataatgtctttcagaaaaaggtttctttggtttttgtttctaagaaagaggaagccaattggatttcaagttatatgatgaaattctgaattaatgaaactggaaaactttatagaattacttattatcttggatttatggtgttattaaaatgctgaccatatttccttcatcctcttgttcctaaggaaacaaaaacagaaaacgaaacaatgaaaactcaattctatttacaagtataaatgctgagtatgtctgttgaagacgagcagagatattaaattataaccaactttcaatttcctgtgctaattaagggaaattctgttgtggataatcaacagcgaagggcggccttcgtggcctcgag

SEQ ID NO: 376384 - DNA, 2928 bp, Homo sapiens
tgagtggccgttccgacctccggtcaggagggggaggaacagagcacggccggcggctgcacgggcagggcctctctgggctgagaggaagaaaccagtgagacatcgagaggaagtcgctgtggcactcagtcctacggcctccgaggctgggtagtgagtgtgtcgctggccttagccagactccacaggccacgctggctgcgaatggagccgaggactcgcgcggaggcgagatgctaccagccggcgagatcggcgcctctcctgcagccccgtgctgctctgaaagtggtgacgaaaggaagaacctcgaggagaaaagtgacataaatgttacagttcttattggaagtaaacaagtcagtgaaggtacagataatggtgatctcccttcttatgtgtctgcattcatagaaaaggaagttggaaatgaccttaaatctttaaagaaacttgataaactcatagaacagaggacagtaagtaaaatgcagttagaagaacaggtacttacaatttcatcagaaattcctaaaagaattcgaagtgccttaaatctcttcagcgccattaacagccatttgctgactgcgcaaccttggatggacgatcttggaaccatgattagccagattgaagagatcgaacgtcatcttgcttaccttaaatggatttcacaaattgaagaactaagtgataacattcagcaatatctgatgaccaataatgtaccggaggcagcctccactctagtgtctatggcagaacttgacattaaacttcaggaatcatcttgtactcatcttcttggtttcatgagagccacagttaaattctggcataaaattctcaaggacaagcttacaagtgattttgaggaaattttagcacagcttcattggccattcatcgcaccccctcaatcacaaactgttggcttaagtcgacctgccagtgccccggagatatacagttacctggagacactgttttgtcagcttttgaaactacaaacctcagatgaattacttactgagccaaagcaactcccagaaaaatactctcttcctgcctccccttctgtcatcctgcccatccaggttatgctgactcctcttcagaagaggttcaggtatcacttcagagggaaccggcagactaatgtgttaagcaagccagaatggtacttggctcaagtacttatgtggattggaaaccatactgaatttctggatgagaagattcagccaatattagacaaagtaggctctttggtaaacgcaaggcttgaattttctcggggccttatgatgctggttcttgagaagttagccactgatattccttgtctgctatatgatgacaatctcttctgtcatttggtggatgaagtactcttgtttgaaagggagctacacagtgttcatggctatcctggcacttttgctagttgtatgcatattctatcagaggaaacctgttttcagagatggttgacggtggagagaaaatttgctcttcaaaaaatggactcaatgctttcctcagaagctgcctgggtatcgcaatataaggatatcactgacgtggatgaaatgaaagttccagattgtgcagaaacttttatgactctactcttggttataactgacaggtataaaaatcttcccacagcttcccgaaagcttcagttcctggagttacagaaggacttagtagatgattttaggatacgattaacacaagtgatgaaagaagagactagagcttcccttggctttcgatactgtgcaattcttaatgctgtgaactacatctcaacagtactagcagattgggctgacaatgttttctttctacaacttcaacaggctgcactggaggtgtttgcagagaataatactctgagtaaattgcagctaggacagctagcctctatggagagctctgtctttgatgacatgattaacctcttagaacgtttaaagcatgatatgttgacccgtcaagtagaccacgtttttagagaagttaaagatgctgcaaaattgtataaaaaagaaagatggttgtccttgccatctcagtcagagcaggcagtgatgtccctgtccagttcggcttgcccgttgctgctgacgttacgagaccatttacttcagttggagcagcagctttgtttctccttatttaaaattttctggcaaatgcttgtagagaagctggatgtatacatctaccaagaaataattcttgctaatcacttcaatgaaggaggagcagcccagctgcagtttgatatgactcggaatcttttccctttgttttctcactattgcaagagaccagaaaattattttaaacatataaaagaagcctgtattgttttgaatttgaacgtcggttctgcactactgctgaaagatgtactgcagtcagcttcagggcagcttcctgccacagcagcattaaatgaagttggaatttacaaactggctcaacaagatgttgagattctacttaatttgaggacaaattggcctaatactggaaaataatgtctttcagaaaaaggtttctttggtttttgtttctaagaaagaggaagccaattggatttcaagttatatgatgaaattctgaattaatgaaactggaaaactttatagaattacttattatcttggatttatggtgttattaaaatgctgaccatatttccttcatcctcttgttcctaaggaaacaaaaacagaaaacgaaacaatgaaaactcaattctatttacaagtataaatgctgagtatgtctgttgaagacgagcagagatattaaattataaccaactttcaatttcctgtgctaattaagggaaattctgttgtggataatcaaacatagccaataaatttttttaaaactccc

SEQ ID NO: 376385 - DNA, 411 bp, Homo sapiens
aactagcaccggtcacctcattctacgtagaagaaaagtgtaagtttagtaggtggaatcatggcagttcaggacttagtttagagatccgatcagtgattttagttaacacacataataacctaaggcttaatactatgaagagatacaaatgagtgactaaattactatccaaaacaacttaatgttttaaaaatgcctcaagatatctcagacagaaaacagtgaagacaggtacaagaaacccagggtggtgaagtttaacagatccatctgaaggtggaacctcctgcttcagagcctgaggtcatggctattattcagctttgcttctgcttggctacttccaggtaggagtcagaggtttggtgcactccttcctctgtctccctctcgttaacctgcagagcc

SEQ ID NO: 376386 - DNA, 478 bp, Homo sapiens
ggagaacatgaccatcaagttagtcttgtttttctaagcaaataggtgtgatcttgatgaattcatattgattaaataaatcaaacacatacaagcaaataaaatatcatgcaatcatttttcctgtcaatgagatgactcacacaacccccaattccaagggagatgaaagtgaggagcaatgcattgtcattgggagtatcaagggaaatcggacacaggaagatttataaatgagaattatgttttacttaatgcaactgcttcacaacagactctgagagagcatttttgcatgaattcagaatcctataggtataaaacatacctaatataggtgaaacagtgcttgaattaaagcaaatagtaaaatccaggagttgtgatttcttattccatgaagctgacaaatatgaagctgtagagaaaattttaaagatgaaattaagttaagcaattttattatcttcacagacaa

SEQ ID NO: 376387 - DNA, 418 bp, Homo sapiens
tcggtacccctctaccttgtctctcggctctaccttgtctctcggctctaccttgtctctcggctctaccttgtctctcggctctaccttgtcgctcggctctaccttgtctctcggctctaccttgtctctcggctctaccttgtctctcggctctaccttgtctctcggctctaccttgtctctcggctctaccttgtctctcggctctaccttgtccctcggctctaccttgtctcggctctaccttgtctcggctctaccttgtctcggctctaccttgtctctcggctctaccttgtcttagtaaaatccaggagttgtgatttcttattccatgaagctgacaaatatgaagctgtagagaaaattttaaagatgaaattaagttaagcaattttattatcttcacagacaa

SEQ ID NO: 376388 - DNA, 396 bp, Homo sapiens
tattgctaaatcaatgcctcctattagaagactgatatttctgttttagtggacgttctttaatctttattttccttatttcgaaacgtcttgttaaccctctttacgtagtcttactcataaaatattctaattctgtatttaacaagcggcattttattttagtgatagaaaaaactgtggctgaaccaagttttctgggatcactggaatgatgttagctaatggagtccaatgttgaaagcatttgttgcgcacctactggatgtcagacactttgcagacacgatcttatttctcctctgagcctaataataggtatcatttcccttaaatttcctcatgtgtagaattgaggcctatagatgttaagaacttgcccaagatccccatgca

SEQ ID NO: 376389 - DNA, 1199 bp, Homo sapiens
gatttataaccatttattagtgaaagtgtttttaagcacagtcagggtgtaaacagtgcagcattcctgctcccctccgtgggacatgcgtctccttttcaattcatgtgactacagaaggcacttggtgaactgtgcgtgtctgaggtgtggaaaccaggagagggggaaagaattctcaaaggcctgacgtgagaagttggaaaggtttgcaggttagggaatgaattgggagtgggggccggcggaccaattctcggtgactttctccccatttcatgtaaacagaattgccagggaccggttaccgtggatatgtttttctaaaaactcagtgtctgcacaatccattgatagaactggaggatgtgtctgtgtttcctgttgggtttttctcatctcttacatcatacaaaaccataccatatcccaccagagagtcgcagacactatgctgcctcccatggccctgcccagtgtatcttggatgctgctttcctgcctcatgctgctgtctcaggttcaaggtgaagaaccccagagggaactgccctctgcacggatccgctgtcccaaaggctccaaggcctatggctcccactgctatgccttgtttttgtcaccaaaatcctggacagatgcagatctggcctgccagaagcggccctctggaaacctggtgtctgtgctcagtggggctgagggatccttcgtgtcctccctggtgaagagcattggtaacagctactcatacgtctggattgggctccatgaccccacacagggcaccgagcccaatggagaaggttgggagtggagtagcagtgatgtgatgaattactttgcatgggagagaaatccctccaccatctcaagccccggccactgtgcgagcctgtcgagaagcacagcatttctgaggtggaaagattataactgtaatgtgaggttaccctatgtctgcaagttcactgactagtgcaggagggaagtcagcagcctgtgtttggtgtgcaactcatcatgggcatgagaccagtgtgaggactcaccctggaagagaatattcgcttaattcccccaacctgaccacctcattcttatctttcttctgtttcttcctccccgctgtcatttcagtctcttcattttgtcatacggcctaaggctttaaagagcaataaaatttttagtctgca

SEQ ID NO: 376390 - DNA, 1222 bp, Homo sapiens
gatttataaccatttattagtgaaagtgtttttaagcacagtcagggtgtaaacagtgcagcattcctgctcccctccgtgggacatgcgtctccttttcaattcatgtgactacagaaggcacttggtgaactgtgcgtgtctgaggtgtggaaaccaggagagggggaaagaattctcaaaggcctgacgtgagaagttggaaaggtttgcaggttagggaatgaattgggagtgggggccggcggaccaattctcggtgactttctccccatttcatgtaaacagaattgccagggaccggttaccgtggatatgtttttctaaaaactcagtgtctgcacaatccattgatagaactggaggatgtgtctgtgtttcctgttgggtttttctcatctcttacatcatacaaaaccataccatatcccaccagagagtgactcctgattgcctcctcaagtcgcagacactatgctgcctcccatggccctgcccagtgtatcttggatgctgctttcctgcctcatgctgctgtctcaggttcaaggtgaagaaccccagagggaactgccctctgcacggatccgctgtcccaaaggctccaaggcctatggctcccactgctatgccttgtttttgtcaccaaaatcctggacagatgcagatctggcctgccagaagcggccctctggaaacctggtgtctgtgctcagtggggctgagggatccttcgtgtcctccctggtgaagagcattggtaacagctactcatacgtctggattgggctccatgaccccacacagggcaccgagcccaatggagaaggttgggagtggagtagcagtgatgtgatgaattactttgcatgggagagaaatccctccaccatctcaagccccggccactgtgcgagcctgtcgagaagcacagcatttctgaggtggaaagattataactgtaatgtgaggttaccctatgtctgcaagttcactgactagtgcaggagggaagtcagcagcctgtgtttggtgtgcaactcatcatgggcatgagaccagtgtgaggactcaccctggaagagaatattcgcttaattcccccaacctgaccacctcattcttatctttcttctgtttcttcctccccgctgtcatttcagtctcttcattttgtcatacggcctaaggctttaaagagcaataaaatttttagtctgca

SEQ ID NO: 376391 - DNA, 603 bp, Homo sapiens
gggctgtacctggggctggaccatggatgctgggaaggggagtagttggccacaaagggaaggggaggcattggagggaaatccagaaagactggagattagagtgcccctggaaggacaggtagagagaaaatggccaaacatacatggaatgagagagaacaataggaaaagccttaacttgttattacattttaccaacctttagcacagtgcttggttcttaaggcagcagatgccctgcagagtgagcttaacacagacaactggtctacccactcccactgagtcatattctccaggttggggcttaaggagcagacagtgcaagccccagcagtgattctgatttccagccaggtctagaaaacaactgttttaagggaccagtcccatcagcccaccctaggtcccatcaaaaaggggctgagctctcctgactcccaggcccctgactgtcctcctggtttctttggctctcccagtactgagtctgccgttcactctcagggtgattttttaagtgtgcatcctgtctggctgcagcattaactcaactcagcagtgaacctccatcctggcctggctgcctctggctgcttt

SEQ ID NO: 376392 - DNA, 415 bp, Homo sapiens
attagctgtcaagcagccctcctaagacacacggactgaagcaaggactgcctccactcataaaaaaaaataacagttccttcactctcctcttggcctatagaaaatccatgtgagggccagactcggtggctcaagcctgtaatcccagcactttgggaggccgaggcaggcagattggttgaagccaggagtttgagaccaggctggccagcatgacaaaaccccatctctactaaaaatacaaaaattagctgggtgtcatggcaggcacctgtagtcccagctactcaggaggctgaggcacaagaatcacttgaacctggggggcagaggttgcagtgaaccaagatcgcaccactgcactgcagcctgggtgaaagagcaagacagtctccaaaaaaaagaaaaggta

SEQ ID NO: 376393 - DNA, 697 bp, Homo sapiens
ccgccccctcttcgggtgagcgacgttgccgcttgggtctgatacccgtcgcatccgagaccgaggccgaatccgggctctgggagggaccgggttagtggggccctagctcgggttgaaagaattttgttttgtcaattattgtaattgctaatgccatcaccatcacaatcgtcatcattaacatctattttaattaaaataatcatcccagagcgcagcagtttgtcccttttggctcctttggcgggagaacaaagcagcgggtttttttccgctacagccgttttctaagttgctgggtttgaggtaggaagagaaaatggagagaggcacggacacagagacttggtcataaggcaaacattaacccccagcgaacacgcaacattaaccccccgcgaacacgccgggaatggatggattcccctcttctttcctcccctcccctcttttggattagaagaggagaaagaaaatcttccgcattgtattgcaatccagggaagaattattcctatatgtccaccaaagccgcggcaaatagaaggaggccttcgcagttaatccaagacttcgatgtgtgatcataagcctgacgatttaggcaaaacaaattaaacaaaatccactaggaaaaaataaaagcaagctcaatcctgctacatccttgaaagtagtgtcgggtttgttttta

SEQ ID NO: 376394 - DNA, 467 bp, Homo sapiens
gcgcaattagtgataaaagcaccagatatcagagacactacacttatgtattgtaaaatatattgcttgtgaacctccttagtcttgtagcagtggtaattgttgcctggcctacaaggaaaacaattatagaagggaggaaaaaggcttaggaagctgaagctgcaggaggataatcactttataaaaaatgtatgttggctggaccattagggatttctctaactattttctcatgttgagtttgaggttccttctgaagagaatatttaaagagctgtcctctggatagctttctaacctcaggagaaataaacccacccaaagtaaaaaacaaacaactaagagcttctcaatggtacaggacttactctaggatattggatctaattttttacatgagtctttcaatggaaagcgaagcctgtattgggatactctatagaaagtgctgctttttgtcttgg

SEQ ID NO: 376395 - DNA, 577 bp, Homo sapiens
tgtttgcatatgatgcacgttttcctttcttccagctggatattcagttatgtccagtaccatttctttaaaaatccattttttccctctgagtttaaatatattaaattatcttttattctgggatgcatttgtcaattatcctctgctactgatgcagctatttttattgaatcactgtgctgtttggattataagtagctttataagatggcctaatatctagtgatgccagtttcccattatgattactgaaaaattgttttctggctcttcttgtgaatttagtcttctgtatatattttatgacatccaaatgaaagaaaagaaaaaagcaaaacaactcccccctgctcaccacccccaacaaaaatactttgtttgaatcctaattggaatgacactaggtttataaattaatttggggagaactgacattttttgtgatagcaagtcttcacattccaggacatgctatctattttatgtctttcaataacatcctatagtctgaactgggaaacccattcccaggactctactgcctagaaacatcactcctcacagtgacacaaaa

SEQ ID NO: 376396 - DNA, 686 bp, Homo sapiens
ttctgaaaccaacttccttaaactctcatgtataaggtagctatacacctaggatccctcttaaacacttactacttggttgggtaattctcatgaataacagaagcttgaaaattaacagagtattggattcagtgattgtacaagagcagtggagttttctccacaaagtagagaaaatcatttgtgtattgttatgcaaatagcttacagaactattaataattttgttttctttaatttgtaatttcttatgtaactagtccatttgctttcacccagtgatgagcatcttacctgcttcactcggtagcgctccattcctaatctttttaaggacaaattcatcaacttggcgttaaagtctatcagtaacatgatcccagctacttctccagattcctcttgagctgtccttactacatgtgcactacactgcagccacactgtgtgacttattccctggggtttctattgtttctgccttgcttttctcatcctttagatattagcattattggctgggcacagtggttcacacttgtaatcctagcactttgggaagctgaggcaggcagatcacttgagcccaggaattagagaccagcctgggcaacaaaaatgtcggctgcagtgagctgatactgctgtccaccctgggcaacagggtgtgagacctcatctca

SEQ ID NO: 376397 - DNA, 1326 bp, Homo sapiens
gagaccaaaaatgccatcattttcacctgcctgaactcttctgttgttttccctagttgctgccttgcgctttttccgcagtacagggagagaaatcagttgtctggctgtctaaactcacggcatctgcttagcagtttcaccagctcatagttgggactcatccctctgtcagaatcctttgctccattagaagggagactgggaccacgttcctgaattgatttgcatacttctacgttacctagctcagacaacatatggccatgtggagcacttggatttatttctgtttcctcaaattaaattcctaaaaaattggataactccacagtttgtttggtgttacaaaaaattttagttccttttttggtcggcaaagcaacacaattttggcattaaaaaaaaatctctggattactttaaaaagagtgttgatttgatttgcttcccctcttctcttacccctttcaggaaaaaaaaaaatgtatgttgaatcttaaaacactgcatcatgttgcaaaatgtccatttaggcacactgaatagaaagtatcatcgagtcatttttattcttgtaattcagtaatcttgtatcttttgcctttttctttttccttaatgttaattgtgtaactaaatgtctcaaacttgggacttttcactttacacatccatgtgtaaaaatacatagatacatacagtcagataggaaggaaataaggactcagtgttaataggatcagtgggttggggtgggggaactatacttaacaatagtatgttgtacatttcacagtagccaaaagagaacaattcaaatgttcttaacataaagaaaagataaatatatcaggtgataggcattctaattactctgatttgatcttcccacattatataaatgtatcaaattatcacgtactccccattaataatactgtatatcaacgaatttttttaaaaaaagaaatagatatcatacaatgaataactggattaatgtgaaatgatagaaaaagttaccattttaggctggatgtggtgacccacgcctgtaataccagtactttgtgagtctgaggcagtaggattgcttgaggccaggagtttgagaccagcctggttaacgatacaagaccccctttctaaaaaaaaaaaaaaaaaagccaagtgcagcagcatatgcctgtagtcccaactactgagggcatagaggtaggaggatcatggatcactggatcacttgaggagtttgaagttgcaggaagctatgatcctatcactgcactccagccgaggtgacagagcagcaagaccctgtct

SEQ ID NO: 376398 - DNA, 1339 bp, Homo sapiens
tggtcttgttttttaagagatggggtctcgcatactgtcgccaggctgagagtgcattagtgcaatcacagctcactgcagctttgaactcctgggctcaagggatcctcccacaacagcctcctgagtagctgggcctacaggtgtgtgccaccacgcctgactatttttacagtttttgtagaggcagggtctagctttgttgcccaggctggtctcaaacacctggcttcaagtgatcctcctgccttcaaagtgctgagcttacaggcatgagattttcttttcaattaaccaaaactaaaaagcacaaggaagcacaattttcaaacagttggcttagattacagggttgaagggagaggtggtggggagggaatcttaacacttccagcaccacactgcttaacttgttccaatgcacatgtggcatttttaaaatctcgtgaagtagaaagaggttatttctattataaaggcaaatgagcaaatgaacatttatttaaatgtctcacatcagaatatggaaagaaaggaaactgaagtgagttttataagaatcccttaagaaaacacacactctctgataaagcacatttctaggaacagggccaatttcctctgccttccactgtgaacggtaacatcacattcaagctgattctagaacacatccacctccgacagaaggcggggcagacaatgatgggagggtctgcagcacagacacaggctccttgaagacgcccgtggtgagatcagccccaggtcgccgcttccacagacaggccttttcctaaagtggatgaagggagtcaaataggccagcttcgtgtcttgatctgcctttgctgtcattcacgcatctgtcctcatgaaggcttaacctaccatgtttatcagaaatctcagcctaaattcattcgatttttacctagagatgaggaatgtgttaaatcactctactccacaaggaaccaaaccaaacagcatcagcaccaggctgagtcgcggaaaggatctgtcagaccgctccactggcatcgactcagctcgggagctacgttcaaagaaggaggacatttaaggtgaaagggttgcaggcagaggggcctggagcagcaggaggccacctcccaaaggctccactcccaggggccaacagagagaccacatccagaattgaaccagggatacgcagacaccaacggagaagacatgagcgtcaacctcctccacggagcagcacggcttctctactgacatccatgaactagactacaactctctaagttaatcaaatttactaagttagttatcaccgacatcactgttccat

SEQ ID NO: 376399 - DNA, 411 bp, Homo sapiens
ccgtgacactctgcagccaggtgctggggcgcgagagcaaggcactgcagttccgtcactccacacaatttctcactgtaaaactgacatgaagtcctccaatcttgacgtgatgccttaacgtatactgttcaattaaaaacatttcattctacgccgtttatatcacagttacatatttatatttcatatcatattatatcataggaatgtgttaaatcactctactccacaaggaaccaaaccaaacagcatcagcaccaggctgagtcgcggaaaggatctgtcagaccgctccactggcatcgactcagctcgggagctacgttcaaagaagggtgagttgcccgggaggagaccacccagagcagtagccctcttcctgggcacagggaagacgcaccccatacc

SEQ ID NO: 376400 - DNA, 1420 bp, Homo sapiens
tggtcttgttttttaagagatggggtctcgcatactgtcgccaggctgagagtgcattagtgcaatcacagctcactgcagctttgaactcctgggctcaagggatcctcccacaacagcctcctgagtagctgggcctacaggtgtgtgccaccacgcctgactatttttacagtttttgtagaggcagggtctagctttgttgcccaggctggtctcaaacacctggcttcaagtgatcctcctgccttcaaagtgctgagcttacaggcatgagattttcttttcaattaaccaaaactaaaaagcacaaggaagcacaattttcaaacagttggcttagattacagggttgaagggagaggtggtggggagggaatcttaacacttccagcaccacactgcttaacttgttccaatgcacatgtggcatttttaaaatctcgtgaagtagaaagaggttatttctattataaaggcaaatgagcaaatgaacatttatttaaatgtctcacatcagaatatggaaagaaaggaaactgaagtgagttttataagaatcccttaagaaaacacacactctctgataaagcacatttctaggaacagggccaatttcctctgccttccactgtgaacggtaacatcacattcaagctgattctagaacacatccacctccgacagaaggcggggcagacaatgatgggagggtctgcagcacagacacaggctccttgaagacgcccgtggtgagatcagccccaggtcgccgcttccacagacaggccttttcctaaagtggatgaagggagtcaaataggccagcttcgtgtcttgatctgcctttgctgtcattcacgcatctgtcctcatgaaggcttaacctaccatgtttatcagaaatctcagcctaaattcattcgatttttacctagagatgaggaatgtgttaaatcactctactccacaaggaaccaaaccaaacagcatcagcaccaggctgagtcgcggaaaggatctgtcagaccgctccactggcatcgactcagctcgggagctacgttcaaagaaggggcatggtgctattcctggcttcaggcatctgctggagtgcagtggcaccgtcacagctcactgcagcctcaagcaatcctccagcctcagcctcctcagtagccgggactaccaggactacaccaccacacttggttttgaaccatatttcaagataacccgatagcccagctgatgtggagctcttctttgaagaagtccagcaaacaaatgaagaagttacagaactagaaaacttcgcaaactctaataaagtaattgattcaggcaataatcctcaatgaatatgaaaaccattaataggttgatgaggaactcattatcacaggacaccagaaactca

SEQ ID NO: 376401 - DNA, 733 bp, Homo sapiens
aaactaaaaagcacaaggaagcacaattttcaaacagttggcttagattacagggttgaagggagaggtggtggggagggaatcttaacacttccagcaccacactgcttaacttgttccaatgcacatgtggcatttttaaaatctcgtgaagtagaaagaggttatttctattataaaggcaaatgagcaaatgaacatttatttaaatgtctcacatcagaatatggaaagaaaggaaactgaagtgagttttataagaatcccttaagaaaacacacactctctgataaagcacatttctaggaacagggccaatttcctctgccttccactgtgaacggtaacatcacattcaagctgattctagaacacatccacctccgacagaaggcggggcagacaatgatgggagggtctgcagcacagacacaggctccttgaagacgcccgtggtgagatcagccccaggtcgccgcttccacagacaggccttttcctaaagtggatgaagggagtcaaataggccaggtgggaaatcaaggaaggagtgggcgtgttcccaggggctgtggtgggagaagtcacgaccatctcgtgtgggtcctccaggagaaacccagcgccactcgggtggctggggcgccgtcagccgggactagcgaggctggagtcagaccctgggggacggagtctccaccagcaccggcagggatggcgttccatccgtcca

SEQ ID NO: 376402 - DNA, 519 bp, Homo sapiens
  misc_feature (442)..(442): n is a, c, g, or t
  misc_feature (472)..(472): n is a, c, g, or t
  misc_feature (478)..(478): n is a, c, g, or t
aggaggattcagaatttaggttggggaagaaaagggcaagggtttcatttgtccctgtgctgctgtcttctgggactctctgaggggtaagacggtggtgggcacacacagccaaaggaagtaggggtacaggggagtgcgactctgagtatggagtttattacttggcaggaagcacttctgatctttaacacatgcccgtaaatgccgttgggaagatttgttaataaaattatgcgatgagattcccagagacctgcattgctttctcctggttttatttaacaatcgacaaatgaaattcttacagcctgaaggcaggacgtgtccccagatgtgaaagagaccttcagtatcagccctaactcttctctcccagggaaggacttgctgggctctgtggccagctgtccagcccagccctgtgtgtgaatcgtttgtngacgtgttgcaaatggggaaagggaggggntttttnacatcttccttaaagggacctggatggccaacacaagttgg

SEQ ID NO: 376403 - DNA, 356 bp, Homo sapiens
  misc_feature (17)..(17): n is a, c, g, or t
  misc_feature (305)..(305): n is a, c, g, or t
  misc_feature (322)..(322): n is a, c, g, or t
tcagactgtggctgttnaaggatgatggtgatagtaggttttgttaaacctgagagcctgacaaatggtgaatcacaatggctgatctgagttaatggaaattgaactacggccacttctagtaaaccacgtcgtgcctcactgggtcctgcttacctcatttctgaatgtgcatttccagccttcttgctctcagagctattgttcaagcagaaaacaagctgcttttattacagtaaggtgaagacctggttggaattggtaatgaaatgccaaacaactcaccactcgaagtcccaattggnacagacacagggttctnagaccactgatcctgagtggtctcggcccagggc

SEQ ID NO: 376404 - DNA, 2820 bp, Homo sapiens
aacaaagtcggagtttgtggattgggggaagggcggggtctaacctcaggtcaggcgccgtgcaaggtacatcttggcacccggaagaggcccagtacagttgcccccgaggtgacccgacctcccctaccaattgaggcgcccttgttgccaggcttgcggcgggggagcggcgggggagcgacggggatgcgctcattggtcaaggaaggggcgcctgttactagaggcgagaaccggagcccattggtcggaacacctcacaatggaccccagcggcgcgcaaaatccttatgattggtttgctggctgcctcgggagaccctgttgccaggatacttggcgttcccgacccgacccccgttccccattggctgtcagggcaaaagccgccatctaatgaggagcgaggtgcggtgccccgaagcgctcgcttcccgcggtgcgatctagtcctgcagtaggcggcccggggccacaccgcggccgcccaagccagtgcaaggcccaggggcctgacatcgctcccagcgctcgaggaccgaggcctgctgtggaggacaccgtgctccctcgggacctgctctggattccggcccggacgtccccttggagctctgcatctccaacctggaacccaacccagaagtctcaagtttgacgcatcacgtggcgtgcggatccactgagggtccacagagaggggcgcccatctcctgcgtctcagttatcctggtgttgggaattctgtgccctaaagaattccgactcagatccgaacggggatctggtggaatcgagggtgaaagaccagagggacaatgttctactatcccaacgtgcttcagcgccacaccggctgctttgccaccatctggctggcggcgactcgcggcagccggttggtgaagcgcgaatacctgagggtgaatgtggtgaaaacctgcgaggaaatcctcaattacgtgctggtacgagtgcaacccccgcagcccggcctgccgcggccccgcttctccctctatctctcagcccaacttcagatcggtgtgatccgcgtctattctcaacaatgccagtacctcgtggaggacatccagcacatcttggagcgcctccaccgtgcccagctgcagatccgaatagatatggagactgagctacccagcctgctgcttcctaaccacctggccatgatggagaccctagaagatgctccagatcccttttttgggatgatgtctgtggatcccagacttcctagtcctttcgatatccctcagattcgacacctcttagaggctgcaatcccagagagagttgaagagatccctcctgaagttcctacagagcccagggagccagagaggattccggtcactgtgctgccacctgaggccatcacgatcctggaggcagagcccatacggatgctggagattgagggtgaacgggagctcccagaggtcagccgccgagaactggacctgctgatcgcagaggaagaagaagctatcttgttagaaatcccgcggctcccacctccagctcctgcagaggtggaaggaataggagaggcactgggtcctgaggagctgaggctgacaggctgggaacctggggccctactcatggaggtgacccccccggaggagctgcgtctgccagccccacccagcccagagaggaggcccccagtccccccacctcctcgccgccgccgtcgtcgccggttactgttctgggacaaggagactcagatctccccggagaaattccaggaacaactgcaaaccagagcccactgctgggaatgtcctatggtgcagccgcccgagaggaccatcagaggccctgcggagttgttcagaaccccaactctctctggctggctaccccctgaactactgggtctctggacccattgtgcccagccacccccaaaagccctcaggcgagagctgcctgaggaggcagccgctgaggaggaaaggagaaagattgaagttccaagtgagattgaggtcccgagggaggccctggagcccagtgttccccttatggtgtctttagagatctccctagaggcagctgaagaggagaagtcccgcatcagcctcatcccaccagaagaacggtgggcctggcctgaggtggaggcgccagaagctcctgcattgcccgtggtgcctgaactccctgaggtgcccatggagatgcctttggtgctgcccccagagctcgagctgctctcactggaagcagtgcacagggcagtggcactggagctgcaggctaacagggagcccgacttcagcagcctggtgtcacctctcagcccccgcaggatggctgcccgggtcttctacctgctcctggtgctctcagcgcaacagattcttcacgtgaaacaagaaaagccatatggtcgcctcctgatccagccggggcccagattccactgaggttagagtccatttacaaagctgccaggaaaccggccacttctagtaaaccacgtcgtgcctcactgggtcctgcttacctcatttctgaatgtgcatttccagccttcttgctctcagagctattgttcaagcagaaaacaagctgcttttattacagtaaaaaaaaaaagaaaaagccccggggaacacacactatacggggtggcggaaacaagagggtcatgaactgggcccctgggcacatcacggggttcccggacccacgttttgtggaccaagggggaactctccgcggacccccaaaagggagcgaataaccgaataaccaggtaccctgatatgaactcggaaa

SEQ ID NO: 376405 - DNA, 2921 bp, Homo sapiens
aacaaagtcggagtttgtggattgggggaagggcggggtctaacctcaggtcaggcgccgtgcaaggtacatcttggcacccggaagaggcccagtacagttgcccccgaggtgacccgacctcccctaccaattgaggcgcccttgttgccaggcttgcggcgggggagcggcgggggagcgacggggatgcgctcattggtcaaggaaggggcgcctgttactagaggcgagaaccggagcccattggtcggaacacctcacaatggaccccagcggcgcgcaaaatccttatgattggtttgctggctgcctcgggagaccctgttgccaggatacttggcgttcccgacccgacccccgttccccattggctgtcagggcaaaagccgccatctaatgaggagcgaggtgcggtgccccgaagcgctcgcttcccgcggtgcgatctagtcctgcagtaggcggcccggggccacaccgcggccgcccaagccagtgcaaggcccaggggcctgacatcgctcccagcgctcgaggaccgaggcctgctgtggaggacaccgtgctccctcgggacctgctctggattccggcccggacgtccccttggagctctgcatctccaacctggaacccaacccagaagtctcaagtttgacgcatcacgtggcgtgcggatccactgagggtccacagagaggggcgcccatctcctgcgtctcagttatcctggtaattgtgtatctgcccattgttcgttgcctcattaacttggctttctaggtgcacccaccttgccaccagagaagtccaaatcctgacttctctccaaggtgttgggaattctgtgccctaaagaattccgactcagatccgaacggggatctggtggaatcgagggtgaaagaccagagggacaatgttctactatcccaacgtgcttcagcgccacaccggctgctttgccaccatctggctggcggcgactcgcggcagccggttggtgaagcgcgaatacctgagggtgaatgtggtgaaaacctgcgaggaaatcctcaattacgtgctggtacgagtgcaacccccgcagcccggcctgccgcggccccgcttctccctctatctctcagcccaacttcagatcggtgtgatccgcgtctattctcaacaatgccagtacctcgtggaggacatccagcacatcttggagcgcctccaccgtgcccagctgcagatccgaatagatatggagactgagctacccagcctgctgcttcctaaccacctggccatgatggagaccctagaagatgctccagatcccttttttgggatgatgtctgtggatcccagacttcctagtcctttcgatatccctcagattcgacacctcttagaggctgcaatcccagagagagttgaagagatccctcctgaagttcctacagagcccagggagccagagaggattccggtcactgtgctgccacctgaggccatcacgatcctggaggcagagcccatacggatgctggagattgagggtgaacgggagctcccagaggtcagccgccgagaactggacctgctgatcgcagaggaagaagaagctatcttgttagaaatcccgcggctcccacctccagctcctgcagaggtggaaggaataggagaggcactgggtcctgaggagctgaggctgacaggctgggaacctggggccctactcatggaggtgacccccccggaggagctgcgtctgccagccccacccagcccagagaggaggcccccagtccccccacctcctcgccgccgccgtcgtcgccggttactgttctgggacaaggagactcagatctccccggagaaattccaggaacaactgcaaaccagagcccactgctgggaatgtcctatggtgcagccgcccgagaggaccatcagaggccctgcggagttgttcagaaccccaactctctctggctggctaccccctgaactactgggtctctggacccattgtgcccagccacccccaaaagccctcaggcgagagctgcctgaggaggcagccgctgaggaggaaaggagaaagattgaagttccaagtgagattgaggtcccgagggaggccctggagcccagtgttccccttatggtgtctttagagatctccctagaggcagctgaagaggagaagtcccgcatcagcctcatcccaccagaagaacggtgggcctggcctgaggtggaggcgccagaagctcctgcattgcccgtggtgcctgaactccctgaggtgcccatggagatgcctttggtgctgcccccagagctcgagctgctctcactggaagcagtgcacagggcagtggcactggagctgcaggctaacagggagcccgacttcagcagcctggtgtcacctctcagcccccgcaggatggctgcccgggtcttctacctgctcctggtgctctcagcgcaacagattcttcacgtgaaacaagaaaagccatatggtcgcctcctgatccagccggggcccagattccactgaggttagagtccatttacaaagctgccaggaaaccggccacttctagtaaaccacgtcgtgcctcactgggtcctgcttacctcatttctgaatgtgcatttccagccttcttgctctcagagctattgttcaagcagaaaacaagctgcttttattacagtaaaaaaaaaaagaaaaagccccggggaacacacactatacggggtggcggaaacaagagggtcatgaactgggcccctgggcacatcacggggttcccggacccacgttttgtggaccaagggggaactctccgcggacccccaaaagggagcgaataaccgaataaccaggtaccctgatatgaactcggaaa

SEQ ID NO: 376406 - DNA, 2989 bp, Homo sapiens
aacaaagtcggagtttgtggattgggggaagggcggggtctaacctcaggtcaggcgccgtgcaaggtacatcttggcacccggaagaggcccagtacagttgcccccgaggtgacccgacctcccctaccaattgaggcgcccttgttgccaggcttgcggcgggggagcggcgggggagcgacggggatgcgctcattggtcaaggaaggggcgcctgttactagaggcgagaaccggagcccattggtcggaacacctcacaatggaccccagcggcgcgcaaaatccttatgattggtttgctggctgcctcgggagaccctgttgccaggatacttggcgttcccgacccgacccccgttccccattggctgtcagggcaaaagccgccatctaatgaggagcgaggtgcggtgccccgaagcgctcgcttcccgcggtgcgatctagtcctgcagtaggcggcccggggccacaccgcggccgcccaagccagtgcaaggcccaggggcctgacatcgctcccagcgctcgaggaccgaggcctgctgtggaggacaccgtgctccctcgggacctgctctggattccggcccggacgtccccttggagctctgcatctccaacctggaacccaacccagaagtctcaagtttgacgcatcacgtggcgtgcggatccactgagggtccacagagaggggcgcccatctcctgcgtctcagttatcctggtgttgggaattctgtgccctaaagaattccgactcagatccgaacggggatctggtggaatcgagggtgaaagaccagagggacaatgttctactatcccaacgtgcttcagcgccacaccggctgctttgccaccatctggctggcggcgactcgcggcagccggttggtgaagcgcgaatacctgagggtgaatgtggtgaaaacctgcgaggaaatcctcaattacgtgctggtacgagtgcaacccccgcagcccggcctgccgcggccccgcttctccctctatctctcagcccaacttcagatcggtgtgatccgcgtctattctcaacaatgccagtacctcgtggaggacatccagcacatcttggagcgcctccaccgtgcccagctgcagatccgaatagatatggagactgagctacccagcctgctgcttcctaaccacctggccatgatggagaccctagaagatgctccagatcccttttttgggatgatgtctgtggatcccagacttcctagtcctttcgatatccctcagattcgacacctcttagaggctgcaatcccagagagagttgaagagatccctcctgaagttcctacagagcccagggagccagagaggattccggtcactgtgctgccacctgaggccatcacgatcctggaggcagagcccatacggatgctggagattgagggtgaacgggagctcccagaggtcagccgccgagaactggacctgctgatcgcagaggaagaagaagctatcttgttagaaatcccgcggctcccacctccagctcctgcagaggtggaaggaataggagaggcactgggtcctgaggagctgaggctgacaggctgggaacctggggccctactcatggaggtgacccccccggaggagctgcgtctgccagccccacccagcccagagaggaggcccccagtccccccacctcctcgccgccgccgtcgtcgccggttactgttctgggacaaggagactcagatctccccggagaaattccaggaacaactgcaaaccagagcccactgctgggaatgtcctatggtgcagccgcccgagaggaccatcagaggccctgcggagttgttcagaaccccaactctctctggctggctaccccctgaactactgggtctctggacccattgtgcccagccacccccaaaagccctcaggcgagagctgcctgaggaggcagccgctgaggaggaaaggagaaagattgaagttccaagtgagattgaggtaactgcaccacctgtttactgcatcgccccagtgccagggtctgcctgaccagctggctgccctctcctgctatgagagccaacagcacaggctcactggccttgtgccttctgaggcccaagtcccagatgcttggggtcttagttctacttctcccatccccagggtcccgagggaggccctggagcccagtgttccccttatggtgtctttagagatctccctagaggcagctgaagaggagaagtcccgcatcagcctcatcccaccagaagaacggtgggcctggcctgaggtggaggcgccagaagctcctgcattgcccgtggtgcctgaactccctgaggtgcccatggagatgcctttggtgctgcccccagagctcgagctgctctcactggaagcagtgcacagggcagtggcactggagctgcaggctaacagggagcccgacttcagcagcctggtgtcacctctcagcccccgcaggatggctgcccgggtcttctacctgctcctggtgctctcagcgcaacagattcttcacgtgaaacaagaaaagccatatggtcgcctcctgatccagccggggcccagattccactgaggttagagtccatttacaaagctgccaggaaaccggccacttctagtaaaccacgtcgtgcctcactgggtcctgcttacctcatttctgaatgtgcatttccagccttcttgctctcagagctattgttcaagcagaaaacaagctgcttttattacagtaaaaaaaaaaagaaaaagccccggggaacacacactatacggggtggcggaaacaagagggtcatgaactgggcccctgggcacatcacggggttcccggacccacgttttgtggaccaagggggaactctccgcggacccccaaaagggagcgaataaccgaataaccaggtaccctgatatgaactcggaaa

SEQ ID NO: 376407 - DNA, 2529 bp, Homo sapiens
aacaaagtcggagtttgtggattgggggaagggcggggtctaacctcaggtcaggcgccgtgcaaggtacatcttggcacccggaagaggcccagtacagttgcccccgaggtgacccgacctcccctaccaattgaggcgcccttgttgccaggcttgcggcgggggagcggcgggggagcgacggggatgcgctcattggtcaaggaaggggcgcctgttactagaggcgagaaccggagcccattggtcggaacacctcacaatggaccccagcggcgcgcaaaatccttatgattggtttgctggctgcctcgggagaccctgttgccaggatacttggcgttcccgacccgacccccgttccccattggctgtcagggcaaaagccgccatctaatgaggagcgaggtgcggtgccccgaagcgctcgcttcccgcggtgcgatctagtcctgcagtaggcggcccggggccacaccgcggccgcccaagccagtgcaaggcccaggggcctgacatcgctcccagcgctcgaggaccgaggcctgctgtggaggacaccgtgctccctcgggacctgctctggattccggcccggacgtccccttggagctctgcatctccaacctggaacccaacccagaagtctcaagtttgacgcatcacgtggcgtgcggatccactgagggtccacagagaggggcgcccatctcctgcgtctcagttatcctggtgttgggaattctgtgccctaaagaattccgactcagatccgaacggggatctggtggaatcgagggtgaaagaccagagggacaatgttctactatcccaacgtgcttcagcgccacaccggctgctttgccaccatctggctggcggcgactcgcggcagccggttggtgaagcgcgaatacctgagggtgaatgtggtgaaaacctgcgaggaaatcctcaattacgtgctggtacgagtgcaacccccgcagcccggcctgccgcggccccgcttctccctctatctctcagcccaacttcagatcggtgtgatccgcgtctattctcaacaatgccagtacctcgtggaggacatccagcacatcttggagcgcctccaccgtgcccagctgcagatccgaatagatatggagactgagctacccagcctgctgcttcctaaccacctggccatgatggagaccctagaagatgctccagatcccttttttgggatgatgtctgtggatcccagacttcctagtcctttcgatatccctcagattcgacacctcttagaggctgcaatcccagagagagttgaagagatccctcctgaagttcctacagagcccagggagccagagaggattccggtcactgtgctgccacctgaggccatcacgatcctggaggcagagcccatacggatgctggagattgagggtgaacgggagctcccagaggtcagccgccgagaactggacctgctgatcgcagaggaagaagaagctatcttgttagaaatcccgcggctcccacctccagctcctgcagaggtggaaggaataggagaggcactgggtcctgaggagctgaggctgacaggctgggaacctggggccctactcatggaggtgacccccccggaggagctgcgtctgccagccccacccagcccagagaggaggcccccagtccccccacctcctcgccgccgccgtcgtcgccggttactgttctgggacaaggagactcagatctccccggagaaattccaggaacaactgcaaaccagagcccactgctgggaatgtcctatggtgcagccgcccgagaggaccatcagaggccctgcggagttgttcagaaccccaactctctctggctggctaccccctgaactactgggtctctggacccattgtgcccagccacccccaaaagccctcaggcgagagctgcctgaggaggcagccgctgaggaggaaaggagaaagattgaagttccaagtgagattgaggtcccgagggaggccctggagcccagtgttccccttatggtgtctttagagatctccctagaggcagctgaagaggagaagtcccgcatcagcctcatcccaccagaagaacggtgggcctggcctgaggtggaggcgccagaagctcctgcattgcccgtggtgcctgaactccctgaggtgcccatggagatgcctttggtgctgcccccagagctcgagctgctctcactggaagcagtgcacagggcagtggcactggagctgcaggctaacagggagcccgacttcagcagcctggtgtcacctctcagcccccgcaggatggctgcccgggtcttctacctgctcctggtgctctcagcgcaacagattcttcacgtgaaacaagaaaagccatatggtcgcctcctgatccagccggggcccagattccactgaggttagagtccatttacaaagctgccaggaaaccggccacttctagtaaaccacgtcgtgcctc

SEQ ID NO: 376408 - DNA, 2923 bp, Homo sapiens
aacaaagtcggagtttgtggattgggggaagggcggggtctaacctcaggtcaggcgccgtgcaaggtacatcttggcacccggaagaggcccagtacagttgcccccgaggtgacccgacctcccctaccaattgaggcgcccttgttgccaggcttgcggcgggggagcggcgggggagcgacggggatgcgctcattggtcaaggaaggggcgcctgttactagaggcgagaaccggagcccattggtcggaacacctcacaatggaccccagcggcgcgcaaaatccttatgattggtttgctggctgcctcgggagaccctgttgccaggatacttggcgttcccgacccgacccccgttccccattggctgtcagggcaaaagccgccatctaatgaggagcgaggtgcggtgccccgaagcgctcgcttcccgcggtgcgatctagtcctgcagtaggcggcccggggccacaccgcggccgcccaagccagtgcaaggcccaggggcctgacatcgctcccagcgctcgaggaccgaggcctgctgtggaggacaccgtgctccctcgggacctgctctggattccggcccggacgtccccttggagctctgcatctccaacctggaacccaacccagaagtctcaagtttgacgcatcacgtggcgtgcggatccactgagggtccacagagaggggcgcccatctcctgcgtctcagttatcctggtgttgggaattctgtgccctaaagaattccgactcagatccgaacggggatctggtggaatcgagggtgaaagaccagagggacaatgttctactatcccaacgtgcttcagcgccacaccggctgctttgccaccatctggctggcggcgactcgcggcagccggttggtgaagcgcgaatacctgagggtgaatgtggtgaaaacctgcgaggaaatcctcaattacgtgctggtacgagtgcaacccccgcagcccggcctgccgcggccccgcttctccctctatctctcagcccaacttcagatcggtgtgatccgcgtctattctcaacaatgccagtacctcgtggaggacatccagcacatcttggagcgcctccaccgtgcccagctgcagatccgaatagatatggagactgagctacccagcctgctgcttcctaaccacctggccatgatggagaccctagaagatgctccagatcccttttttgggatgatgtctgtggatcccagacttcctagtcctttcgatatccctcagattcgacacctcttagaggctgcaatcccagagagagttgaagagatccctcctgaagttcctacagagcccagggagccagagaggattccggtcactgtgctgccacctgaggccatcacgatcctggaggcagagcccatacggatgctggagattgagggtgaacgggagctcccagaggtcagccgccgagaactggacctgctgatcgcagaggaagaagaagctatcttgttagaaatcccgcggctcccacctccagctcctgcagaggtggaaggaataggagaggcactgggtcctgaggagctgaggctgacaggctgggaacctggggccctactcatggaggtgacccccccggaggagctgcgtctgccagccccacccagcccagagaggaggcccccagtccccccacctcctcgccgccgccgtcgtcgccggttactgttctgggacaaggagactcagatctccccggagaaattccaggaacaactgcaaaccagagcccactgctgggaatgtcctatggtgcagccgcccgagaggaccatcagaggccctgcggagttgttcagaaccccaactctctctggctggctaccccctgaactactgggtctctggacccattgtgcccagccacccccaaaagccctcaggcgagagctgcctgaggaggcagccgctgaggaggaaaggagaaagattgaagttccaagtgagattgaggtcccgagggaggccctggagcccagtgttccccttatggtgtctttagagatctccctagaggcagctgaagaggagaagtcccgcatcagcctcatcccaccagaagaacggtgggcctggcctgaggtggaggcgccagaagctcctgcattgcccgtggtgcctgaactccctgaggtgcccatggagatgcctttggtgctgcccccagagctcgagctgctctcactggaagcagtgcacagggcagtggcactggagctgcaggctaacagggagcccgacttcagcagcctggtgtcacctctcagcccccgcaggatggctgcccgggtcttctacctgctcctgggtgagtgtatgcatgtgtgtgtgtgtatgtggggcagggacacagagaccagaggcccgtacagggactcccccgacctgccctctcctcgcctcttgaccagtgctctcagcgcaacagattcttcacgtgaaacaagaaaagccatatggtcgcctcctgatccagccggggcccagattccactgaggttagagtccatttacaaagctgccaggaaaccggccacttctagtaaaccacgtcgtgcctcactgggtcctgcttacctcatttctgaatgtgcatttccagccttcttgctctcagagctattgttcaagcagaaaacaagctgcttttattacagtaaaaaaaaaaagaaaaagccccggggaacacacactatacggggtggcggaaacaagagggtcatgaactgggcccctgggcacatcacggggttcccggacccacgttttgtggaccaagggggaactctccgcggacccccaaaagggagcgaataaccgaataaccaggtaccctgatatgaactcggaaa

SEQ ID NO: 376409 - DNA, 1764 bp, Homo sapiens
gctggctgtctacctcgtcctccctgcccacagaggacatccagcacatcttggagcgcctccaccgtgcccagctgcagatccgaatagatatggagactgagctacccagcctgctgcttcctaaccacctggccatgatggagaccctagaagatgctccagatcccttttttgggatgatgtctgtggatcccagacttcctagtcctttcgatatccctcagattcgacacctcttagaggctgcaatcccagagagagttgaagagatccctcctgaagttcctacagagcccagggagccagagaggattccggtcactgtgctgccacctgaggccatcacgatcctggaggcagagcccatacggatgctggagattgagggtgaacgggagctcccagaggtcagccgccgagaactggacctgctgatcgcagaggaagaagaagctatcttgttagaaatcccgcggctcccacctccagctcctgcagaggtggaaggaataggagaggcactgggtcctgaggagctgaggctgacaggctgggaacctggggccctactcatggaggtgacccccccggaggagctgcgtctgccagccccacccagcccagagaggaggcccccagtccccccacctcctcgccgccgccgtcgtcgccggttactgttctgggacaaggagactcagatctccccggagaaattccaggaacaactgcaaaccagagcccactgctgggaatgtcctatggtgcagccgcccgagaggaccatcagaggccctgcggagttgttcagaaccccaactctctctggctggctaccccctgaactactgggtctctggacccattgtgcccagccacccccaaaagccctcaggcgagagctgcctgaggaggcagccgctgaggaggaaaggagaaagattgaagttccaagtgagattgaggtcccgagggaggccctggagcccagtgttccccttatggtgtctttagagatctccctagaggcagctgaagaggagaagtcccgcatcagcctcatcccaccagaagaacggtgggcctggcctgaggtggaggcgccagaagctcctgcattgcccgtggtgcctgaactccctgaggtgcccatggagatgcctttggtgctgcccccagagctcgagctgctctcactggaagcagtgcacagggcagtggcactggagctgcaggctaacagggagcccgacttcagcagcctggtgtcacctctcagcccccgcaggatggctgcccgggtcttctacctgctcctggtgctctcagcgcaacagattcttcacgtgaaacaagaaaagccatatggtcgcctcctgatccagccggggcccagattccactgaggttagagtccatttacaaagctgccaggaaaccggccacttctagtaaaccacgtcgtgcctcactgggtcctgcttacctcatttctgaatgtgcatttccagccttcttgctctcagagctattgttcaagcagaaaacaagctgcttttattacagtaaaaaaaaaaagaaaaagccccggggaacacacactatacggggtggcggaaacaagagggtcatgaactgggcccctgggcacatcacggggttcccggacccacgttttgtggaccaagggggaactctccgcggacccccaaaagggagcgaataaccgaataaccaggtaccctgatatgaactcggaaa

SEQ ID NO: 376410 - DNA, 1364 bp, Homo sapiens
aacaaagtcggagtttgtggattgggggaagggcggggtctaacctcaggtcaggcgccgtgcaaggtacatcttggcacccggaagaggcccagtacagttgcccccgaggtgacccgacctcccctaccaattgaggcgcccttgttgccaggcttgcggcgggggagcggcgggggagcgacggggatgcgctcattggtcaaggaaggggcgcctgttactagaggcgagaaccggagcccattggtcggaacacctcacaatggaccccagcggcgcgcaaaatccttatgattggtttgctggctgcctcgggagaccctgttgccaggatacttggcgttcccgacccgacccccgttccccattggctgtcagggcaaaagccgccatctaatgaggagcgaggtgcggtgccccgaagcgctcgcttcccgcggtgcgatctagtcctgcagtaggcggcccggggccacaccgcggccgcccaagccagtgcaaggcccaggggcctgacatcgctcccagcgctcgaggaccgaggcctgctgtggaggacaccgtggtcccgagggaggccctggagcccagtgttccccttatggtgtctttagagatctccctagaggcagctgaagaggagaagtcccgcatcagcctcatcccaccagaagaacggtgggcctggcctgaggtggaggcgccagaagctcctgcattgcccgtggtgcctgaactccctgaggtgcccatggagatgcctttggtgctgcccccagagctcgagctgctctcactggaagcagtgcacagggcagtggcactggagctgcaggctaacagggagcccgacttcagcagcctggtgtcacctctcagcccccgcaggatggctgcccgggtcttctacctgctcctggtgctctcagcgcaacagattcttcacgtgaaacaagaaaagccatatggtcgcctcctgatccagccggggcccagattccactgaggttagagtccatttacaaagctgccaggaaaccggccacttctagtaaaccacgtcgtgcctcactgggtcctgcttacctcatttctgaatgtgcatttccagccttcttgctctcagagctattgttcaagcagaaaacaagctgcttttattacagtaaaaaaaaaaagaaaaagccccggggaacacacactatacggggtggcggaaacaagagggtcatgaactgggcccctgggcacatcacggggttcccggacccacgttttgtggaccaagggggaactctccgcggacccccaaaagggagcgaataaccgaataaccaggtaccctgatatgaactcggaaa

SEQ ID NO: 376411 - DNA, 1042 bp, Homo sapiens
aacaaagtcggagtttgtggattgggggaagggcggggtctaacctcaggtcaggcgccgtgcaaggtacatcttggcacccggaagaggcccagtacagttgcccccgaggtgacccgacctcccctaccaattgaggcgcccttgttgccaggcttgcggcgggggagcggcgggggagcgacggggatgcgctcattggtcaaggaaggggcgcctgttactagaggcgagaaccggagcccattggtcggaacacctcacaatggaccccagcggcgcgcaaaatccttatgattggtttgctggctgcctcgggagaccctgttgccaggatacttggcgttcccgacccgacccccgttccccattggctgtcagggcaaaagccgccatctaatgaggagcgaggtgcggtgccccgaagcgctcgcttcccgcggtgcgatctagtcctgcagtaggcggcccggggccacaccgcggccgcccaagccagtgcaaggcccaggggcctgacatcgctcccagcgctcgaggaccgaggcctgctgtggaggacaccgtgctccctcgggacctgctctggattccggcccggacgtccccttggagctctgcatctccaacctggaacccaacccagaagtctcaagtttgacgcatcacgtggcgtgcggatccactgagggtccacagagaggggcgcccatctcctgcgtctcagttatcctggtaattgtgtatctgcccattgttcgttgcctcattaacttggctttctaggtgcacccaccttgccaccagagaagtccaaatcctgacttctctccaaggtgttgggaattctgtgccctaaagaattccgactcagatccgaacggggatctggtggaatcgagggtgaaagaccagagggacaatgttctactatcccaacgtgcttcagcgccacaccggctgctttgccaccatctggtaagggcggggcccgttggcgcgcgatggcggacgctgcccgggatcccagcctgacagctcc

SEQ ID NO: 376412 - DNA, 249 bp, Homo sapiens
gtaaggctgggaaccctcaaaggtggggcgggctgagcagctgtctgctaagctggctgtctacctcgtcctccctgcccacagaggacatccagcacatcttggagcgcctccaccgtgcccagctgcagatccgaatagatatggagactgagctgtgagtgtgccctgggcctttgatggaacacctgctagcttggcctcagcctggctcagcctcagtccttcacggcctacattctctcccag

SEQ ID NO: 376413 - DNA, 354 bp, Homo sapiens
ccatgatggagaccctagaagatgctccagatcccttttttgggatgatgtctgtggatcccagacttcctagtcctttcgatatccctcaggtagggctcattccccaagactcgtgaattggcaatgcagaaggggagtgctgtccctgtgtcactctgacattggggttggggaaggaagcttaccacagctctctcccacaggagatggtgcagggggactgccaaggtggacccatccaggcgaagccccctgtacttacctactcagggccaatctgatcagacggtttccccactggaggcagctcttgtccccacttgtctccacactgttttcactgccaaggcc

SEQ ID NO: 376414 - DNA, 411 bp, Homo sapiens
ttgccaccatctggtaagggcggggcccgttggcgcgcgatggcggacgctgcccgggatcccagcctgacagctccccctccatccccattctcccaccttccccacccacttcaggctggcggcgactcgcggcagccggttggtgaagcgcgaatacctgagggtgaatgtggtgaaaacctggtaaggcccagaaaagggaaggagggcctggtgcggggggtgagttaggggatggggtggccaagactgtgggcccactcctggacgcagcggtaatcagggcgcattgttccccagcgaggaaatcctcaattacgtgctggtacgagtgcaacccccgcagcccggcctgccgcggccccgcttctccctctatctctcagcccaacttcagatcggtgtgat

SEQ ID NO: 376415 - DNA, 316 bp, Homo sapiens
ccaggggcttttctgggagtacctggatactgctgcagacaagggctttatatcccaacttgctaaagggaggaccctgcagtttcttgccctggcatctgcaaggggtaaggggcttatgggacagagccccttgggtgttgttgcagaggtgacccccccggaggagctgcgtctgccagccccacccagcccagaggtgagtagcctcccttctaatcctcctcctcctcctctttgccctcccccacaaggactgcctccccaagcccagggccactgctagcttacaggggtccttaatgcagatgataaa

SEQ ID NO: 376416 - DNA, 292 bp, Homo sapiens
taactgcaccacctgtttactgcatcgccccagtgccagggtctgcctgaccagctggctgccctctcctgctatgagagccaacagcacaggctcactggccttgtgccttctgaggcccaagtcccagatgcttggggtcttagttctacttctcccatccccagggtcccgagggaggccctggagcccagtgttccccttatggtgtctttaggtaagcacctagagaagaggcgcagtgggaccacaccctaaccactgtcccaggaaactagtatcccaactgctg

SEQ ID NO: 376417 - DNA, 424 bp, Homo sapiens
gcggccgcccaagccagtgcaaggcccaggggcctgacatcgctcccagcgctcgaggaccgaggcctgctgtggaggacaccgtgctccctcgggacctgctctggattccggcccggacgtccccttggagctctgcatctccaacctggaacccaacccagaagtctcaagtttgacgcatcacgtggcgtgcggatccactgagggtccacagagaggggcgcccatctcctgcgtctcagttatcctggtaattgtgtatctgcccattgttcgttgcctcattaacttggctttctaggtgcacccaccttgccaccagagaagtccaaatcctgacttctctccaaggtgttgggaattctgtgccctaaagaattccgactcagatccgaacggggatctggtggaatcgagggtg

SEQ ID NO: 376418 - DNA, 886 bp, Homo sapiens
  misc_feature (46)..(46): n is a, c, g, or t
aaaccgaaaattatcggcggcaaggatgctgaagtgccccttgggngtgtttaaaaattcggccacgagggtctgaggagctggttgcctgacaggctggaacctggggccctactcatgaggtgacccccccggaggagctgcgtctgccagcccaccaccaaaggagcccgtccactcctcgggtcgtcggttactgttctgggacaaggagactcagatctccccggagaaattccaggaacaactgcaaaccagagcccactgctgggaatgtcctatggtgcagccgcccgagaggaccatcagaggccctgcggagttgttcagaaccccaactctctctggctggctaccccctgaactactgggtctctggacccattgtgcccagccacccccaaaagccctcaggcgagagctgcctgaggaggcagccgctgaggaggaaaggagaaagattgaagttccaagtgagattgaggtcccgagggaggccctggagcccagtgttccccttatggtgtctttagagatctccctagaggcagctgaagaggagaagtcccgcatcagcctcatcccaccagaagaacggtgggcctggcctgacggtcggaggacgcgccaggaagctccttgcaattagcccaggtggatgccatagaaagtcccattgaaggctgcccatgggacgattcgcctctttggcgggcttgccccccaagagactcagaagttgatctcaacttggaagcagctgcaccatgggcgaggtgccattggagcttcgaggctaaacggaggagcccgattttacggaggactggtgtcacgctctcagcccccgcgagcatgcgacgcccgggtctccaacccaggcgca

SEQ ID NO: 376419 - DNA, 3152 bp, Homo sapiens
aacaaagtcggagtttgtggattgggggaagggcggggtctaacctcaggtcaggcgccgtgcaaggtacatcttggcacccggaagaggcccagtacagttgcccccgaggtgacccgacctcccctaccaattgaggcgcccttgttgccaggcttgcggcgggggagcggcgggggagcgacggggatgcgctcattggtcaaggaaggggcgcctgttactagaggcgagaaccggagcccattggtcggaacacctcacaatggaccccagcggcgcgcaaaatccttatgattggtttgctggctgcctcgggagaccctgttgccaggatacttggcgttcccgacccgacccccgttccccattggctgtcagggcaaaagccgccatctaatgaggagcgaggtgcggtgccccgaagcgctcgcttcccgcggtgcgatctagtcctgcagtaggcggcccggggccacaccgcggccgcccaagccagtgcaaggcccaggggcctgacatcgctcccagcgctcgaggaccgaggcctgctgtggaggacaccgtgctccctcgggacctgctctggattccggcccggacgtccccttggagctctgcatctccaacctggaacccaacccagaagtctcaagtttgacgcatcacgtggcgtgcggatccactgagggtccacagagaggggcgcccatctcctgcgtctcagttatcctggtgttgggaattctgtgccctaaagaattccgactcagatccgaacggggatctggtggaatcgagggtgaaagaccagagggacaatgttctactatcccaacgtgcttcagcgccacaccggctgctttgccaccatctggctggcggcgactcgcggcagccggttggtgaagcgcgaatacctgagggtgaatgtggtgaaaacctgcgaggaaatcctcaattacgtgctggtacgagtgcaacccccgcagcccggcctgccgcggccccgcttctccctctatctctcagcccaacttcagatcggtgtgatccgcgtctattctcaacaatgccagtacctcgtggaggacatccagcacatcttggagcgcctccaccgtgcccagctgcagatccgaatagatatggagactgagctacccagcctgctgcttcctaaccacctggccatgatggagaccctagaagatgctccagatcccttttttgggatgatgtctgtggatcccagacttcctagtcctttcgatatccctcagattcgacacctcttagaggctgcaatcccagagagagttgaagagatccctcctgaagttcctacagagcccagggagccagagaggattccggtcactgtgctgccacctgaggccatcacgatcctggaggcagagcccatacggatgctggagattgagggtgaacgggagctcccagaggtcagccgccgagaactggacctgctgatcgcagaggaagaagaagctatcttgttagaaatcccgcggctcccacctccagctcctgcagaggtggaaggaataggagaggcactgggtcctgaggagctgaggctgacaggctgggaacctggggccctactcatggaggtgacccccccggaggagctgcgtctgccagccccacccagcccagaggtgagtagcctcccttctaatcctcctcctcctcctctttgccctcccccacaaggactgcctccccaagcccagggccactgctagcttacaggggtccttaatgcagatgataaaagatgcccctttctacgccccatcgtatctggcctacgcttcccagatgggtacccttatgcaaggtatgagctgctcaagtgcatggagaccccgcacaagccctctccaggttcctctaggggcgggtgtggggtcctgttagcagtccaccagaatgacaggaaaaggagtaatgggcagccttgcccctacctgccctccccactcaacagaggaggcccccagtccccccacctcctcgccgccgccgtcgtcgccggttactgttctgggacaaggagactcagatctccccggagaaattccaggaacaactgcaaaccagagcccactgctgggaatgtcctatggtgcagccgcccgagaggaccatcagaggccctgcggagttgttcagaaccccaactctctctggctggctaccccctgaactactgggtctctggacccattgtgcccagccacccccaaaagccctcaggcgagagctgcctgaggaggcagccgctgaggaggaaaggagaaagattgaagttccaagtgagattgaggtcccgagggaggccctggagcccagtgttccccttatggtgtctttagagatctccctagaggcagctgaagaggagaagtcccgcatcagcctcatcccaccagaagaacggtgggcctggcctgaggtggaggcgccagaagctcctgcattgcccgtggtgcctgaactccctgaggtgcccatggagatgcctttggtgctgcccccagagctcgagctgctctcactggaagcagtgcacagggcagtggcactggagctgcaggctaacagggagcccgacttcagcagcctggtgtcacctctcagcccccgcaggatggctgcccgggtcttctacctgctcctggtgctctcagcgcaacagattcttcacgtgaaacaagaaaagccatatggtcgcctcctgatccagccggggcccagattccactgaggttagagtccatttacaaagctgccaggaaaccggccacttctagtaaaccacgtcgtgcctcactgggtcctgcttacctcatttctgaatgtgcatttccagccttcttgctctcagagctattgttcaagcagaaaacaagctgcttttattacagtaaaaaaaaaaagaaaaagccccggggaacacacactatacggggtggcggaaacaagagggtcatgaactgggcccctgggcacatcacggggttcccggacccacgttttgtggaccaagggggaactctccgcggacccccaaaagggagcgaataaccgaataaccaggtaccctgatatgaactcggaaa

SEQ ID NO: 376420 - DNA, 3233 bp, Homo sapiens
aacaaagtcggagtttgtggattgggggaagggcggggtctaacctcaggtcaggcgccgtgcaaggtacatcttggcacccggaagaggcccagtacagttgcccccgaggtgacccgacctcccctaccaattgaggcgcccttgttgccaggcttgcggcgggggagcggcgggggagcgacggggatgcgctcattggtcaaggaaggggcgcctgttactagaggcgagaaccggagcccattggtcggaacacctcacaatggaccccagcggcgcgcaaaatccttatgattggtttgctggctgcctcgggagaccctgttgccaggatacttggcgttcccgacccgacccccgttccccattggctgtcagggcaaaagccgccatctaatgaggagcgaggtgcggtgccccgaagcgctcgcttcccgcggtgcgatctagtcctgcagtaggcggcccggggccacaccgcggccgcccaagccagtgcaaggcccaggggcctgacatcgctcccagcgctcgaggaccgaggcctgctgtggaggacaccgtgctccctcgggacctgctctggattccggcccggacgtccccttggagctctgcatctccaacctggaacccaacccagaagtctcaagtttgacgcatcacgtggcgtgcggatccactgagggtccacagagaggggcgcccatctcctgcgtctcagttatcctggtgttgggaattctgtgccctaaagaattccgactcagatccgaacggggatctggtggaatcgagggtgaaagaccagagggacaatgttctactatcccaacgtgcttcagcgccacaccggctgctttgccaccatctggctggcggcgactcgcggcagccggttggtgaagcgcgaatacctgagggtgaatgtggtgaaaacctgcgaggaaatcctcaattacgtgctggtacgagtgcaacccccgcagcccggcctgccgcggccccgcttctccctctatctctcagcccaacttcagatcggtgtgatccgcgtctattctcaacaatgccagtacctcgtggaggacatccagcacatcttggagcgcctccaccgtgcccagctgcagatccgaatagatatggagactgagctacccagcctgctgcttcctaaccacctggccatgatggagaccctagaagatgctccagatcccttttttgggatgatgtctgtggatcccagacttcctagtcctttcgatatccctcagattcgacacctcttagaggctgcaatcccagagagagttgaagagatccctcctgaagttcctacagagcccagggagccagagaggattccggtcactgtgctgccacctgaggccatcacgatcctggaggcagagcccatacggatgctggagattgagggtgaacgggagctcccagaggtcagccgccgagaactggacctgctgatcgcagaggaagaagaagctatcttgttagaaatcccgcggctcccacctccagctcctgcagagtaagggcaagaactcctagaccaggtagggtgtcagtgctgggaagggtctcctcatttctcttgcccatttcccctcagggtggaaggaataggagaggcactgggtcctgaggagctgaggctgacaggctgggaacctggggccctactcatggaggtgacccccccggaggagctgcgtctgccagccccacccagcccagaggtgagtagcctcccttctaatcctcctcctcctcctctttgccctcccccacaaggactgcctccccaagcccagggccactgctagcttacaggggtccttaatgcagatgataaaagatgcccctttctacgccccatcgtatctggcctacgcttcccagatgggtacccttatgcaaggtatgagctgctcaagtgcatggagaccccgcacaagccctctccaggttcctctaggggcgggtgtggggtcctgttagcagtccaccagaatgacaggaaaaggagtaatgggcagccttgcccctacctgccctccccactcaacagaggaggcccccagtccccccacctcctcgccgccgccgtcgtcgccggttactgttctgggacaaggagactcagatctccccggagaaattccaggaacaactgcaaaccagagcccactgctgggaatgtcctatggtgcagccgcccgagaggaccatcagaggccctgcggagttgttcagaaccccaactctctctggctggctaccccctgaactactgggtctctggacccattgtgcccagccacccccaaaagccctcaggcgagagctgcctgaggaggcagccgctgaggaggaaaggagaaagattgaagttccaagtgagattgaggtcccgagggaggccctggagcccagtgttccccttatggtgtctttagagatctccctagaggcagctgaagaggagaagtcccgcatcagcctcatcccaccagaagaacggtgggcctggcctgaggtggaggcgccagaagctcctgcattgcccgtggtgcctgaactccctgaggtgcccatggagatgcctttggtgctgcccccagagctcgagctgctctcactggaagcagtgcacagggcagtggcactggagctgcaggctaacagggagcccgacttcagcagcctggtgtcacctctcagcccccgcaggatggctgcccgggtcttctacctgctcctggtgctctcagcgcaacagattcttcacgtgaaacaagaaaagccatatggtcgcctcctgatccagccggggcccagattccactgaggttagagtccatttacaaagctgccaggaaaccggccacttctagtaaaccacgtcgtgcctcactgggtcctgcttacctcatttctgaatgtgcatttccagccttcttgctctcagagctattgttcaagcagaaaacaagctgcttttattacagtaaaaaaaaaaagaaaaagccccggggaacacacactatacggggtggcggaaacaagagggtcatgaactgggcccctgggcacatcacggggttcccggacccacgttttgtggaccaagggggaactctccgcggacccccaaaagggagcgaataaccgaataaccaggtaccctgatatgaactcggaaa

SEQ ID NO: 376421 - DNA, 2795 bp, Homo sapiens
aacaaagtcggagtttgtggattgggggaagggcggggtctaacctcaggtcaggcgccgtgcaaggtacatcttggcacccggaagaggcccagtacagttgcccccgaggtgacccgacctcccctaccaattgaggcgcccttgttgccaggcttgcggcgggggagcggcgggggagcgacggggatgcgctcattggtcaaggaaggggcgcctgttactagaggcgagaaccggagcccattggtcggaacacctcacaatggaccccagcggcgcgcaaaatccttatgattggtttgctggctgcctcgggagaccctgttgccaggatacttggcgttcccgacccgacccccgttccccattggctgtcagggcaaaagccgccatctaatgaggagcgaggtgcggtgccccgaagcgctcgcttcccgcggtgcgatctagtcctgcagtaggcggcccggggccacaccgcggccgcccaagccagtgcaaggcccaggggcctgacatcgctcccagcgctcgaggaccgaggcctgctgtggaggacaccgtgctccctcgggacctgctctggattccggcccggacgtccccttggagctctgcatctccaacctggaacccaacccagaagtctcaagtttgacgcatcacgtggcgtgcggatccactgagggtccacagagaggggcgcccatctcctgcgtctcagttatcctgaattccgactcagatccgaacggggatctggtggaatcgagggtgaaagaccagagggacaatgttctactatcccaacgtgcttcagcgccacaccggctgctttgccaccatctggctggcggcgactcgcggcagccggttggtgaagcgcgaatacctgagggtgaatgtggtgaaaacctgcgaggaaatcctcaattacgtgctggtacgagtgcaacccccgcagcccggcctgccgcggccccgcttctccctctatctctcagcccaacttcagatcggtgtgatccgcgtctattctcaacaatgccagtacctcgtggaggacatccagcacatcttggagcgcctccaccgtgcccagctgcagatccgaatagatatggagactgagctacccagcctgctgcttcctaaccacctggccatgatggagaccctagaagatgctccagatcccttttttgggatgatgtctgtggatcccagacttcctagtcctttcgatatccctcagattcgacacctcttagaggctgcaatcccagagagagttgaagagatccctcctgaagttcctacagagcccagggagccagagaggattccggtcactgtgctgccacctgaggccatcacgatcctggaggcagagcccatacggatgctggagattgagggtgaacgggagctcccagaggtcagccgccgagaactggacctgctgatcgcagaggaagaagaagctatcttgttagaaatcccgcggctcccacctccagctcctgcagaggtggaaggaataggagaggcactgggtcctgaggagctgaggctgacaggctgggaacctggggccctactcatggaggtgacccccccggaggagctgcgtctgccagccccacccagcccagagaggaggcccccagtccccccacctcctcgccgccgccgtcgtcgccggttactgttctgggacaaggagactcagatctccccggagaaattccaggaacaactgcaaaccagagcccactgctgggaatgtcctatggtgcagccgcccgagaggaccatcagaggccctgcggagttgttcagaaccccaactctctctggctggctaccccctgaactactgggtctctggacccattgtgcccagccacccccaaaagccctcaggcgagagctgcctgaggaggcagccgctgaggaggaaaggagaaagattgaagttccaagtgagattgaggtcccgagggaggccctggagcccagtgttccccttatggtgtctttagagatctccctagaggcagctgaagaggagaagtcccgcatcagcctcatcccaccagaagaacggtgggcctggcctgaggtggaggcgccagaagctcctgcattgcccgtggtgcctgaactccctgaggtgcccatggagatgcctttggtgctgcccccagagctcgagctgctctcactggaagcagtgcacagggcagtggcactggagctgcaggctaacagggagcccgacttcagcagcctggtgtcacctctcagcccccgcaggatggctgcccgggtcttctacctgctcctggtgctctcagcgcaacagattcttcacgtgaaacaagaaaagccatatggtcgcctcctgatccagccggggcccagattccactgaggttagagtccatttacaaagctgccaggaaaccggccacttctagtaaaccacgtcgtgcctcactgggtcctgcttacctcatttctgaatgtgcatttccagccttcttgctctcagagctattgttcaagcagaaaacaagctgcttttattacagtaaaaaaaaaaagaaaaagccccggggaacacacactatacggggtggcggaaacaagagggtcatgaactgggcccctgggcacatcacggggttcccggacccacgttttgtggaccaagggggaactctccgcggacccccaaaagggagcgaataaccgaataaccaggtaccctgatatgaactcggaaa

SEQ ID NO: 376422 - DNA, 1728 bp, Homo sapiens
  misc_feature (1715)..(1715): n is a, c, g, or t
aacaaagtcggagtttgtggattgggggaagggcggggtctaacctcaggtcaggcgccgtgcaaggtacatcttggcacccggaagaggcccagtacagttgcccccgaggtgacccgacctcccctaccaattgaggcgcccttgttgccaggcttgcggcgggggagcggcgggggagcgacggggatgcgctcattggtcaaggaaggggcgcctgttactagaggcgagaaccggagcccattggtcggaacacctcacaatggaccccagcggcgcgcaaaatccttatgattggtttgctggctgcctcgggagaccctgttgccaggatacttggcgttcccgacccgacccccgttccccattggctgtcagggcaaaagccgccatctaatgaggagcgaggtgcggtgccccgaagcgctcgcttcccgcggtgcgatctagtcctgcagtaggcggcccggggccacaccgcggccgcccaagccagtgcaaggcccaggggcctgacatcgctcccagcgctcgaggaccgaggcctgctgtggaggacaccgtgctccctcgggacctgctctggattccggcccggacgtccccttggagctctgcatctccaacctggaacccaacccagaagtctcaagtttgacgcatcacgtggcgtgcggatccactgagggtccacagagaggggcgcccatctcctgcgtctcagttatcctggtgttgggaattctgtgccctaaagaattccgactcagatccgaacggggatctggtggaatcgagggtgaaagaccagagggacaatgttctactatcccaacgtgcttcagcgccacaccggctgctttgccaccatctggctggcggcgactcgcggcagccggttggtgaagcgcgaatacctgagggtgaatgtggtgaaaacctgcgaggaaatcctcaattacgtgctggtacgagtgcaacccccgcagcccggcctgccgcggccccgcttctccctctatctctcagcccaacttcagatcggtgtgatccgcgtctattctcaacaatgccagtacctcgtggaggacatccagcacatcttggagcgcctccaccgtgcccagctgcagatccgaatagatatggagactgagctacccagcctgctgcttcctaaccacctggccatgatggagaccctagaagatgctccagatcccttttttgggatgatgtctgtggatcccagacttcctagtcctttcgatatccctcagattcgacacctcttagaggctgcaatcccagagagagttgaagagatccctcctgaagttcctacagagcccagggagccagagaggattccggtcactgtgctgccacctgaggccatcacgatcctggaggcagagcccatacggatgctggagattgagggtgaacgggagctcccagaggtcagccgccgagaactggacctgctgatcgcagaggaagaagaagctatcttgttagaaacatcacgcggctccactgccggctactcagaggtgtaagaataggagacgctgatgcgatcatgaggcacgtgagcatgtcagactgggaaacatcgggaccataattatggagtagactcacatcggatgaattcgaatgggacagctgaagacaagagaagaaggtgagtatcataccttttaatntcggtgcctcctg

SEQ ID NO: 376423 - DNA, 821 bp, Homo sapiens
gctgggatgggtatgccccttgtcactgtcacagctgccaccttccctactctctcatgtcctcctagggcctggcctgaggtggaggcgccagaagctcctgcattgcccgtggtgcctgaactccctgaggtgcccatggagatgcctttggtgctgcccccagagctcgagctgctctcactggaagcagtgcacaggtaccagggaggtggcaccttgatggggtggacccgggctgaagcctctgctaatggttcttgatccctatagggcagtggcactggagctgcaggctaacagggagcccgacttcagcagcctggtgtcacctctcagcccccgcaggatggctgcccgggtcttctacctgctcctggtgctctcagcgcaacagattcttcacgtgaaacaagaaaagccatatggtcgcctcctgatccagccggggcccagattccactgaggttagagtccatttacaaagctgccaggaaaccggccacttctagtaaaccacgtcgtgcctcactgggtcctgcttacctcatttctgaatgtgcatttccagccttcttgctctcagagctattgttcaagcagaaaacaagctgcttttattacagtaaaaaaaaaaagaaaaagccccggggaacacacactatacggggtggcggaaacaagagggtcatgaactgggcccctgggcacatcacggggttcccggacccacgttttgtggaccaagggggaactctccgcggacccccaaaagggagcgaataaccgaataaccaggtaccctgatatgaactcggaaa

SEQ ID NO: 376424 - DNA, 512 bp, Homo sapiens
tcttgcttctgccctttccattgccatccctgtttctcaaggggtgagttcagatctgctattcccgttttccatgggaaccagtgactgacaggacctgttgctgacgtgctgcggagacatacatggtgctcacaaaggggcacccttctttttttttctcttttttttttttttttttttttgagacagggcctcactccaatttgcccaggctggagtacagtagcacaattttggcttactgcagcctcgacctcctgggctcaggtgattttcccacctcagccttccaagtagctgggaccacaggtgtatgccaccacacctggctactttttgtgtgtgtgtattgtagagacgggggtttcaccatgttgcctagactggtcttgaactcctgagctcaggtgatccacctgccttggcttcccgaagagctgggattacaggcatgagccaccatgcccggcccagagggcacccttctaacaaccccactgcccgtctgc

SEQ ID NO: 376425 - DNA, 661 bp, Homo sapiens
ggagacagtctggggtgtctggagaatcctcccccacttctgcttaccccaggtcgctgtgggagcaggtgtctcaggaaatggggcctgggtcccacccaaggcctcgggtctgagttagatgtctgtatgtttgttgttgcccctgcaacaaagtaccacagattgagtagtttaagccacatgcatgttatctcacagttcggggggtcgggaatctaaactgggttggcagggctgatgccttctggaggcaagggagctgtttcccagcgtttccagctcctagaggctgctagctagtggccctttcctttgtcttcaaagccggcagcacagccttttctaacctctcccactccaggtcatttcacatcaactctttctgcctccctcttgtaagtgtgataccctaccttgttttaacctgaattgactgtcccttagctgagagagccagacacactccattttggctccttcacttgcagccccttacccaccccccttcctcaaggacttaacttgtgcaagctgactcccagcacatcaaagaatgcaattaatggataagatactgtgggcaagctatatccgcagttcccagggaattttgcccagttggatagttacccttaaggcccccacatttgtgtccggt

SEQ ID NO: 376426 - DNA, 651 bp, Homo sapiens
gatctgtacatgtctcccaaaaaggagcacagagacattgtaaggagagactctatgtccttgagaagcatttctgtgtaatggcttatttcctctgtggtcttcttttaggtgatctctctgtgggtttaaattaaagtgtaaataatctttggccgggcgcggtggctcacgcctgtaatcccagcactttgggaggcagaggcgggcggatcatgaggtcaggagatcgagaccgtcctggctaacacgatgaaaccccgtctctactaaaaatacaaaaaattagccgggcgtggtggcgggcgcctgtagtcccagctactcgggaggctgaggcaggagaatggcgtgaacctgggaggtggagcctgcagtgagccgagatcgcgccactgcactccagcctgggcgacagagcgagactccgtctcaaaaaaaaaaaacaaaaagtaaataatctttgtgctggtatacctctgttaggctgaatttggttgtgcatagaattacacttgatttttgtagtacaaagttactagttttactcagattagtagagcatagcttttttccaatatggctggaaatacttttaagtgtgcatttagttttgaaagattttatttcttatacatattttatcttcta

SEQ ID NO: 376427 - DNA, 308 bp, Homo sapiens
agccatgacttctacttcaaactgcttgctctgttgatccaagtggagaacctctttccatatcagaagccagtcttggccatccccctacctaacctcactcagcctttaataagcaggtaatggcatctgcttccagggaggaagatgctccgtgatgactggtctttaaggacagaagagtgggccaacgtgttgatgttttagaccatttgtgttactatcaaggcatacctgaggctgggtaatttataaagtaaataggttcaattggctcgtgattctgccgactggaagattaggcatgt

SEQ ID NO: 376428 - DNA, 4220 bp, Homo sapiens
gggtcctgtagggatcccagctggggaaggtgcaggggcctgggagactgcctctccgaagcggtgaaaccctcacccttccgtccctcccagccaccctccctaaaacttcccctgacagagggtggcagccccaggctctttgcataatcctgtggcttcgctgtcttcacccagcaccagcggacagggaagggcagagaaggccaccatggcgacactcctctcccatccgcagcagcgccctcccttcttgcgccaggccatcaagataaggcgccgcagagtcagagatctacaggatcccccgccccaaatggccccggagatccagcctccatcccaccacttctcccccgagcagcgggccctgctctacgaggacgcactctacactgtcttgcaccgcctgggtcatcctgagcccaaccatgtgacggaggcctctgagctgctgcgatacctgcaggaggccttccacgtggagcccgaggagcaccagcagacactgcagcgggtcagggagcttgagaagccaatattttgtctgaaggcaacagtgaaacaggccaagggcattctgggcaaagatgtcagtgggttcagcgacccctactgcctgctgggcattgagcagggggtaggtgtgccagggggcagccccgggtcccggcatcggcagaaggctgtggtgaggcacaccatccccgaggaggagacccaccgcacgcaggtcatcacccagacactcaaccccgtctgggacgagaccttcatcctggagtttgaggacatcaccaatgcgagctttcatctggacatgtgggacctggacactgtggagtctgtccgacagaagcttggggagctcacggatctgcatgggcttcgcaggatctttaaagaggcccggaaggacaaaggccaggacgactttctggggaacgtggttctgaggctgcaggacctgcgctgccgagaggaccagtggtaccccctggaaccccgcactgagacctacccagaccgaggccagtgccacctccagttccaactcatccataagcggagagccacttcggccagccgctcgcagccgagctacaccgtgcacctccacctcctgcagcagcttgtgtcccacgaggtcacccagcacgaggcgggaagcacctcctgggacgggtcgctgagtccccaggctgccaccgtcctctttctgcacgccacacagaaggacctatccgacttccaccagtccatggcgcagtggctggcctacagccgcctctaccagagcctggagttccccagcagctgcctcctgcaccccatcaccagcatcgagtaccagtggatccagggtcggctcaaggcagaacagcaggaggagctggccgcctcattcagctccctgctgacctacggcctctccctcatccggaggttccgctctgtcttccccctctctgtctcggactccccagcccggctgcagtctcttctcagggtcctggtacagatgtgcaagatgaaggcctttggagaactgtgccccaacaccgccccattgccccagctggtgactgaggccctgcagactggcaccactgaatggttccacctgaagcagcagcaccatcaacccatggtgcagggcatcccggaggcaggcaaggccttgctgggcctggtacaggatgtcattggcgacctgcaccagtgccagcgcacatgggacaagatcttccacaataccctcaagatccacctcttctccatggctttccgggagctgcagtggctggtggccaagcgggtgcaggaccacacgacggttgtgggtgatgtagtgtccccagagatgggcgagagtctgttccagctctacatcagcctcaaggagctctgccagctgcgcatgagctcctcagagagggatggagtcctggccctggataatttccaccgctggttccagccggccatcccctcctggctgcagaagacgtacaacgaggccctggcgcgggtgcagcgcgctgtgcagatggatgagctggtgcccctgggtgaactgaccaagcacagcacatcagcggtggatctatccacctgctttgcccagatcagccacactgcccggcagctggactggccagacccagaggaggccttcatgattaccgtcaagtttgtggaggacacctgtcgcctggccctggtgtactgcagccttataaaggcccgggcccgcgagctctcttcaggccagaaggaccaaggccaggcagccaacatgctgtgtgtggtggtgaatgacatggagcagctgcggctggtgatcggcaagttgcccgcccagctggcatgggaggccctggagcagcgggtaggggccgtgctggagcaggggcagctgcagaacacgctgcatgcccagctgcagagcgcgctggccgggctgggccatgagatccgcactggcgtccgcaccctggccgagcagttggaggtgggcatcgccaagcacatccagaaactggtgggcgtcagggagtctgtcctgcctgaggatgccattctgcccctgatgaagttcctggaggtggagctttgctacatgaacaccaacttggtgcaggagaacttcagcagcctcctgaccctgctctggacccacacactcacagtgctggtggaggcggccgctcccagcgcagctcatccctggcttccaacaggctgaagattgccctgcagaacctggagatctgcttccacgctgagggctgtggcctgccacccaaggccctgcacactgccaccttccaggctctgcagagggacctggagctgcaggcggcctccagccgggaactcatccggaagtacttctgcagccgaatccagcagcaggcagaaaccacctctgaggagctgggggctgtgacagtcaaggcctcctaccgcgcctctgagcagaagctgcgtgtggagctgctcagcgcctccagcctgctgcccctggactccaatggctccagcgacccctttgtccagctgaccttggagcccaggcatgagttccctgagctggccgcccgggagacccagaagcacaagaaggaccttcacccattgtttgatgagacctttgaattcctggtgcctgctgagccgtgccgcaaggctggggcatgcctcctgctcaccgtgctggactacgacacgctgggggccgacgacctggaaggcgaggccttcctgccgctgcgtgaggtgcccgggctgagtggctctgaggagcctggtgaggtgcctcagacccgcctgcccctcacgtaccccgcacccaacggggacccaatcctgcagctgctggagggccggaagggtgaccgagaagcccaggtctttgtgaggctgcggcggcaccgggccaagcaggcctcccagcatgccttgcggccggcaccgtagccgtagaggtttgcggtggggctgggtccccggtggggacttgcaagggctttcctgtagggtctggggcttccccgccacatcgcggccctccagcctggcctaacacttggggagccccagcatgcggagtgcccagagtgcagacctcccctgcctcccatggtgatgggggctcagcagcgacatctctactcccgcctccctgcctccagccctggctgcaatgtctctaccacatcccagcaccagggggagcaaaccctgcccctgcccgcctctcagaaaagctgctgtggtgggcaggggattgggccatctgtctcctggccctggcccatctgcctcctggccttcctgttccagccactggggtgggggccaggttcactgggaccagggctacaggcacagagtctcctggaaaagggagaggggaccctgccaaagatgaggctccagctgccctggggggagggtggtggccattactagagggggcctgggtcctctccccaggggctgccagcatccaggccaggaagcctggagccaagaaccttctggctctgagggagcaagagctggcaggcggcagggctggcacagacagacggaagcagaaaggacagtttggctgctgtgtctgctgcgcacgccccctccccggacagcacctgccacctagaaactttcttagcaaaaaaattaataaaaacaaatccattgtcctctta

SEQ ID NO: 376429 - DNA, 6213 bp, Homo sapiens
  misc_feature (1293)..(1293): n is a, c, g, or t
  misc_feature (3275)..(3276): n is a, c, g, or t
  misc_feature (3349)..(3349): n is a, c, g, or t
  misc_feature (3365)..(3365): n is a, c, g, or t
  misc_feature (3410)..(3410): n is a, c, g, or t
gggtcctgtagggatcccagctggggaaggtgcaggggcctgggagactgcctctccgaagcggtgaaaccctcacccttccgtccctcccagccaccctccctaaaacttcccctgacagagggtggcagccccaggctctttgcataatcctgtggcttcgctgtcttcacccagcaccagcggacagggaagggcagagaaggccaccatggcgacactcctctcccatccgcagcagcgccctcccttcttgcgccaggccatcaagataaggcgccgcagagtcagagatctacaggatcccccgccccaaatggccccggagatccagcctccatcccaccacttctcccccgagcagcgggccctgctctacgaggacgcactctacactgtcttgcaccgcctgggtcatcctgagcccaaccatgtgacggaggcctctgagctgctgcgatacctgcaggaggccttccacgtggagcccgaggagcaccagcagacactgcagcgggtcagggagcttgagaagccaatattttgtctgaaggcaacagtgaaacaggccaagggcattctgggcaaagatgtcagtgggttcagcgacccctactgcctgctgggcattgagcagggggtaggtgtgccagggggcagccccgggtcccggcatcggcagaaggctgtggtgaggcacaccatccccgaggaggagacccaccgcacgcaggtcatcacccagacactcaaccccgtctgggacgagaccttcatcctggagtttgaggacatcaccaatgcgagctttcatctggacatgtgggacctggacactgtggagtctgtccgacagaagcttggggagctcacggatctgcatgggcttcgcaggatctttaaagaggcccggaaggacaaaggccaggacgactttctggggaacgtggttctgaggctgcaggacctgcgctgccgagaggaccagtggtaccccctggaaccccgcactgagacctacccagaccgaggccagtgccacctccagttccaactcatccataagcgggtaggtcgggtactgggccagtggccatgcccagctcttgcggcggtctgctgggttgcggggctggctgcacccagtgtgaggccctgtctgctcacagaggcctcattgcagagagccacttcggccagccgctcgcagccgagctacaccgtgcacctccacctcctgcagcagcttgtgtcccacgaggtcacccagcacgagctcctggggctgggcgnagccggggctgcccttcaggtcctgacactcctccacctgctcccctcaggcgggaagcacctcctgggacgggtcgctgagtccccaggctgccaccgtcctctttctgcacgccacacagaaggacctatccgacttccaccagtccatggcgcagtggctggcctacagccgcctctaccagagcctggagttccccagcagctgcctcctgcaccccatcaccagcatcgagtaccagtggatccagggtcggctcaaggcagaacagcaggaggagctggccgcctcattcagctccctgctgacctacggcctctccctcatccggaggttccgctctgtcttccccctctctgtctcggactccccagcccggctgcagtctcttctcagggtcctggtacagatgtgcaagatgaaggcctttggagaactgtgccccaacaccgccccattgccccagctggtgactgaggccctgcagactggcaccactgaatggttccacctgaagcagcagcaccatcaacccatggtgcagggcatcccggaggcaggcaaggccttgctgggcctggtacaggatgtcattggcgacctgcaccagtgccagcgcacatgggacaagatcttccacaataccctcaagatccacctcttctccatggctttccgggagctgcagtggctggtggccaagcgggtgcaggaccacacgacggttgtgggtgatgtagtgtccccagagatgggcgagagtctgttccagctctacatcagcctcaaggagctctgccagctgcgcatgagctcctcagagagggatggagtcctggccctggataatttccaccgctggttccagccggccatcccctcctggctgcagaagacgtacaacgaggccctggcgcgggtgcagcgcgctgtgcagatggatgagctggtgcccctgggtgaactgaccaagcacagcacatcagcggtggatctatccacctgctttgcccagatcagccacactgcccggcagctggactggccagacccagaggaggccttcatgattaccgtcaagtttgtggaggacacctgtcgcctggccctggtgtactgcagccttataaaggcccgggcccgcgagctctcttcaggccagaaggaccaaggccaggcagccaacatgctgtgtgtggtggtgaatgacatggagcagctgcggctggtgatcggcaagttgcccgcccagctggcatgggaggccctggagcagcgggtaggggccgtgctggagcaggggcagctgcagaacacgctgcatgcccagctgcagagcgcgctggccgggctgggccatgagatccgcactggcgtccgcaccctggccgagcagttggaggtgggcatcgccaagcacatccagaaactggtgggcgtcagggagtctgtcctgcctgaggatgccattctgcccctgatgaagttcctggaggtggagctttgctacatgaacaccaacttggtgcaggagaacttcagcaggtctgtagcagcccctgccctgggcgcgctcgcacctccccctctcctcccacggcccctccttcctgggccccagcatccgttctgaggggtgtagcagcccctgccctgggcgcgctcgcacctccccctctcctcccacggcccctctttcctgggcctcagcatccgttctgaggggtggaggtgaatccctttggtgacctcccttatgggtgcaacaggctctgctaaggctcgctgcagggacggggagcttgccacttctcaggcctccccatttcctgctgcctagctctgagtgctttgagttcttccttaggctgagcaaaatctacctgtcctttctcctttagtcccaggcctgtcttcagggcctccctgcctgctcctctgcccccattaggttacaggtggtcctgcccacggtgcaggnngaacttctagctagggtgtcttatagcagggacccagcatgccaggcaacaggcggtggagtccagcacatgngctctggaccacctgngttcagactccggcttcatcactgcttagcagccttgggcaagtncccggtgcagatgagagtagttctggcttctgttgaggattaaatgggtcatgtgaggtgctgagcgtggtgtcagtacaaaggaagtggtcagtgactattagcggtagtgacgatgatgatgacagcgccccacctccctgtggaatctgggccctgaagagccgcagccctcctagagttctgttccacccccagaggtataagccagggcccctcggagcccggccgtttttatttcttaaaccatgtatatatattttttatttttttgagacggagtctcgctctgtcgcccaggctggagtgcagtggcgcgatctcagctcactgcaacctccgctccgggttcaagtgattccctgcctcagcctgctgagtaactgggactacaggtgcatgccattatgcctggctaattgtttttttgagatggagtcttgctctgttgccaggccagagtgcagtggtgcaatcttggctcactgcaacctccgcctcctgggttcaagcgattctcctgcctcagcctcccaagtagctgggactacaggcacgtgccacaatgcctggctaatttttgtatttttagtagagacgggtttcaccatgttggccaggatggtctcaatctcttgacctcctgatccacccacctcgacctcccaaagtgctgggattacaggcgtgagccaccacgcccggcctggttctgtcttaaatcatggttgtcactgggggcctggcctcctccctgtctccagccttgtttgtgcattccgttagtgtgctggggagggttcctcactgaggttgagaggtgtgttggataggactgatcccacctgccccttgctggtcctgtacccaccctctccccagcctcacctggggtgggaggcggagggggaggttgggggtgggaggagctggggtggggctgggtcactgaggccgcccctttctcaagagcgtctttgcttcctcctccgccaccgccctgccgtgctgtgtccgcatccctccggccccgccccagcctcctgaccctgctctggacccacacactcacagtgctggtggaggcggccgctcccagcgcagctcatccctggcttccaacaggctgaagattgccctgcagaacctggagatctgcttccacgctgagggctgtggcctgccacccaaggccctgcacactgccaccttccaggctctgcagagggacctggagctgcaggcggcctccagccgggaactcatccggaagtacttctgcagccgaatccagcagcaggcagaaaccacctctgaggagctgggggctgtgacagtcaaggcctcctaccgcgcctctgagcagaagctgcgtgtggagctgctcagcgcctccagcctgctgcccctggactccaatggctccagcgacccctttgtccagctgaccttggagcccaggcatgagttccctgagctggccgcccgggagacccagaagcacaagaaggaccttcacccattgtttgatgagacctttgaattcctggtgcctgctgagccgtgccgcaaggctggggcatgcctcctgctcaccgtgctggactacgacacgctgggggccgacgacctggaaggcgaggccttcctgccgctgcgtgaggtgcccgggctgagtggctctgaggagcctggtgaggtgcctcagacccgcctgcccctcacgtaccccgcacccaacggggacccaatcctgcagctgctggagggccggaagggtgaccgagaagcccaggtctttgtgaggctgcggcggcaccgggccaagcaggcctcccagcatgccttgcggccggcaccgtagccgtagaggtttgcggtggggctgggtccccggtggggacttgcaagggctttcctgtagggtctggggcttccccgccacatcgcggccctccagcctggcctaacacttggggagccccagcatgcggagtgcccagagtgcagacctcccctgcctcccatggtgatgggggctcagcagcgacatctctactcccgcctccctgcctccagccctggctgcaatgtctctaccacatcccagcaccagggggagcaaaccctgcccctgcccgcctctcagaaaagctgctgtggtgggcaggggattgggccatctgtctcctggccctggcccatctgcctcctggccttcctgttccagccactggggtgggggccaggttcactgggaccagggctacaggcacagagtctcctggaaaagggagaggggaccctgccaaagatgaggctccagctgccctggggggagggtggtggccattactagagggggcctgggtcctctccccaggggctgccagcatccaggccaggaagcctggagccaagaaccttctggctctgagggagcaagagctggcaggcggcagggctggcacagacagacggaagcagaaaggacagtttggctgctgtgtctgctgcgcacgccccctccccggacagcacctgccacctagaaactttcttagcaaaaaaattaataaaaacaaatccattgtcctcttaaaatatgcctttggcctacagtggggcctggaatgcgagccaggccgggtagcttcctccccagccctcaggggactttgagctaccgccaccttggggtagctacaaagcaggggggtaggtgtggaaataactgaggcagaggcagggctagggtgatttttggccgtgggctttgaataaattgctttaccaggcaaac

SEQ ID NO: 376430 - DNA, 5957 bp, Homo sapiens
  misc_feature (1293)..(1293): n is a, c, g, or t
  misc_feature (3275)..(3276): n is a, c, g, or t
  misc_feature (3349)..(3349): n is a, c, g, or t
  misc_feature (3365)..(3365): n is a, c, g, or t
  misc_feature (3410)..(3410): n is a, c, g, or t
gggtcctgtagggatcccagctggggaaggtgcaggggcctgggagactgcctctccgaagcggtgaaaccctcacccttccgtccctcccagccaccctccctaaaacttcccctgacagagggtggcagccccaggctctttgcataatcctgtggcttcgctgtcttcacccagcaccagcggacagggaagggcagagaaggccaccatggcgacactcctctcccatccgcagcagcgccctcccttcttgcgccaggccatcaagataaggcgccgcagagtcagagatctacaggatcccccgccccaaatggccccggagatccagcctccatcccaccacttctcccccgagcagcgggccctgctctacgaggacgcactctacactgtcttgcaccgcctgggtcatcctgagcccaaccatgtgacggaggcctctgagctgctgcgatacctgcaggaggccttccacgtggagcccgaggagcaccagcagacactgcagcgggtcagggagcttgagaagccaatattttgtctgaaggcaacagtgaaacaggccaagggcattctgggcaaagatgtcagtgggttcagcgacccctactgcctgctgggcattgagcagggggtaggtgtgccagggggcagccccgggtcccggcatcggcagaaggctgtggtgaggcacaccatccccgaggaggagacccaccgcacgcaggtcatcacccagacactcaaccccgtctgggacgagaccttcatcctggagtttgaggacatcaccaatgcgagctttcatctggacatgtgggacctggacactgtggagtctgtccgacagaagcttggggagctcacggatctgcatgggcttcgcaggatctttaaagaggcccggaaggacaaaggccaggacgactttctggggaacgtggttctgaggctgcaggacctgcgctgccgagaggaccagtggtaccccctggaaccccgcactgagacctacccagaccgaggccagtgccacctccagttccaactcatccataagcgggtaggtcgggtactgggccagtggccatgcccagctcttgcggcggtctgctgggttgcggggctggctgcacccagtgtgaggccctgtctgctcacagaggcctcattgcagagagccacttcggccagccgctcgcagccgagctacaccgtgcacctccacctcctgcagcagcttgtgtcccacgaggtcacccagcacgagctcctggggctgggcgnagccggggctgcccttcaggtcctgacactcctccacctgctcccctcaggcgggaagcacctcctgggacgggtcgctgagtccccaggctgccaccgtcctctttctgcacgccacacagaaggacctatccgacttccaccagtccatggcgcagtggctggcctacagccgcctctaccagagcctggagttccccagcagctgcctcctgcaccccatcaccagcatcgagtaccagtggatccagggtcggctcaaggcagaacagcaggaggagctggccgcctcattcagctccctgctgacctacggcctctccctcatccggaggttccgctctgtcttccccctctctgtctcggactccccagcccggctgcagtctcttctcagggtcctggtacagatgtgcaagatgaaggcctttggagaactgtgccccaacaccgccccattgccccagctggtgactgaggccctgcagactggcaccactgaatggttccacctgaagcagcagcaccatcaacccatggtgcagggcatcccggaggcaggcaaggccttgctgggcctggtacaggatgtcattggcgacctgcaccagtgccagcgcacatgggacaagatcttccacaataccctcaagatccacctcttctccatggctttccgggagctgcagtggctggtggccaagcgggtgcaggaccacacgacggttgtgggtgatgtagtgtccccagagatgggcgagagtctgttccagctctacatcagcctcaaggagctctgccagctgcgcatgagctcctcagagagggatggagtcctggccctggataatttccaccgctggttccagccggccatcccctcctggctgcagaagacgtacaacgaggccctggcgcgggtgcagcgcgctgtgcagatggatgagctggtgcccctgggtgaactgaccaagcacagcacatcagcggtggatctatccacctgctttgcccagatcagccacactgcccggcagctggactggccagacccagaggaggccttcatgattaccgtcaagtttgtggaggacacctgtcgcctggccctggtgtactgcagccttataaaggcccgggcccgcgagctctcttcaggccagaaggaccaaggccaggcagccaacatgctgtgtgtggtggtgaatgacatggagcagctgcggctggtgatcggcaagttgcccgcccagctggcatgggaggccctggagcagcgggtaggggccgtgctggagcaggggcagctgcagaacacgctgcatgcccagctgcagagcgcgctggccgggctgggccatgagatccgcactggcgtccgcaccctggccgagcagttggaggtgggcatcgccaagcacatccagaaactggtgggcgtcagggagtctgtcctgcctgaggatgccattctgcccctgatgaagttcctggaggtggagctttgctacatgaacaccaacttggtgcaggagaacttcagcaggtctgtagcagcccctgccctgggcgcgctcgcacctccccctctcctcccacggcccctccttcctgggccccagcatccgttctgaggggtgtagcagcccctgccctgggcgcgctcgcacctccccctctcctcccacggcccctctttcctgggcctcagcatccgttctgaggggtggaggtgaatccctttggtgacctcccttatgggtgcaacaggctctgctaaggctcgctgcagggacggggagcttgccacttctcaggcctccccatttcctgctgcctagctctgagtgctttgagttcttccttaggctgagcaaaatctacctgtcctttctcctttagtcccaggcctgtcttcagggcctccctgcctgctcctctgcccccattaggttacaggtggtcctgcccacggtgcaggnngaacttctagctagggtgtcttatagcagggacccagcatgccaggcaacaggcggtggagtccagcacatgngctctggaccacctgngttcagactccggcttcatcactgcttagcagccttgggcaagtncccggtgcagatgagagtagttctggcttctgttgaggattaaatgggtcatgtgaggtgctgagcgtggtgtcagtacaaaggaagtggtcagtgactattagcggtagtgacgatgatgatgacagcgccccacctccctgtggaatctgggccctgaagagccgcagccctcctagagttctgttccacccccagaggtataagccagggcccctcggagcccggccgtttttatttcttaaaccatgtatatatattttttatttttttgagacggagtctcgctctgtcgcccaggctggagtgcagtggcgcgatctcagctcactgcaacctccgctccgggttcaagtgattccctgcctcagcctgctgagtaactgggactacaggtgcatgccattatgcctggctaattgtttttttgagatggagtcttgctctgttgccaggccagagtgcagtggtgcaatcttggctcactgcaacctccgcctcctgggttcaagcgattctcctgcctcagcctcccaagtagctgggactacaggcacgtgccacaatgcctggctaatttttgtatttttagtagagacgggtttcaccatgttggccaggatggtctcaatctcttgacctcctgatccacccacctcgacctcccaaagtgctgggattacaggcgtgagccaccacgcccggcctggttctgtcttaaatcatggttgtcactgggggcctggcctcctccctgtctccagccttgtttgtgcattccgttagtgtgctggggagggttcctcactgaggttgagaggtgtgttggataggactgatcccacctgccccttgctggtcctgtacccaccctctccccagcctcacctggggtgggaggcggagggggaggttgggggtgggaggagctggggtggggctgggtcactgaggccgcccctttctcaagagcgtctttgcttcctcctccgccaccgccctgccgtgctgtgtccgcatccctccggccccgccccagcctcctgaccctgctctggacccacacactcacagtgctggtggaggcggccgctcccagcgcagctcatccctggcttccaacaggctgaagattgccctgcagaacctggagatctgcttccacgctgagggctgtggcctgccacccaaggccctgcacactgccaccttccaggctctgcagagggacctggagctgcaggcggcctccagccgggaactcatccggaagtacttctgcagccgaatccagcagcaggcagaaaccacctctgaggagctgggggctgtgacagtcaaggcctcctaccgcgcctctgagcagaagctgcgtgtggagctgctcagcgcctccagcctgctgcccctggactccaatggctccagcgacccctttgtccagctgaccttggagcccaggcatgagttccctgagctggccgcccgggagacccagaagcacaagaaggaccttcacccattgtttgatgagacctttgaattcctggtgcctgctgagccgtgccgcaaggctggggcatgcctcctgctcaccgtgctggactacgacacgctgggggccgacgacctggaaggcgaggccttcctgccgctgcgtgaggtgcccgggctgagtggctctgaggagcctggtgaggtgcctcagacccgcctgcccctcacgtaccccgcacccaacggggacccaatcctgcagctgctggagggccggaagggtgaccgagaagcccaggtctttgtgaggctgcggcggcaccgggccaagcaggcctcccagcatgccttgcggccggcaccgtagccgtagaggtttgcggtggggctgggtccccggtggggacttgcaagggctttcctgtagggtctggggcttccccgccacatcgcggccctccagcctggcctaacacttggggagccccagcatgcggagtgcccagagtgcagacctcccctgcctcccatggtgatgggggctcagcagcgacatctctactcccgcctccctgcctccagccctggctgcaatgtctctaccacatcccagcaccaggggattgggccatctgtctcctggccctggcccatctgcctcctggccttcctgttccagccactggggtgggggccaggttcactgggaccagggctacaggcacagagtctcctggaaaagggagaggggaccctgccaaagatgaggctccagctgccctggggggagggtggtggccattactagagggggcctgggtcctctccccaggggctgccagcatccaggccaggaagcctggagccaagaaccttctggctctgagggagcaagagctggcaggcggcagggctggcacagacagacggaagcagaaaggacagtttggctgctgtgtctgctgcgcacgccccctccccggacagcacctgccacctagaaactttcttagcaaaaaaattaataaaaacaaatccattgtcctctta

SEQ ID NO: 376431 - DNA, 4785 bp, Homo sapiens
agaggagggtcctgtagggatcccagctggggaaggtgcaggggcctgggagactgcctctccgaagcggtgaaaccctcacccttccgtccctcccagccaccctccctaaaacttcccctgacagagggtggcagccccaggctctttgcataatcctgtggcttcgctgtcttcacccagcaccagcggacagggaagggcagagaaggccaccatggcgacactcctctcccatccgcagcagcgccctcccttcttgcgccaggccatcaagataaggcgccgcagagtcagagatctacaggatcccccgccccaaatggccccggaggtaggagtgacctcactggggagagagctggccttggggagcactgtggtctcgggtacgggtgccctgctgtctggccccacctctcgaaggctgggactggggaccagcgaccctcccctgcctactccaccctggggagagccccctgggccagcagagcaggggctgccagatggactctgggccactgtgggcctcaggccctgtggtctgaggctctcagaacccctccctcccggttggcctgaccccatcccctactcctccagcttcagaagagccgactccattaggtgggggtgtccctgctgtggggtgagctgttcggggagcagcagacccccaggccgacgtggcacccccctcacctccgctgccgagcctcacttccgctgctgggtgaggagcaagccgccactgataagcagagctgttccctctggggaagggagggaggtggggtgcgggtgcggagggctcgcgctgctgggcacccatggacctcagccacggcgggcccagggacggacctccaggaggcctgctgggggaacagatccagcctccatcccaccacttctcccccgagcagcgggccctgctctacgaggacgcactctacactgtcttgcaccgcctgggtcatcctgagcccaaccatgtgacggaggcctctgagctgctgcgatacctgcaggaggccttccacgtggagcccgaggagcaccagcagacactgcagcgggtcagggagcttgagaagccaatattttgtctgaaggcaacagtgaaacaggccaagggcattctgggcaaagatgtcagtgggttcagcgacccctactgcctgctgggcattgagcagggggtaggtgtgccagggggcagccccgggtcccggcatcggcagaaggctgtggtgaggcacaccatccccgaggaggagacccaccgcacgcaggtcatcacccagacactcaaccccgtctgggacgagaccttcatcctggagtttgaggacatcaccaatgcgagctttcatctggacatgtgggacctggacactgtggagtctgtccgacagaagcttggggagctcacggatctgcatgggcttcgcaggatctttaaagaggcccggaaggacaaaggccaggacgactttctggggaacgtggttctgaggctgcaggacctgcgctgccgagaggaccagtggtaccccctggaaccccgcactgagacctacccagaccgaggccagtgccacctccagttccaactcatccataagcggagagccacttcggccagccgctcgcagccgagctacaccgtgcacctccacctcctgcagcagcttgtgtcccacgaggtcacccagcacgaggcgggaagcacctcctgggacgggtcgctgagtccccaggctgccaccgtcctctttctgcacgccacacagaaggacctatccgacttccaccagtccatggcgcagtggctggcctacagccgcctctaccagagcctggagttccccagcagctgcctcctgcaccccatcaccagcatcgagtaccagtggatccagggtcggctcaaggcagaacagcaggaggagctggccgcctcattcagctccctgctgacctacggcctctccctcatccggaggttccgctctgtcttccccctctctgtctcggactccccagcccggctgcagtctcttctcagggtcctggtacagatgtgcaagatgaaggcctttggagaactgtgccccaacaccgccccattgccccagctggtgactgaggccctgcagactggcaccactgaatggttccacctgaagcagcagcaccatcaacccatggtgcagggcatcccggaggcaggcaaggccttgctgggcctggtacaggatgtcattggcgacctgcaccagtgccagcgcacatgggacaagatcttccacaataccctcaagatccacctcttctccatggctttccgggagctgcagtggctggtggccaagcgggtgcaggaccacacgacggttgtgggtgatgtagtgtccccagagatgggcgagagtctgttccagctctacatcagcctcaaggagctctgccagctgcgcatgagctcctcagagagggatggagtcctggccctggataatttccaccgctggttccagccggccatcccctcctggctgcagaagacgtacaacgaggccctggcgcgggtgcagcgcgctgtgcagatggatgagctggtgcccctgggtgaactgaccaagcacagcacatcagcggtggatctatccacctgctttgcccagatcagccacactgcccggcagctggactggccagacccagaggaggccttcatgattaccgtcaagtttgtggaggacacctgtcgcctggccctggtgtactgcagccttataaaggcccgggcccgcgagctctcttcaggccagaaggaccaaggccaggcagccaacatgctgtgtgtggtggtgaatgacatggagcagctgcggctggtgatcggcaagttgcccgcccagctggcatgggaggccctggagcagcgggtaggggccgtgctggagcaggggcagctgcagaacacgctgcatgcccagctgcagagcgcgctggccgggctgggccatgagatccgcactggcgtccgcaccctggccgagcagttggaggtgggcatcgccaagcacatccagaaactggtgggcgtcagggagtctgtcctgcctgaggatgccattctgcccctgatgaagttcctggaggtggagctttgctacatgaacaccaacttggtgcaggagaacttcagcagcctcctgaccctgctctggacccacacactcacagtgctggtggaggcggccgctcccagcgcagctcatccctggcttccaacaggctgaagattgccctgcagaacctggagatctgcttccacgctgagggctgtggcctgccacccaaggccctgcacactgccaccttccaggctctgcagagggacctggagctgcaggcggcctccagccgggaactcatccggaagtacttctgcagccgaatccagcagcaggcagaaaccacctctgaggagctgggggctgtgacagtcaaggcctcctaccgcgcctctgagcagaagctgcgtgtggagctgctcagcgcctccagcctgctgcccctggactccaatggctccagcgacccctttgtccagctgaccttggagcccaggcatgagttccctgagctggccgcccgggagacccagaagcacaagaaggaccttcacccattgtttgatgagacctttgaattcctggtgcctgctgagccgtgccgcaaggctggggcatgcctcctgctcaccgtgctggactacgacacgctgggggccgacgacctggaaggcgaggccttcctgccgctgcgtgaggtgcccgggctgagtggctctgaggagcctggtgaggtgcctcagacccgcctgcccctcacgtaccccgcacccaacggggacccaatcctgcagctgctggagggccggaagggtgaccgagaagcccaggtctttgtgaggctgcggcggcaccgggccaagcaggcctcccagcatgccttgcggccggcaccgtagccgtagaggtttgcggtggggctgggtccccggtggggacttgcaagggctttcctgtagggtctggggcttccccgccacatcgcggccctccagcctggcctaacacttggggagccccagcatgcggagtgcccagagtgcagacctcccctgcctcccatggtgatgggggctcagcagcgacatctctactcccgcctccctgcctccagccctggctgcaatgtctctaccacatcccagcaccagggggagcaaaccctgcccctgcccgcctctcagaaaagctgctgtggtgggcaggggattgggccatctgtctcctggccctggcccatctgcctcctggccttcctgttccagccactggggtgggggccaggttcactgggaccagggctacaggcacagagtctcctggaaaagggagaggggaccctgccaaagatgaggctccagctgccctggggggagggtggtggccattactagagggggcctgggtcctctccccaggggctgccagcatccaggccaggaagcctggagccaagaaccttctggctctgagggagcaagagctggcaggcggcagggctggcacagacagacggaagcagaaaggacagtttggctgctgtgtctgctgcgcacgccccctccccggacagcacctgccacctagaaactttcttagcaaaaaaattaataaaaacaaatccattgtcctctta

SEQ ID NO: 376432 - DNA, 3595 bp, Homo sapiens
aaaaaaaaaaaaaaaaaaaaagggatgcggctgggaggagggaagtttggcagggataggctacaactccatggctctgggctgtggtcacttactgcttcgtctgggggcatccaccctccagggccctcaaccacgcccttttctccatacagggagtttgaggacatcaccaatgcgagctttcatctggacatgtgggacctggacactgtggagtctgtccgacagaagcttggggagctcacggatctgcatgggcttcgcaggatctttaaagaggcccggaaggacaaaggccaggacgactttctggggaacgtggttctgaggctgcaggacctgcgctgccgagaggaccagtggtaccccctggaaccccgcactgagacctacccagaccgaggccagtgccacctccagttccaactcatccataagcggagagccacttcggccagccgctcgcagccgagctacaccgtgcacctccacctcctgcagcagcttgtgtcccacgaggtcacccagcacgaggcgggaagcacctcctgggacgggtcgctgagtccccaggctgccaccgtcctctttctgcacgccacacagaaggacctatccgacttccaccagtccatggcgcagtggctggcctacagccgcctctaccagagcctggagttccccagcagctgcctcctgcaccccatcaccagcatcgagtaccagtggatccagggtcggctcaaggcagaacagcaggaggagctggccgcctcattcagctccctgctgacctacggcctctccctcatccggaggttccgctctgtcttccccctctctgtctcggactccccagcccggctgcagtctcttctcagggtcctggtacagatgtgcaagatgaaggcctttggagaactgtgccccaacaccgccccattgccccagctggtgactgaggccctgcagactggcaccactgaatggttccacctgaagcagcagcaccatcaacccatggtgcagggcatcccggaggcaggcaaggccttgctgggcctggtacaggatgtcattggcgacctgcaccagtgccagcgcacatgggacaagatcttccacaataccctcaagatccacctcttctccatggctttccgggagctgcagtggctggtggccaagcgggtgcaggaccacacgacggttgtgggtgatgtagtgtccccagagatgggcgagagtctgttccagctctacatcagcctcaaggagctctgccagctgcgcatgagctcctcagagagggatggagtcctggccctggataatttccaccgctggttccagccggccatcccctcctggctgcagaagacgtacaacgaggccctggcgcgggtgcagcgcgctgtgcagatggatgagctggtgcccctgggtgaactgaccaagcacagcacatcagcggtggatctatccacctgctttgcccagatcagccacactgcccggcagctggactggccagacccagaggaggccttcatgattaccgtcaagtttgtggaggacacctgtcgcctggccctggtgtactgcagccttataaaggcccgggcccgcgagctctcttcaggccagaaggaccaaggccaggcagccaacatgctgtgtgtggtggtgaatgacatggagcagctgcggctggtgatcggcaagttgcccgcccagctggcatgggaggccctggagcagcgggtaggggccgtgctggagcaggggcagctgcagaacacgctgcatgcccagctgcagagcgcgctggccgggctgggccatgagatccgcactggcgtccgcaccctggccgagcagttggaggtgggcatcgccaagcacatccagaaactggtgggcgtcagggagtctgtcctgcctgaggatgccattctgcccctgatgaagttcctggaggtggagctttgctacatgaacaccaacttggtgcaggagaacttcagcagcctcctgaccctgctctggacccacacactcacagtgctggtggaggcggccgctcccagcgcagctcatccctggcttccaacaggctgaagattgccctgcagaacctggagatctgcttccacgctgagggctgtggcctgccacccaaggccctgcacactgccaccttccaggctctgcagagggacctggagctgcaggcggcctccagccgggaactcatccggaagtacttctgcagccgaatccagcagcaggcagaaaccacctctgaggagctgggggctgtgacagtcaaggcctcctaccgcgcctctgagcagaagctgcgtgtggagctgctcagcgcctccagcctgctgcccctggactccaatggctccagcgacccctttgtccagctgaccttggagcccaggcatgagttccctgagctggccgcccgggagacccagaagcacaagaaggaccttcacccattgtttgatgagacctttgaattcctggtgcctgctgagccgtgccgcaaggctggggcatgcctcctgctcaccgtgctggactacgacacgctgggggccgacgacctggaaggcgaggccttcctgccgctgcgtgaggtgcccgggctgagtggctctgaggagcctggtgaggtgcctcagacccgcctgcccctcacgtaccccgcacccaacggggacccaatcctgcagctgctggagggccggaagggtgaccgagaagcccaggtctttgtgaggctgcggcggcaccgggccaagcaggcctcccagcatgccttgcggccggcaccgtagccgtagaggtttgcggtggggctgggtccccggtggggacttgcaagggctttcctgtagggtctggggcttccccgccacatcgcggccctccagcctggcctaacacttggggagccccagcatgcggagtgcccagagtgcagacctcccctgcctcccatggtgatgggggctcagcagcgacatctctactcccgcctccctgcctccagccctggctgcaatgtctctaccacatcccagcaccagggggagcaaaccctgcccctgcccgcctctcagaaaagctgctgtggtgggcaggggattgggccatctgtctcctggccctggcccatctgcctcctggccttcctgttccagccactggggtgggggccaggttcactgggaccagggctacaggcacagagtctcctggaaaagggagaggggaccctgccaaagatgaggctccagctgccctggggggagggtggtggccattactagagggggcctgggtcctctccccaggggctgccagcatccaggccaggaagcctggagccaagaaccttctggctctgagggagcaagagctggcaggcggcagggctggcacagacagacggaagcagaaaggacagtttggctgctgtgtctgctgcgcacgccccctccccggacagcacctgccacctagaaactttcttagcaaaaaaattaataaaaacaaatccattgtcctctta

SEQ ID NO: 376433 - DNA, 3397 bp, Homo sapiens
cacgggctgggcatccccgcctgtcaggacctgcgctgccgagaggaccagtggtaccccctggaaccccgcactgagacctacccagaccgaggccagtgccacctccagttccaactcatccataagcgggtaggtcgggtactgggccagtggccatgcccagctcttgcggcggtctgctgggttgcggggctggctgcacccagtgtgaggccctgtctgctcacagaggcctcattgcagagagccacttcggccagccgctcgcagccgagctacaccgtgcacctccacctcctgcagcagcttgtgtcccacgaggtcacccagcacgaggcgggaagcacctcctgggacgggtcgctgagtccccaggctgccaccgtcctctttctgcacgccacacagaaggacctatccgacttccaccagtccatggcgcagtggctggcctacagccgcctctaccagagcctggagttccccagcagctgcctcctgcaccccatcaccagcatcgagtaccagtggatccagggtcggctcaaggcagaacagcaggaggagctggccgcctcattcagctccctgctgacctacggcctctccctcatccggaggttccgctctgtcttccccctctctgtctcggactccccagcccggctgcagtctcttctcagggtcctggtacagatgtgcaagatgaaggcctttggagaactgtgccccaacaccgccccattgccccagctggtgactgaggccctgcagactggcaccactgaatggttccacctgaagcagcagcaccatcaacccatggtgcagggcatcccggaggcaggcaaggccttgctgggcctggtacaggatgtcattggcgacctgcaccagtgccagcgcacatgggacaagatcttccacaataccctcaagatccacctcttctccatggctttccgggagctgcagtggctggtggccaagcgggtgcaggaccacacgacggttgtgggtgatgtagtgtccccagagatgggcgagagtctgttccagctctacatcagcctcaaggagctctgccagctgcgcatgagctcctcagagagggatggagtcctggccctggataatttccaccgctggttccagccggccatcccctcctggctgcagaagacgtacaacgaggccctggcgcgggtgcagcgcgctgtgcagatggatgagctggtgcccctgggtgaactgaccaagcacagcacatcagcggtggatctatccacctgctttgcccagatcagccacactgcccggcagctggactggccagacccagaggaggccttcatgattaccgtcaagtttgtggaggacacctgtcgcctggccctggtgtactgcagccttataaaggcccgggcccgcgagctctcttcaggccagaaggaccaaggccaggcagccaacatgctgtgtgtggtggtgaatgacatggagcagctgcggctggtgatcggcaagttgcccgcccagctggcatgggaggccctggagcagcgggtaggggccgtgctggagcaggggcagctgcagaacacgctgcatgcccagctgcagagcgcgctggccgggctgggccatgagatccgcactggcgtccgcaccctggccgagcagttggaggtgggcatcgccaagcacatccagaaactggtgggcgtcagggagtctgtcctgcctgaggatgccattctgcccctgatgaagttcctggaggtggagctttgctacatgaacaccaacttggtgcaggagaacttcagcagcctcctgaccctgctctggacccacacactcacagtgctggtggaggcggccgctcccagcgcagctcatccctggcttccaacaggctgaagattgccctgcagaacctggagatctgcttccacgctgagggctgtggcctgccacccaaggccctgcacactgccaccttccaggctctgcagagggacctggagctgcaggcggcctccagccgggaactcatccggaagtacttctgcagccgaatccagcagcaggcagaaaccacctctgaggagctgggggctgtgacagtcaaggcctcctaccgcgcctctgagcagaagctgcgtgtggagctgctcagcgcctccagcctgctgcccctggactccaatggctccagcgacccctttgtccagctgaccttggagcccaggcatgagttccctgagctggccgcccgggagacccagaagcacaagaaggaccttcacccattgtttgatgagacctttgaattcctggtgcctgctgagccgtgccgcaaggctggggcatgcctcctgctcaccgtgctggactacgacacgctgggggccgacgacctggaaggcgaggccttcctgccgctgcgtgaggtgcccgggctgagtggctctgaggagcctggtgaggtgcctcagacccgcctgcccctcacgtaccccgcacccaacggggacccaatcctgcagctgctggagggccggaagggtgaccgagaagcccaggtctttgtgaggctgcggcggcaccgggccaagcaggcctcccagcatgccttgcggccggcaccgtagccgtagaggtttgcggtggggctgggtccccggtggggacttgcaagggctttcctgtagggtctggggcttccccgccacatcgcggccctccagcctggcctaacacttggggagccccagcatgcggagtgcccagagtgcagacctcccctgcctcccatggtgatgggggctcagcagcgacatctctactcccgcctccctgcctccagccctggctgcaatgtctctaccacatcccagcaccagggggagcaaaccctgcccctgcccgcctctcagaaaagctgctgtggtgggcaggggattgggccatctgtctcctggccctggcccatctgcctcctggccttcctgttccagccactggggtgggggccaggttcactgggaccagggctacaggcacagagtctcctggaaaagggagaggggaccctgccaaagatgaggctccagctgccctggggggagggtggtggccattactagagggggcctgggtcctctccccaggggctgccagcatccaggccaggaagcctggagccaagaaccttctggctctgagggagcaagagctggcaggcggcagggctggcacagacagacggaagcagaaaggacagtttggctgctgtgtctgctgcgcacgccccctccccggacagcacctgccacctagaaactttcttagcaaaaaaattaataaaaacaaatccattgtcctctta

SEQ ID NO: 376434 - DNA, 3031 bp, Homo sapiens
gggtcctgtagggatcccagctggggaaggtgcaggggcctgggagactgcctctccgaagcggtgaaaccctcacccttccgtccctcccagccaccctccctaaaacttcccctgacagagggtggcagccccaggctctttgcataatcctgtggcttcgctgtcttcacccagcaccagcggacagggaagggcagagaaggccaccatggcgacactcctctcccatccgcagcagcgccctcccttcttgcgccaggccatcaagataaggcgccgcagagtcagagatctacaggatcccccgccccaaatggccccggagatccagcctccatcccaccacttctcccccgagcagcgggccctgctctacgaggacgcactctacactgtcttgcaccgcctgggtcatcctgagcccaaccatgtgacggaggcctctgagctgctgcgatacctgcaggaggccttccacgtggagcccgaggagcaccagcagacactgcagcgggtcagggagcttgagaagccaatattttgtctgaaggcaacagtgaaacaggccaagggcattctgggcaaagatgtcagtgggttcagcgacccctactgcctgctgggcattgagcagggggtaggtgtgccagggggcagccccgggtcccggcatcggcagaaggctgtggtgaggcacaccatccccgaggaggagacccaccgcacgcaggtcatcacccagacactcaaccccgtctgggacgagaccttcatcctggagtttgaggacatcaccaatgcgagctttcatctggacatgtgggacctggacactgtggagtctgtccgacagaagcttggggagctcacggatctgcatgggcttcgcaggatctttaaagaggcccggaaggacaaaggccaggacgactttctggggaacgtggttctgaggctgcaggacctgcgctgccgagaggaccagtggtaccccctggaaccccgcactgagacctacccagaccgaggccagtgccacctccagttccaactcatccataagcgggtaggtcgggtactgggccagtggccatgcccagctcttgcggcggtctgctgggttgcggggctggctgcacccagtgtgaggccctgtctgctcacagaggcctcattgcagagagccacttcggccagccgctcgcagccgagctacaccgtgcacctccacctcctgcagcagcttgtgtcccacgaggtcacccagcacgagtgggccatgagatccgcactggcgtccgcaccctggccgagcagttggaggtgggcatcgccaagcacatccagaaactggtgggcgtcagggagtctgtcctgcctgaggatgccattctgcccctgatgaagttcctggaggtggagctttgctacatgaacaccaacttggtgcaggagaacttcagcagcctcctgaccctgctctggacccacacactcacagtgctggtggaggcggccgctcccagcgcagctcatccctggcttccaacaggctgaagattgccctgcagaacctggagatctgcttccacgctgagggctgtggcctgccacccaaggccctgcacactgccaccttccaggctctgcagagggacctggagctgcaggcggcctccagccgggaactcatccggaagtacttctgcagccgaatccagcagcaggcagaaaccacctctgaggagctgggggctgtgacagtcaaggcctcctaccgcgcctctgagcagaagctgcgtgtggagctgctcagcgcctccagcctgctgcccctggactccaatggctccagcgacccctttgtccagctgaccttggagcccaggcatgagttccctgagctggccgcccgggagacccagaagcacaagaaggaccttcacccattgtttgatgagacctttgaattcctggtgcctgctgagccgtgccgcaaggctggggcatgcctcctgctcaccgtgctggactacgacacgctgggggccgacgacctggaaggcgaggccttcctgccgctgcgtgaggtgcccgggctgagtggctctgaggagcctggtgaggtgcctcagacccgcctgcccctcacgtaccccgcacccaacggggacccaatcctgcagctgctggagggccggaagggtgaccgagaagcccaggtctttgtgaggctgcggcggcaccgggccaagcaggcctcccagcatgccttgcggccggcaccgtagccgtagaggtttgcggtggggctgggtccccggtggggacttgcaagggctttcctgtagggtctggggcttccccgccacatcgcggccctccagcctggcctaacacttggggagccccagcatgcggagtgcccagagtgcagacctcccctgcctcccatggtgatgggggctcagcagcgacatctctactcccgcctccctgcctccagccctggctgcaatgtctctaccacatcccagcaccagggggagcaaaccctgcccctgcccgcctctcagaaaagctgctgtggtgggcaggggattgggccatctgtctcctggccctggcccatctgcctcctggccttcctgttccagccactggggtgggggccaggttcactgggaccagggctacaggcacagagtctcctggaaaagggagaggggaccctgccaaagatgaggctccagctgccctggggggagggtggtggccattactagagggggcctgggtcctctccccaggggctgccagcatccaggccaggaagcctggagccaagaaccttctggctctgagggagcaagagctggcaggcggcagggctggcacagacagacggaagcagaaaggacagtttggctgctgtgtctgctgcgcacgccccctccccggacagcacctgccacctagaaactttcttagcaaaaaaattaataaaaacaaatccattgtcctctta

SEQ ID NO: 376435 - DNA, 1719 bp, Homo sapiens
cctggaaggttccagggctgtagaggaggccagtgtggctgggacaggctgagcaacggagaggggaaggcagagaggccattctgcccctgatgaagttcctggaggtggagctttgctacatgaacaccaacttggtgcaggagaacttcagcagcctcctgaccctgctctggacccacacactcacagtgctggtggaggcggccgctcccagcgcagctcatccctggcttccaacaggctgaagattgccctgcagaacctggagatctgcttccacgctgagggctgtggcctgccacccaaggccctgcacactgccaccttccaggctctgcagagggacctggagctgcaggcggcctccagccgggaactcatccggaagtacttctgcagccgaatccagcagcaggcagaaaccacctctgaggagctgggggctgtgacagtcaaggcctcctaccgcgcctctgagcagaagctgcgtgtggagctgctcagcgcctccagcctgctgcccctggactccaatggctccagcgacccctttgtccagctgaccttggagcccaggcatgagttccctgagctggccgcccgggagacccagaagcacaagaaggaccttcacccattgtttgatgagacctttgaattcctggtgcctgctgagccgtgccgcaaggctggggcatgcctcctgctcaccgtgctggactacgacacgctgggggccgacgacctggaaggcgaggccttcctgccgctgcgtgaggtgcccgggctgagtggctctgaggagcctggtgaggtgcctcagacccgcctgcccctcacgtaccccgcacccaacggggacccaatcctgcagctgctggagggccggaagggtgaccgagaagcccaggtctttgtgaggctgcggcggcaccgggccaagcaggcctcccagcatgccttgcggccggcaccgtagccgtagaggtttgcggtggggctgggtccccggtggggacttgcaagggctttcctgtagggtctggggcttccccgccacatcgcggccctccagcctggcctaacacttggggagccccagcatgcggagtgcccagagtgcagacctcccctgcctcccatggtgatgggggctcagcagcgacatctctactcccgcctccctgcctccagccctggctgcaatgtctctaccacatcccagcaccagggggagcaaaccctgcccctgcccgcctctcagaaaagctgctgtggtgggcaggggattgggccatctgtctcctggccctggcccatctgcctcctggccttcctgttccagccactggggtgggggccaggttcactgggaccagggctacaggcacagagtctcctggaaaagggagaggggaccctgccaaagatgaggctccagctgccctggggggagggtggtggccattactagagggggcctgggtcctctccccaggggctgccagcatccaggccaggaagcctggagccaagaaccttctggctctgagggagcaagagctggcaggcggcagggctggcacagacagacggaagcagaaaggacagtttggctgctgtgtctgctgcgcacgccccctccccggacagcacctgccacctagaaactttcttagcaaaaaaattaataaaaacaaatccattgtcctctta

SEQ ID NO: 376436 - DNA, 1069 bp, Homo sapiens
gggtcctgtagggatcccagctggggaaggtgcaggggcctgggagactgcctctccgaagcggtgaaaccctcacccttccgtccctcccagccaccctccctaaaacttcccctgacagagggtggcagccccaggctctttgcataatcctgtggcttcgctgtcttcacccagcaccagcggacagggaagggcagagaaggccaccatggcgacactcctctcccatccgcagcagcgccctcccttcttgcgccaggccatcaagataaggcgccgcagagtcagagatctacaggatcccccgccccaaatggccccggagatccagcctccatcccaccacttctcccccgagcagcgggccctgctctacgaggacgcactctacactgtcttgcaccgcctgggtcatcctgagcccaaccatgtgacggaggcctctgagctgctgcgatacctgcaggaggccttccacgtggagcccgaggagcaccagcagacactgcagcgggtcagggagcttgagaagccaatattttgtctgaaggcaacagtgaaacaggccaagggcattctgggcaaagatgtcagtgggttcagcgacccctactgcctgctgggcattgagcagggggtaggtgtgccagggggcagccccgggtcccggcatcggcagaaggctgtggtgaggcacaccatccccgaggaggagacccaccgcacgcaggtcatcacccagacactcaaccccgtctgggacgagaccttcatcctggagtttgaggacatcaccaatgcgagctttcatctggacatgtgggacctggacactgtggagtctgtccgacagaagcttggggagctcacggatctgcatgggcttcgcaggatctttaaagaggcccggaaggacaaaggccaggacgactttctggggaacgtggttctgaggctgcaggtgaggaggatgaggaaaggggcccaggagcgaggcagagggagggggttgggaggggttctggggagaggctctgtgtcctcacaaagctgagcctggggtcca

SEQ ID NO: 376437 - DNA, 342 bp, Homo sapiens
ggggtggattccagcctaatcccttccgacccttgctgcgtcccccttatgggaccctgcctgacgcaggatctttaaagaggcccggaaggacaaaggccaggacgactttctggggaacgtggttctgaggctgcaggtgaggaggatgaggaaaggggcccaggagcgaggcagagggagggggttgggaggggttctggggagaggctctgtgtcctcacaaagctgagcctggggtccacctcctgtcgcctccgctgccccgactctatgaggttctgacgctcacgggctgggcatccccgcctgtcaggacctgcgctgccgagaggaccagtg

SEQ ID NO: 376438 - DNA, 640 bp, Homo sapiens
ggtgaggcttgggttctgcctggacctccaaagcgtagtaaaagccagtaacccgctctgaacatcccttttgggtgcacttgagtccagttttgtgcaaaacgctgcctctggatatccttggggctgtggcttcactttgcctgagatcctgcagcctgggggtctgggcggagccgtgcttgtctcttgtgaagctccctgcccagctctgtgcctggtgatggtagctgctctatgaatgaaggaaggagggaagggggtggatttggcagtatcctgagtcctcctttcttcccccagctggtgcccctgggtgaactgaccaagcacagcacatcagcggtggatctatccacctgctttgcccagatcagccacactgcccggcagctggactggccagacccagaggaggccttcatgattaccgtcaagtttgtggaggtgcggcatcttccacgtgtccttccccctctttctagaacagccacactaccacccaccgtttctcccgtgctctcacccaggcagcctcccaaggcctgtattctaaatcccccaagtcgctgaaattcccatgccctcccacctgcccttcctggatgccccacccatggatcagttccctctgtccaac

SEQ ID NO: 376439 - DNA, 6011 bp, Homo sapiens
  misc_feature (1293)..(1293): n is a, c, g, or t
  misc_feature (3275)..(3276): n is a, c, g, or t
  misc_feature (3349)..(3349): n is a, c, g, or t
  misc_feature (3365)..(3365): n is a, c, g, or t
  misc_feature (3410)..(3410): n is a, c, g, or t
gggtcctgtagggatcccagctggggaaggtgcaggggcctgggagactgcctctccgaagcggtgaaaccctcacccttccgtccctcccagccaccctccctaaaacttcccctgacagagggtggcagccccaggctctttgcataatcctgtggcttcgctgtcttcacccagcaccagcggacagggaagggcagagaaggccaccatggcgacactcctctcccatccgcagcagcgccctcccttcttgcgccaggccatcaagataaggcgccgcagagtcagagatctacaggatcccccgccccaaatggccccggagatccagcctccatcccaccacttctcccccgagcagcgggccctgctctacgaggacgcactctacactgtcttgcaccgcctgggtcatcctgagcccaaccatgtgacggaggcctctgagctgctgcgatacctgcaggaggccttccacgtggagcccgaggagcaccagcagacactgcagcgggtcagggagcttgagaagccaatattttgtctgaaggcaacagtgaaacaggccaagggcattctgggcaaagatgtcagtgggttcagcgacccctactgcctgctgggcattgagcagggggtaggtgtgccagggggcagccccgggtcccggcatcggcagaaggctgtggtgaggcacaccatccccgaggaggagacccaccgcacgcaggtcatcacccagacactcaaccccgtctgggacgagaccttcatcctggagtttgaggacatcaccaatgcgagctttcatctggacatgtgggacctggacactgtggagtctgtccgacagaagcttggggagctcacggatctgcatgggcttcgcaggatctttaaagaggcccggaaggacaaaggccaggacgactttctggggaacgtggttctgaggctgcaggacctgcgctgccgagaggaccagtggtaccccctggaaccccgcactgagacctacccagaccgaggccagtgccacctccagttccaactcatccataagcgggtaggtcgggtactgggccagtggccatgcccagctcttgcggcggtctgctgggttgcggggctggctgcacccagtgtgaggccctgtctgctcacagaggcctcattgcagagagccacttcggccagccgctcgcagccgagctacaccgtgcacctccacctcctgcagcagcttgtgtcccacgaggtcacccagcacgagctcctggggctgggcgnagccggggctgcccttcaggtcctgacactcctccacctgctcccctcaggcgggaagcacctcctgggacgggtcgctgagtccccaggctgccaccgtcctctttctgcacgccacacagaaggacctatccgacttccaccagtccatggcgcagtggctggcctacagccgcctctaccagagcctggagttccccagcagctgcctcctgcaccccatcaccagcatcgagtaccagtggatccagggtcggctcaaggcagaacagcaggaggagctggccgcctcattcagctccctgctgacctacggcctctccctcatccggaggttccgctctgtcttccccctctctgtctcggactccccagcccggctgcagtctcttctcagggtcctggtacagatgtgcaagatgaaggcctttggagaactgtgccccaacaccgccccattgccccagctggtgactgaggccctgcagactggcaccactgaatggttccacctgaagcagcagcaccatcaacccatggtgcagggcatcccggaggcaggcaaggccttgctgggcctggtacaggatgtcattggcgacctgcaccagtgccagcgcacatgggacaagatcttccacaataccctcaagatccacctcttctccatggctttccgggagctgcagtggctggtggccaagcgggtgcaggaccacacgacggttgtgggtgatgtagtgtccccagagatgggcgagagtctgttccagctctacatcagcctcaaggagctctgccagctgcgcatgagctcctcagagagggatggagtcctggccctggataatttccaccgctggttccagccggccatcccctcctggctgcagaagacgtacaacgaggccctggcgcgggtgcagcgcgctgtgcagatggatgagctggtgcccctgggtgaactgaccaagcacagcacatcagcggtggatctatccacctgctttgcccagatcagccacactgcccggcagctggactggccagacccagaggaggccttcatgattaccgtcaagtttgtggaggacacctgtcgcctggccctggtgtactgcagccttataaaggcccgggcccgcgagctctcttcaggccagaaggaccaaggccaggcagccaacatgctgtgtgtggtggtgaatgacatggagcagctgcggctggtgatcggcaagttgcccgcccagctggcatgggaggccctggagcagcgggtaggggccgtgctggagcaggggcagctgcagaacacgctgcatgcccagctgcagagcgcgctggccgggctgggccatgagatccgcactggcgtccgcaccctggccgagcagttggaggtgggcatcgccaagcacatccagaaactggtgggcgtcagggagtctgtcctgcctgaggatgccattctgcccctgatgaagttcctggaggtggagctttgctacatgaacaccaacttggtgcaggagaacttcagcaggtctgtagcagcccctgccctgggcgcgctcgcacctccccctctcctcccacggcccctccttcctgggccccagcatccgttctgaggggtgtagcagcccctgccctgggcgcgctcgcacctccccctctcctcccacggcccctctttcctgggcctcagcatccgttctgaggggtggaggtgaatccctttggtgacctcccttatgggtgcaacaggctctgctaaggctcgctgcagggacggggagcttgccacttctcaggcctccccatttcctgctgcctagctctgagtgctttgagttcttccttaggctgagcaaaatctacctgtcctttctcctttagtcccaggcctgtcttcagggcctccctgcctgctcctctgcccccattaggttacaggtggtcctgcccacggtgcaggnngaacttctagctagggtgtcttatagcagggacccagcatgccaggcaacaggcggtggagtccagcacatgngctctggaccacctgngttcagactccggcttcatcactgcttagcagccttgggcaagtncccggtgcagatgagagtagttctggcttctgttgaggattaaatgggtcatgtgaggtgctgagcgtggtgtcagtacaaaggaagtggtcagtgactattagcggtagtgacgatgatgatgacagcgccccacctccctgtggaatctgggccctgaagagccgcagccctcctagagttctgttccacccccagaggtataagccagggcccctcggagcccggccgtttttatttcttaaaccatgtatatatattttttatttttttgagacggagtctcgctctgtcgcccaggctggagtgcagtggcgcgatctcagctcactgcaacctccgctccgggttcaagtgattccctgcctcagcctgctgagtaactgggactacaggtgcatgccattatgcctggctaattgtttttttgagatggagtcttgctctgttgccaggccagagtgcagtggtgcaatcttggctcactgcaacctccgcctcctgggttcaagcgattctcctgcctcagcctcccaagtagctgggactacaggcacgtgccacaatgcctggctaatttttgtatttttagtagagacgggtttcaccatgttggccaggatggtctcaatctcttgacctcctgatccacccacctcgacctcccaaagtgctgggattacaggcgtgagccaccacgcccggcctggttctgtcttaaatcatggttgtcactgggggcctggcctcctccctgtctccagccttgtttgtgcattccgttagtgtgctggggagggttcctcactgaggttgagaggtgtgttggataggactgatcccacctgccccttgctggtcctgtacccaccctctccccagcctcacctggggtgggaggcggagggggaggttgggggtgggaggagctggggtggggctgggtcactgaggccgcccctttctcaagagcgtctttgcttcctcctccgccaccgccctgccgtgctgtgtccgcatccctccggccccgccccagcctcctgaccctgctctggacccacacactcacagtgctggtggaggcggccgctcccagcgcagctcatccctggcttccaacaggctgaagattgccctgcagaacctggagatctgcttccacgctgagggctgtggcctgccacccaaggccctgcacactgccaccttccaggctctgcagagggacctggagctgcaggcggcctccagccgggaactcatccggaagtacttctgcagccgaatccagcagcaggcagaaaccacctctgaggagctgggggctgtgacagtcaaggcctcctaccgcgcctctgagcagaagctgcgtgtggagctgctcagcgcctccagcctgctgcccctggactccaatggctccagcgacccctttgtccagctgaccttggagcccaggcatgagttccctgagctggccgcccgggagacccagaagcacaagaaggaccttcacccattgtttgatgagacctttgaattcctggtgcctgctgagccgtgccgcaaggctggggcatgcctcctgctcaccgtgctggactacgacacgctgggggccgacgacctggaaggcgaggccttcctgccgctgcgtgaggtgcccgggctgagtggctctgaggagcctggtgaggtgcctcagacccgcctgcccctcacgtaccccgcacccaacggggacccaatcctgcagctgctggagggccggaagggtgaccgagaagcccaggtctttgtgaggctgcggcggcaccgggccaagcaggcctcccagcatgccttgcggccggcaccgtagccgtagaggtttgcggtggggctgggtccccggtggggacttgcaagggctttcctgtagggtctggggcttccccgccacatcgcggccctccagcctggcctaacacttggggagccccagcatgcggagtgcccagagtgcagacctcccctgcctcccatggtgatgggggctcagcagcgacatctctactcccgcctccctgcctccagccctggctgcaatgtctctaccacatcccagcaccagggggagcaaaccctgcccctgcccgcctctcagaaaagctgctgtggtgggcaggggattgggccatctgtctcctggccctggcccatctgcctcctggccttcctgttccagccactggggtgggggccaggttcactgggaccagggctacaggcacagagtctcctggaaaagggagaggggaccctgccaaagatgaggctccagctgccctggggggagggtggtggccattactagagggggcctgggtcctctccccaggggctgccagcatccaggccaggaagcctggagccaagaaccttctggctctgagggagcaagagctggcaggcggcagggctggcacagacagacggaagcagaaaggacagtttggctgctgtgtctgctgcgcacgccccctccccggacagcacctgccacctagaaactttcttagcaaaaaaattaataaaaacaaatccattgtcctctta

SEQ ID NO: 376440 - DNA, 4019 bp, Homo sapiens
cgcactcgaggaagtggggtgagaacccccccgggcccagcgccctcccttcttgcgccaggccatcaagataaggcgccgcagagtcagagatctacaggatcccccgccccaaatggccccggagatccagcctccatcccaccacttctcccccgagcagcgggccctgctctacgaggacgcactctacactgtcttgcaccgcctgggtcatcctgagcccaaccatgtgacggaggcctctgagctgctgcgatacctgcaggaggccttccacgtggagcccgaggagcaccagcagacactgcagcgggtcagggagcttgagaagccaatattttgtctgaaggcaacagtgaaacaggccaagggcattctgggcaaagatgtcagtgggttcagcgacccctactgcctgctgggcattgagcagggggtaggtgtgccagggggcagccccgggtcccggcatcggcagaaggctgtggtgaggcacaccatccccgaggaggagacccaccgcacgcaggtcatcacccagacactcaaccccgtctgggacgagaccttcatcctggagtttgaggacatcaccaatgcgagctttcatctggacatgtgggacctggacactgtggagtctgtccgacagaagcttggggagctcacggatctgcatgggcttcgcaggatctttaaagaggcccggaaggacaaaggccaggacgactttctggggaacgtggttctgaggctgcaggacctgcgctgccgagaggaccagtggtaccccctggaaccccgcactgagacctacccagaccgaggccagtgccacctccagttccaactcatccataagcggagagccacttcggccagccgctcgcagccgagctacaccgtgcacctccacctcctgcagcagcttgtgtcccacgaggtcacccagcacgaggcgggaagcacctcctgggacgggtcgctgagtccccaggctgccaccgtcctctttctgcacgccacacagaaggacctatccgacttccaccagtccatggcgcagtggctggcctacagccgcctctaccagagcctggagttccccagcagctgcctcctgcaccccatcaccagcatcgagtaccagtggatccagggtcggctcaaggcagaacagcaggaggagctggccgcctcattcagctccctgctgacctacggcctctccctcatccggaggttccgctctgtcttccccctctctgtctcggactccccagcccggctgcagtctcttctcagggtcctggtacagatgtgcaagatgaaggcctttggagaactgtgccccaacaccgccccattgccccagctggtgactgaggccctgcagactggcaccactgaatggttccacctgaagcagcagcaccatcaacccatggtgcagggcatcccggaggcaggcaaggccttgctgggcctggtacaggatgtcattggcgacctgcaccagtgccagcgcacatgggacaagatcttccacaataccctcaagatccacctcttctccatggctttccgggagctgcagtggctggtggccaagcgggtgcaggaccacacgacggttgtgggtgatgtagtgtccccagagatgggcgagagtctgttccagctctacatcagcctcaaggagctctgccagctgcgcatgagctcctcagagagggatggagtcctggccctggataatttccaccgctggttccagccggccatcccctcctggctgcagaagacgtacaacgaggccctggcgcgggtgcagcgcgctgtgcagatggatgagctggtgcccctgggtgaactgaccaagcacagcacatcagcggtggatctatccacctgctttgcccagatcagccacactgcccggcagctggactggccagacccagaggaggccttcatgattaccgtcaagtttgtggaggacacctgtcgcctggccctggtgtactgcagccttataaaggcccgggcccgcgagctctcttcaggccagaaggaccaaggccaggcagccaacatgctgtgtgtggtggtgaatgacatggagcagctgcggctggtgatcggcaagttgcccgcccagctggcatgggaggccctggagcagcgggtaggggccgtgctggagcaggggcagctgcagaacacgctgcatgcccagctgcagagcgcgctggccgggctgggccatgagatccgcactggcgtccgcaccctggccgagcagttggaggtgggcatcgccaagcacatccagaaactggtgggcgtcagggagtctgtcctgcctgaggatgccattctgcccctgatgaagttcctggaggtggagctttgctacatgaacaccaacttggtgcaggagaacttcagcagcctcctgaccctgctctggacccacacactcacagtgctggtggaggcggccgctcccagcgcagctcatccctggcttccaacaggctgaagattgccctgcagaacctggagatctgcttccacgctgagggctgtggcctgccacccaaggccctgcacactgccaccttccaggctctgcagagggacctggagctgcaggcggcctccagccgggaactcatccggaagtacttctgcagccgaatccagcagcaggcagaaaccacctctgaggagctgggggctgtgacagtcaaggcctcctaccgcgcctctgagcagaagctgcgtgtggagctgctcagcgcctccagcctgctgcccctggactccaatggctccagcgacccctttgtccagctgaccttggagcccaggcatgagttccctgagctggccgcccgggagacccagaagcacaagaaggaccttcacccattgtttgatgagacctttgaattcctggtgcctgctgagccgtgccgcaaggctggggcatgcctcctgctcaccgtgctggactacgacacgctgggggccgacgacctggaaggcgaggccttcctgccgctgcgtgaggtgcccgggctgagtggctctgaggagcctggtgaggtgcctcagacccgcctgcccctcacgtaccccgcacccaacggggacccaatcctgcagctgctggagggccggaagggtgaccgagaagcccaggtctttgtgaggctgcggcggcaccgggccaagcaggcctcccagcatgccttgcggccggcaccgtagccgtagaggtttgcggtggggctgggtccccggtggggacttgcaagggctttcctgtagggtctggggcttccccgccacatcgcggccctccagcctggcctaacacttggggagccccagcatgcggagtgcccagagtgcagacctcccctgcctcccatggtgatgggggctcagcagcgacatctctactcccgcctccctgcctccagccctggctgcaatgtctctaccacatcccagcaccagggggagcaaaccctgcccctgcccgcctctcagaaaagctgctgtggtgggcaggggattgggccatctgtctcctggccctggcccatctgcctcctggccttcctgttccagccactggggtgggggccaggttcactgggaccagggctacaggcacagagtctcctggaaaagggagaggggaccctgccaaagatgaggctccagctgccctggggggagggtggtggccattactagagggggcctgggtcctctccccaggggctgccagcatccaggccaggaagcctggagccaagaaccttctggctctgagggagcaagagctggcaggcggcagggctggcacagacagacggaagcagaaaggacagtttggctgctgtgtctgctgcgcacgccccctccccggacagcacctgccacctagaaactttcttagcaaaaaaattaataaaaacaaatccattgtcctctta

SEQ ID NO: 376441 - DNA, 4816 bp, Homo sapiens
agaggagggtcctgtagggatcccagctggggaaggtgcaggggcctgggagactgcctctccgaagcggtgaaaccctcacccttccgtccctcccagccaccctccctaaaacttcccctgacagagggtggcagccccaggctctttgcataatcctgtggcttcgctgtcttcacccagcaccagcggacagggaagggcagagaaggccaccatggcgacactcctctcccatccgcagcagcgccctcccttcttgcgccaggccatcaagataaggcgccgcagagtcagagatctacaggatcccccgccccaaatggccccggaggtaggagtgacctcactggggagagagctggccttggggagcactgtggtctcgggtacgggtgccctgctgtctggccccacctctcgaaggctgggactggggaccagcgaccctcccctgcctactccaccctggggagagccccctgggccagcagagcaggggctgccagatggactctgggccactgtgggcctcaggccctgtggtctgaggctctcagaacccctccctcccggttggcctgaccccatcccctactcctccagcttcagaagagccgactccattaggtgggggtgtccctgctgtggggtgagctgttcggggagcagcagacccccaggccgacgtggcacccccctcacctccgctgccgagcctcacttccgctgctgggtgaggagcaagccgccactgataagcagagctgttccctctggggaagggagggaggtggggtgcgggtgcggagggctcgcgctgctgggcacccatggacctcagccacggcgggcccagggacggacctccaggaggcctgctgggggaacagatccagcctccatcccaccacttctcccccgagcagcgggccctgctctacgaggacgcactctacactgtcttgcaccgcctgggtcatcctgagcccaaccatgtgacggaggcctctgagctgctgcgatacctgcaggaggccttccacgtggagcccgaggagcaccagcagacactgcagcgggtcagggagcttgagaagccaatattttgtctgaaggcaacagtgaaacaggccaagggcattctgggcaaagatgtcagtgggttcagcgacccctactgcctgctgggcattgagcagggggtaggtgtgccagggggcagccccgggtcccggcatcggcagaaggctgtggtgaggcacaccatccccgaggaggagacccaccgcacgcaggtcatcacccagacactcaaccccgtctgggacgagaccttcatcctggccctcaaccacgcccttttctccatacagggagtttgaggacatcaccaatgcgagctttcatctggacatgtgggacctggacactgtggagtctgtccgacagaagcttggggagctcacggatctgcatgggcttcgcaggatctttaaagaggcccggaaggacaaaggccaggacgactttctggggaacgtggttctgaggctgcaggacctgcgctgccgagaggaccagtggtaccccctggaaccccgcactgagacctacccagaccgaggccagtgccacctccagttccaactcatccataagcggagagccacttcggccagccgctcgcagccgagctacaccgtgcacctccacctcctgcagcagcttgtgtcccacgaggtcacccagcacgaggcgggaagcacctcctgggacgggtcgctgagtccccaggctgccaccgtcctctttctgcacgccacacagaaggacctatccgacttccaccagtccatggcgcagtggctggcctacagccgcctctaccagagcctggagttccccagcagctgcctcctgcaccccatcaccagcatcgagtaccagtggatccagggtcggctcaaggcagaacagcaggaggagctggccgcctcattcagctccctgctgacctacggcctctccctcatccggaggttccgctctgtcttccccctctctgtctcggactccccagcccggctgcagtctcttctcagggtcctggtacagatgtgcaagatgaaggcctttggagaactgtgccccaacaccgccccattgccccagctggtgactgaggccctgcagactggcaccactgaatggttccacctgaagcagcagcaccatcaacccatggtgcagggcatcccggaggcaggcaaggccttgctgggcctggtacaggatgtcattggcgacctgcaccagtgccagcgcacatgggacaagatcttccacaataccctcaagatccacctcttctccatggctttccgggagctgcagtggctggtggccaagcgggtgcaggaccacacgacggttgtgggtgatgtagtgtccccagagatgggcgagagtctgttccagctctacatcagcctcaaggagctctgccagctgcgcatgagctcctcagagagggatggagtcctggccctggataatttccaccgctggttccagccggccatcccctcctggctgcagaagacgtacaacgaggccctggcgcgggtgcagcgcgctgtgcagatggatgagctggtgcccctgggtgaactgaccaagcacagcacatcagcggtggatctatccacctgctttgcccagatcagccacactgcccggcagctggactggccagacccagaggaggccttcatgattaccgtcaagtttgtggaggacacctgtcgcctggccctggtgtactgcagccttataaaggcccgggcccgcgagctctcttcaggccagaaggaccaaggccaggcagccaacatgctgtgtgtggtggtgaatgacatggagcagctgcggctggtgatcggcaagttgcccgcccagctggcatgggaggccctggagcagcgggtaggggccgtgctggagcaggggcagctgcagaacacgctgcatgcccagctgcagagcgcgctggccgggctgggccatgagatccgcactggcgtccgcaccctggccgagcagttggaggtgggcatcgccaagcacatccagaaactggtgggcgtcagggagtctgtcctgcctgaggatgccattctgcccctgatgaagttcctggaggtggagctttgctacatgaacaccaacttggtgcaggagaacttcagcagcctcctgaccctgctctggacccacacactcacagtgctggtggaggcggccgctcccagcgcagctcatccctggcttccaacaggctgaagattgccctgcagaacctggagatctgcttccacgctgagggctgtggcctgccacccaaggccctgcacactgccaccttccaggctctgcagagggacctggagctgcaggcggcctccagccgggaactcatccggaagtacttctgcagccgaatccagcagcaggcagaaaccacctctgaggagctgggggctgtgacagtcaaggcctcctaccgcgcctctgagcagaagctgcgtgtggagctgctcagcgcctccagcctgctgcccctggactccaatggctccagcgacccctttgtccagctgaccttggagcccaggcatgagttccctgagctggccgcccgggagacccagaagcacaagaaggaccttcacccattgtttgatgagacctttgaattcctggtgcctgctgagccgtgccgcaaggctggggcatgcctcctgctcaccgtgctggactacgacacgctgggggccgacgacctggaaggcgaggccttcctgccgctgcgtgaggtgcccgggctgagtggctctgaggagcctggtgaggtgcctcagacccgcctgcccctcacgtaccccgcacccaacggggacccaatcctgcagctgctggagggccggaagggtgaccgagaagcccaggtctttgtgaggctgcggcggcaccgggccaagcaggcctcccagcatgccttgcggccggcaccgtagccgtagaggtttgcggtggggctgggtccccggtggggacttgcaagggctttcctgtagggtctggggcttccccgccacatcgcggccctccagcctggcctaacacttggggagccccagcatgcggagtgcccagagtgcagacctcccctgcctcccatggtgatgggggctcagcagcgacatctctactcccgcctccctgcctccagccctggctgcaatgtctctaccacatcccagcaccagggggagcaaaccctgcccctgcccgcctctcagaaaagctgctgtggtgggcaggggattgggccatctgtctcctggccctggcccatctgcctcctggccttcctgttccagccactggggtgggggccaggttcactgggaccagggctacaggcacagagtctcctggaaaagggagaggggaccctgccaaagatgaggctccagctgccctggggggagggtggtggccattactagagggggcctgggtcctctccccaggggctgccagcatccaggccaggaagcctggagccaagaaccttctggctctgagggagcaagagctggcaggcggcagggctggcacagacagacggaagcagaaaggacagtttggctgctgtgtctgctgcgcacgccccctccccggacagcacctgccacctagaaactttcttagcaaaaaaattaataaaaacaaatccattgtcctctta

SEQ ID NO: 376442 - DNA, 3636 bp, Homo sapiens
gggtcctgtagggatcccagctggggaaggtgcaggggcctgggagactgcctctccgaagcggtgaaaccctcacccttccgtccctcccagccaccctccctaaaacttcccctgacagagggtggcagccccaggctctttgcataatcctgtggcttcgctgtcttcacccagcaccagcggacagggaagggcagagaaggccaccatggcgacactcctctcccatccgcagcagcgccctcccttcttgcgccaggccatcaagataaggcgccgcagagtcagagatctacaggatcccccgccccaaatggccccggagatccagcctccatcccaccacttctcccccgagcagcgggccctgctctacgaggacgcactctacactgtcttgcaccgcctgggtcatcctgagcccaaccatgtgacggaggcctctgagctgctgcgatacctgcaggaggccttccacgtggagcccgaggagcaccagcagacactgcagcgggtcagggagcttgagaagccaatattttgtctgaaggcaacagtgaaacaggccaagggcattctgggcaaagatgtcagtggggtcgctgagtccccaggctgccaccgtcctctttctgcacgccacacagaaggacctatccgacttccaccagtccatggcgcagtggctggcctacagccgcctctaccagagcctggagttccccagcagctgcctcctgcaccccatcaccagcatcgagtaccagtggatccagggtcggctcaaggcagaacagcaggaggagctggccgcctcattcagctccctgctgacctacggcctctccctcatccggaggttccgctctgtcttccccctctctgtctcggactccccagcccggctgcagtctcttctcagggtcctggtacagatgtgcaagatgaaggcctttggagaactgtgccccaacaccgccccattgccccagctggtgactgaggccctgcagactggcaccactgaatggttccacctgaagcagcagcaccatcaacccatggtgcagggcatcccggaggcaggcaaggccttgctgggcctggtacaggatgtcattggcgacctgcaccagtgccagcgcacatgggacaagatcttccacaataccctcaagatccacctcttctccatggctttccgggagctgcagtggctggtggccaagcgggtgcaggaccacacgacggttgtgggtgatgtagtgtccccagagatgggcgagagtctgttccagctctacatcagcctcaaggagctctgccagctgcgcatgagctcctcagagagggatggagtcctggccctggataatttccaccgctggttccagccggccatcccctcctggctgcagaagacgtacaacgaggccctggcgcgggtgcagcgcgctgtgcagatggatgagctggtgcccctgggtgaactgaccaagcacagcacatcagcggtggatctatccacctgctttgcccagatcagccacactgcccggcagctggactggccagacccagaggaggccttcatgattaccgtcaagtttgtggaggacacctgtcgcctggccctggtgtactgcagccttataaaggcccgggcccgcgagctctcttcaggccagaaggaccaaggccaggcagccaacatgctgtgtgtggtggtgaatgacatggagcagctgcggctggtgatcggcaagttgcccgcccagctggcatgggaggccctggagcagcgggtaggggccgtgctggagcaggggcagctgcagaacacgctgcatgcccagctgcagagcgcgctggccgggctgggccatgagatccgcactggcgtccgcaccctggccgagcagttggaggtgggcatcgccaagcacatccagaaactggtgggcgtcagggagtctgtcctgcctgaggatgccattctgcccctgatgaagttcctggaggtggagctttgctacatgaacaccaacttggtgcaggagaacttcagcagcctcctgaccctgctctggacccacacactcacagtgctggtggaggcggccgctcccagcgcagctcatccctggcttccaacaggctgaagattgccctgcagaacctggagatctgcttccacgctgagggctgtggcctgccacccaaggccctgcacactgccaccttccaggctctgcagagggacctggagctgcaggcggcctccagccgggaactcatccggaagtacttctgcagccgaatccagcagcaggcagaaaccacctctgaggagctgggggctgtgacagtcaaggcctcctaccgcgcctctgagcagaagctgcgtgtggagctgctcagcgcctccagcctgctgcccctggactccaatggctccagcgacccctttgtccagctgaccttggagcccaggcatgagttccctgagctggccgcccgggagacccagaagcacaagaaggaccttcacccattgtttgatgagacctttgaattcctggtgcctgctgagccgtgccgcaaggctggggcatgcctcctgctcaccgtgctggactacgacacgctgggggccgacgacctggaaggcgaggccttcctgccgctgcgtgaggtgcccgggctgagtggctctgaggagcctggtgaggtgcctcagacccgcctgcccctcacgtaccccgcacccaacggggacccaatcctgcagctgctggagggccggaagggtgaccgagaagcccaggtctttgtgaggctgcggcggcaccgggccaagcaggcctcccagcatgccttgcggccggcaccgtagccgtagaggtttgcggtggggctgggtccccggtggggacttgcaagggctttcctgtagggtctggggcttccccgccacatcgcggccctccagcctggcctaacacttggggagccccagcatgcggagtgcccagagtgcagacctcccctgcctcccatggtgatgggggctcagcagcgacatctctactcccgcctccctgcctccagccctggctgcaatgtctctaccacatcccagcaccagggggagcaaaccctgcccctgcccgcctctcagaaaagctgctgtggtgggcaggggattgggccatctgtctcctggccctggcccatctgcctcctggccttcctgttccagccactggggtgggggccaggttcactgggaccagggctacaggcacagagtctcctggaaaagggagaggggaccctgccaaagatgaggctccagctgccctggggggagggtggtggccattactagagggggcctgggtcctctccccaggggctgccagcatccaggccaggaagcctggagccaagaaccttctggctctgagggagcaagagctggcaggcggcagggctggcacagacagacggaagcagaaaggacagtttggctgctgtgtctgctgcgcacgccccctccccggacagcacctgccacctagaaactttcttagcaaaaaaattaataaaaacaaatccattgtcctctta

SEQ ID NO: 376443 - DNA, 3598 bp, Homo sapiens
  misc_feature (3532)..(3532): n is a, c, g, or t
  misc_feature (3535)..(3535): n is a, c, g, or t
  misc_feature (3563)..(3563): n is a, c, g, or t
gggtcctgtagggatcccagctggggaaggtgcaggggcctgggagactgcctctccgaagcggtgaaaccctcacccttccgtccctcccagccaccctccctaaaacttcccctgacagagggtggcagccccaggctctttgcataatcctgtggcttcgctgtcttcacccagcaccagcggacagggaagggcagagaaggccaccatggcgacactcctctcccatccgcagcagcgccctcccttcttgcgccaggccatcaagataaggcgccgcagagtcagagatctacaggatcccccgccccaaatggccccggagatccagcctccatcccaccacttctcccccgagcagcgggccctgctctacgaggacgcactctacactgtcttgcaccgcctgggtcatcctgagcccaaccatgtgacggaggcctctgagctgctgcgatacctgcaggaggccttccacgtggagcccgaggagcaccagcagacactgcagcgggtcagggagcttgagaagccaatattttgtctgaaggcaacagtgaaacaggccaagggcattctgggcaaagatgtcagtgggttcagcgacccctactgcctgctgggcattgagcagggggtaggtgtgccagggggcagccccgggtcccggcatcggcagaaggctgtggtgaggcacaccatccccgaggaggagacccaccgcacgcaggtcatcacccagacactcaaccccgtctgggacgagaccttcatcctggagtttgaggacatcaccaatgcgagctttcatctggacatgtgggacctggacactgtggagtctgtccgacagaagcttggggagctcacggatctgcatgggcttcgcaggatctttaaagaggcccggaaggacaaaggccaggacgactttctggggaacgtggttctgaggctgcaggacctgcgctgccgagaggaccagtggtaccccctggaaccccgcactgagacctacccagaccgaggccagtgccacctccagttccaactcatccataagcggagagccacttcggccagccgctcgcagccgagctacaccgtgcacctccacctcctgcagcagcttgtgtcccacgaggtcacccagcacgaggcgggaagcacctcctgggacgggtcgctgagtccccaggctgccaccgtcctctttctgcacgccacacagaaggacctatccgacttccaccagtccatggcgcagtggctggcctacagccgcctctaccagagcctggagttccccagcagctgcctcctgcaccccatcaccagcatcgagtaccagtggatccagggtcggctcaaggcagaacagcaggaggagctggccgcctcattcagctccctgctgacctacggcctctccctcatccggaggttccgctctgtcttccccctctctgtctcggactccccagcccggctgcagtctcttctcagggtcctggtacagatgtgcaagatgaaggcctttggagaactgtgccccaacaccgccccattgccccagctggtgactgaggccctgcagactggcaccactgaatggttccacctgaagcagcagcaccatcaacccatggtgcagggcatcccggaggcaggcaaggccttgctgggcctggtacaggatgtcattggcgacctgcaccagtgccagcgcacatgggacaagatcttccacaataccctcaagatccacctcttctccatggctttccgggagctgcagtggctggtggccaagcgggtgcaggaccacacgacggttgtgggtgatgtagtgtccccagagatgggcgagagtctgttccagctctacatcagcctcaaggagctctgccagctgcgcatgagctcctcagagagggatggagtcctggccctggataatttccaccgctggttccagccggccatcccctcctggctgcagaagacgtacaacgaggccctggcgcgggtgcagcgcgctgtgcagatggatgagctggtgcccctgggtgaactgaccaagcacagcacatcagcggtggatctatccacctgctttgcccagatcagccacactgcccggcagctggactggccagacccagaggaggccttcatgattaccgtcaagtttgtggaggacacctgtcgcctggccctggtgtactgcagccttataaaggcccgggcccgcgagctctcttcaggccagaaggaccaaggccaggcagccaacatgctgtgtgtggtggtgaatgacatggagcagctgcggctggtgatcggcaagttgcccgcccagctggcatgggaggccctggagcagcgggtaggggccgtgctggagcaggggcagctgcagaacacgctgcatgcccagctgcagagcgcgctggccgggctgggccatgagatccgcactggcgtccgcaccctggccgagcagttggaggtgggcatcgccaagcacatccagaaactggtgggcgtcagggagtctgtcctgcctgaggatgccattctgcccctgatgaagttcctggaggtggagctttgctacatgaacaccaacttggtgcaggagaacttcagcagcctcctgaccctgctctggacccacacactcacagtgctggtggaggcggccgctcccagcgcagctcatccctggcttccaacaggctgaagattgccctgcagaacctggagatctgcttccacgctgagggctgtggcctgccacccaaggccctgcacactgccaccttccaggctctgcagagggacctggagctgcaggcggcctccagccgggaactcatccggaagtacttctgcagccgaatccagcagcaggcagaaaccacctctgaggagctgggggctgtgacagtcaaggcctcctaccgcgcctctgagcagaagctgcgtgtggagctgctcagcgcctccagcctgctgcccctggactccaatggctccagcgacccctttgtccagctgaccttggagcccaggcatgagttccctgagctggccgcccgggagacccagaagcacaagaaggaccttcacccattgtttgatgagacctttgaattgtgagtgggtcccgttcttctcccagtccctcccctcatctctccccactgggctccctcaggcctgctcctcctggctggggccaaggggctcccctgagatggccacatttgggcccaagggatggggcatctgggacaagagtttgcagctggatgtggtggctcacacctgtcatcacagcactttgggaggccgaggcaggcggatcacttgaggtcaggagttcaagaccagcctggccaacagtctctactaaaaatacaaaattagccgggcatgatggtgggtacctgtactctcagctactcgggaggctgaggcaggagaattgcttaacccaggaggcagaggctgctgaatgaanttnggtgacaacataaaacacccgtgggcangcccacttgggctgattcagagttgaagtctccct

SEQ ID NO: 376444 - DNA, 1151 bp, Homo sapiens
gggtcctgtagggatcccagctggggaaggtgcaggggcctgggagactgcctctccgaagcggtgaaaccctcacccttccgtccctcccagccaccctccctaaaacttcccctgacagagggtggcagccccaggctctttgcataatcctgtggcttcgctgtcttcacccagcaccagcggacagggaagggcagagaaggccaccatggcgacactcctctcccatccgcagcagcgccctcccttcttgcgccaggccatcaagataaggcgccgcagagtcagagatctacaggatcccccgccccaaatggccccggagatccagcctccatcccaccacttctcccccgagcagcgggccctgctctacgaggacgcactctacactgtcttgcaccgcctgggtcatcctgagcccaaccatgtgacggaggcctctgagctgctgcgatacctgcaggaggccttccacgtggagcccgaggagcaccagcagacactgcagcgggtcagggagcttgagaagccaatattttgtctgaaggcaacagtgaaacaggccaagggcattctgggcaaagatgtcagtgggttcagcgacccctactgcctgctgggcattgagcagggggtaggtgtgccagggggcagccccgggtcccggcatcggcagaaggctgtggtgaggcacaccatccccgaggaggagacccaccgcacgcaggtcatcacccagacactcaaccccgtctgggacgagaccttcatcctgtacgtggccgtgctccagcccccactctatccaggtctttcctgggtagcagggtctgccccagacaatgagatgagtaggtcgtcctggctcaggggagggggtttggccctgggcaaagactagaggagaagcccatctccaggcacgttaggtggacagtaggtcagatgggacagaacaagatcaatgccacacgtgctgatggggcaaggagggtcaggcccttgtgggtgagtctgggggtgcctgaagctgtacctgaaaggaggcagggatgggtgcagtggttcccacctgtaatcccagcactttgggaggccaggagactgagaccagcctggccaacatggcaaaaccccatctctac

SEQ ID NO: 376445 - DNA, 1023 bp, Homo sapiens
gggtcctgtagggatcccagctggggaaggtgcaggggcctgggagactgcctctccgaagcggtgaaaccctcacccttccgtccctcccagccaccctccctaaaacttcccctgacagagggtggcagccccaggctctttgcataatcctgtggcttcgctgtcttcacccagcaccagcggacagggaagggcagagaaggccaccatggcgacactcctctcccatccgcagcagcgccctcccttcttgcgccaggccatcaagataaggcgccgcagagtcagagatctacaggatcccccgccccaaatggccccggagatccagcctccatcccaccacttctcccccgagcagcgggccctgctctacgaggacgcactctacactgtcttgcaccgcctgggtcatcctgagcccaaccatgtgacggaggcctctgagctgctgcgatacctgcaggaggccttccacgtggagcccgaggagcaccagcagacactgcagcgggtcagggagcttgagaagccaatattttgtctgaaggcaacagtgaaacaggccaagggcattctgggcaaagatgtcagtgggttcagcgacccctactgcctgctgggcattgagcagggggtaggtgtgccagggggcagccccgggtcccggcatcggcagggctggcacagacagacggaagcagaaaggacagtttggctgctgtgtctgctgcgcacgccccctccccggacagcacctgccacctagaaactttcttagcaaaaaaattaataaaaacaaatccattgtcctcttaaaatatgcctttggcctacagtggggcctggaatgcgagccaggccgggtagcttcctccccagccctcaggggactttgagctaccgccaccttggggtagctacaaagcaggggggtaggtgtggaaataactgaggcagaggcagggctagggtgatttttggccgtgggctttgaataaattgctttaccaggcaaac

SEQ ID NO: 376446 - DNA, 1217 bp, Homo sapiens
agaggagggtcctgtagggatcccagctggggaaggtgcaggggcctgggagactgcctctccgaagcggtgaaaccctcacccttccgtccctcccagccaccctccctaaaacttcccctgacagagggtggcagccccaggctctttgcataatcctgtggcttcgctgtcttcacccagcaccagcggacagggaagggcagagaaggccaccatggcgacactcctctcccatccgcagcagcgccctcccttcttgcgccaggccatcaagataaggcgccgcagagtcagagatctacaggatcccccgccccaaatggccccggaggtaggagtgacctcactggggagagagctggccttggggagcactgtggtctcgggtacgggtgccctgctgtctggccccacctctcgaaggctgggactggggaccagcgaccctcccctgcctactccaccctggggagagccccctgggccagcagagcaggggctgccagatggactctgggccactgtgggcctcaggccctgtggtctgaggctctcagaacccctccctcccggttggcctgaccccatcccctactcctccagcttcagaagagccgactccattaggtgggggtgtccctgctgtggggtgagctgttcggggagcagcagacccccaggccgacgtggcacccccctcacctccgctgccgagcctcacttccgctgctgggtgaggagcaagccgccactgataagcagagctgttccctctggggaagggagggaggtggggtgcgggtgcggagggctcgcgctgctgggcacccatggacctcagccacggcgggcccagggacggacctccaggaggcctgctgggggaacagatccagcctccatcccaccacttctcccccgagcagcgggccctgctctacgaggacgcactctacactgtcttgcaccgcctgggtcatcctgagcccaaccatgtgacggaggcctctgagctgctgcgatacctgcaggagaaccttctggctctgagggagcaagagctggcaggcggcagggctggcacagacagacggaagcagaaaggacagtttggctgctgtgtctgctgcgcacgccccctccccggacagcacctgccacctagaaactttcttagcaaaaaaattaataaaaacaaatccattgtcctctta

SEQ ID NO: 376447 - DNA, 2013 bp, Homo sapiens
tatttattgagcttctgtcatatgcccagtattatgcttcttctatactgtttctctgtgacaagtcatactatattctttatagaattaaaagtagaggagaggcagagtttacatattgtccagttgctttacagttgtacaggaggttataagaagaaatatagtaaattagtgggaagtcagaggtgggggcgttagtgagctattttcttcttgaggttgtgacacaagctgacaaaagccagggagttcacagctgtgtggtggcacaaagttccatatgttctaaaaacaattaggcccagcagggtgtccctaatggcttccttgttaaacctccatggccagctgatctgaagctctgtgacatgttctctgagctctgaatgctctggctttttgtcattttgtcttgagacaagtattttcctgtagtcctcattccttcgagttattccatctcccaggatattctctggtgagaagaatgtctttcagtgaatttgccttgaatttagcatccatagagctgtgtcagtgttcttcttgatcacaccttctttaaaaaaaatacttgcttgcgatgactggacaagttcagttggttagtttcaggcctataagaagagagagtaaaggaccttgctatttactttgataccatagttgtatctcaggatggcctgcaaaccactggccttgtgtgtatttaagctaggaataaaataatggagaagtgttaatatgtatacaaaaaggtaaatattgatatatctactctctgttgggggcagaagtgtcattttaagttattcaaagcactttcttaagcattttagaaagcctttattctttgctgttggaagtctccgtactttgcagaattggtatttgtgtactagcctctgccgcaggatggggaggtgggcaggtagctgataggggcagccaggagtttttgaggcaggtggtgggaaattgtcctaatttgttaattggattatgtaactctgttactagtctgttattggctgttgttactggatgcatcttgatattcagaagaataactgtgaggcattcttcagttgcgggttaagtggggttagtttctgttctgtcagatgccctttttcagtcaaaggttagccccttgtttctccctccttccagggtttagggagtgcagtgatgtcgatttcatttcccttccccgcaccccttgacactcagcaggattgcactgaaacccttcacagatctctcgttcactagttgtctcctatttttccataactagcactagtttggccttatgacctggttagaatcactcttctgtattctcatttccaatttttgtgccccactaacgtggactagagaaacttggcctgctgtgcagtgggccttctgttcaacttaccctccaccgctgaccctgtgtgaagagagatggtgcgttactgccatctaatgggaaaagagaaaactgcagttgggaaaagcagctgtgcatttaagggtagggctttctgaaggatttctgatacagtccagaaaagggaaaatgatgacacagcagttgccatcttgaaaaatgccctttcctgcggaaagggtgttttgaagtctaatacaactatcatcacaaggtccctggactaaggctggatcgtgtaatttagaatctcaaattgtattttaattaatatgctggcaacagaatcattgaaacaggcatctcattttgtcaagttcttagccgttcagtttgtcaggggctttaatattttagatatcaactaatacatagtttcaacttttaaaaatgtttgaagattgtatgtaatataggtgcctatctatagtgccttagtaatttaaatcagaaatattttataaaacttctggttgttttgcagtagccaatataggcttcatgccctcctgaagatagtttcctctgaaatgtaactttaaataaacattattccaagaaaactacag

SEQ ID NO: 376448 - DNA, 893 bp, Homo sapiens
ggcggcccgaagagatgcgttcggcaagttagccccttgtttctccctccttccagggtttagggagtgcagtgatgtcgatttcatttcccttccccgcaccccttgacactcagcaggattgcactgaaacccttcacagatctctcgttcactagttgtctcctatttttccataactagcactagtttggccttatgacctggttagaatcactcttctgtattctcatttccaatttttgtgccccactaacgtggactagagaaacttggcctgctgtgcagtgggccttctgttcaacttaccctccaccgctgaccctgtgtgaagagagatggtgcgttactgccatctaatgggaaaagagaaaactgcagttgggaaaagcagctgtgcatttaagggtagggctttctgaaggatttctgatacagtccagaaaagggaaaatgatgacacagcagttgccatcttgaaaaatgccctttcctgcggaaagggtgttttgaagtctaatacaactatcatcacaaggtccctggactaaggctggatcgtgtaatttagaatctcaaattgtattttaattaatatgctggcaacagaatcattgaaacaggcatctcattttgtcaagttcttagccgttcagtttgtcaggggctttaatattttagatatcaactaatacatagtttcaacttttaaaaatgtttgaagattgtatgtaatataggtgcctatctatagtgccttagtaatttaaatcagaaatattttataaaacttctggttgttttgcagtagccaatataggcttcatgccctcctgaagatagtttcctctgaaatgtaactttaaataaacattattccaagaaaactacag

SEQ ID NO: 376449 - DNA, 1204 bp, Homo sapiens
tatttattgagcttctgtcatatgcccagtattatgcttcttctatactgtttctctgtgacaagtcatactatattctttatagaattaaaagtagaggagaggcagagtttacatattgtccagttgctttacagttgtacaggaggttataagaagaaatatagtaaattagtgggaagtcagaggtgggggcgttagtgagctattttcttcttgaggttgtgacacaagctgacaaaagccagggagttcacagctgtgtggtggcacaaagttccatatgttctaaaaacaattaggcccagcagggtgtccctaatggcttccttgttaaacctccatggccagctgatctgaagctctgtgacatgttctctgagctctgaatgctctggctttttgtcattttgtcttgagacaagtattttcctgtagtcctcattccttcgagttattccatctcccaggatattctctggtgagaagaatgtctttcagtgaatttgccttgaatttagcatccatagagctgtgtcagtgttcttcttgatcacaccttctttaaaaaaaatacttgcttgcgatgactggacaagttcagttggttagtttcaggccctccaccgctgaccctgtgtgaagagagatggtgcgttactgccatctaatgggaaaagagaaaactgcagttgggaaaagcagctgtgcatttaagggtagggctttctgaaggatttctgatacagtccagaaaagggaaaatgatgacacagcagttgccatcttgaaaaatgccctttcctgcggaaagggtgttttgaagtctaatacaactatcatcacaaggtccctggactaaggctggatcgtgtaatttagaatctcaaattgtattttaattaatatgctggcaacagaatcattgaaacaggcatctcattttgtcaagttcttagccgttcagtttgtcaggggctttaatattttagatatcaactaatacatagtttcaacttttaaaaatgtttgaagattgtatgtaatataggtgcctatctatagtgccttagtaatttaaatcagaaatattttataaaacttctggttgttttgcagtagccaatataggcttcatgccctcctgaagatagtttcctctgaaatgtaactttaaataaacattattccaagaaaactacag

SEQ ID NO: 376450 - DNA, 588 bp, Homo sapiens
gatttttttttgtgtgtgagataattaggaaagaagatttattgtttacccttgcagtgtttatggggggaaaaggtatttacagaattactgttgctagcgagaatatacagtaaagtttaaaacattttggagaattgattttgattcttaaaatgtgtctttttgcaacatatgctctggttacctataaatacattaatttggcccttgaaaacattcacatcctattctttgttagccttatttttccagtccttgttaactctctcagtgctggataataaacctgcatttcttttaaaacatttgttcagtttcggcatcagtgtcttcccccagcactcccttaatctaaattagtaacattttactgtatgaaaaatagttgctgttaactaaaaattcaataggtgagttagacatggcttttcaagtaggattttcagtggcttcagattccatcatacacaagtgtatgttttttctgtgtaagttttttccgtgtaagttttttgacatagcagactaaagtggggagaagatggttgagcacttacggttgagcacggaaaaaacttacacgga

SEQ ID NO: 376451 - DNA, 525 bp, Homo sapiens
gatttttttttgtgtgtgagataattaggaaagaagatttattgtttacccttgcagtgtttatggggggaaaaggtatttacagaattactgttgctagcgagaatatacagtaaagtttaaaacattttggagaattgattttgattcttaaaatgtgtctttttgcaacatatgctctggttacctataaatacattaatttggcccttgaaaacattcacatcctattctttgttagccttatttttccagtccttgttaactctctcagtgctggataataaacctgcatttcttttaaaacatttgttcagtttcggcatcagtgtcttcccccagcactcccttaatctaaattagtaacattttactgtatgaaaaatagttgctgttaattcggcacgaggcgcaatgcttttttttttttttttttttacaaactgaaattcaatccatttatttacacgtacattgtacataagtttacaaattctcacttctgccactcagctagaacttttc

SEQ ID NO: 376452 - DNA, 549 bp, Homo sapiens
  misc_feature (168)..(168): n is a, c, g, or t
cattggtccgagagaaattaggaaattgggagggtggaagaggataagagggtgtgtgatacttgagtttgagctctcataggtagacagttggagttgatgaaaaggtcaaaggtaaggccatgggaattagttctcagtggagcttatgtgaatgctaatttctcncggagccggtccattggtccgagagaaattagaaatgcctgtatagatgtcctcaaggaacttgtacttttgagtccccatgattttcttcatactctggttccctttctacaacacaaccattgtacttaccatcacagtaatataccataatttctctcggaccaatgcattggtccgagagaaattagttgtcagctcagcaaagatacaacctggataaagaacttcaggagcttgggagatgacagatcagatgccacagaaaaggggtgccaccctgtaaataggtttgatttctgtaaaagtgttctctgagcctaaatgggaaagaagccttcctactgtgaggtaatactatgtgaatttttggaaaccatg

SEQ ID NO: 376453 - DNA, 1109 bp, Homo sapiens
aaaatatagaaaatatgcagttatgactagaaatagctgtaatattgtacctgcagagttgagtatctcactagtataatttataattataacctattctgatttcttttcaaatattaggtgtcctagttgcctatgaaggtttgccacttcatcttgcactgttccccaaactttggactgagctatgccagactcaggtaaagaaaatgagttttagatgattggtctttaatcttatctgaccaagtggtcaataattttaggaacagtgggttgaagacttgctgaaaagtggggacattttagaatcttgataggtaacatatgaatgaatgaaaatactagctattacatattaggcatctagtttccctttgatttttttaacttaagtagatttctatcatagaggatattttaaataagctggttataattgaatttctcatttatagatgtatatcaacagttgtggggaaaatccaaaacagggagatagtgggggaaaaggcacttgccacttcttcctctccttcacctccctgtctctacctcttttccaccattccaaaacctctagcagaaaccctgtcagcagtctgtcctttagcttttcataatctgtagtttttcaggggtctgatgcacttgttttcttacagcgatctccttgaaaacaggaaagattactgttcctaccttaagtgtctaagagccaactccttaaaattaagtggctgcataaataatgcttgttaagttacaaaggcagaattgggaagaggaggaggtactaatgtttggctcattccttggatcaggcataaaggatccccactacctttcagtccctgaaaaaactgttgattgtactgcctggttgcatctgctctaccccattggaagagatgaatttattcaccttccttaggtgcaacccttgacccacatcatgctttcctgaagtattttgagtctggttcagcctcctaccaggctgtagtgtgctctggattctcctagatgtttgccatcctgtactctactggtggtttctctacttttccaaaacagaactcaagtgtagagaccttatcagagtcatc

SEQ ID NO: 376454 - DNA, 616 bp, Homo sapiens
tttggttaaattcctgtcttctgcaatttgaccaagactcctgtcttccctggtccccactgtgggaccaaaaccatgttttattgcttctttgtttcctttatgtttctgtagcagacaattcttttaagattttctgaagagtgttgttttttgcagtgggaagaaagtacgagctgaaaaaagggcatgttttaagaaattgcctcgcattttgagtttcaatactatgagatacacatttaatatggtcacgatgatgaaagagaaagtgaatacacacttttccttcccattacgtttggacatgacgccctatacagaagattttcttatgggaaagagtgagaggaaagaaggttttaaagaagtcagtgatcattcaaaagactcagagagctatgaatatgacttgataggagtgactgttcacacaggaacggcagatggtggacactattatagctttatcagagatatagtaaatccccatgcttataaaaacaataaatggtatctttttaatgatgctgaggtaaaaccttttgattctgctcaacttgcatctgaatgttttggtggagagatgacggtaagttttattcagaaattataa

SEQ ID NO: 376455 - DNA, 8182 bp, Homo sapiens
  misc_feature (1184)..(1184): n is a, c, g, or t
  misc_feature (2847)..(2847): n is a, c, g, or t
  misc_feature (2902)..(2902): n is a, c, g, or t
  misc_feature (4118)..(4118): n is a, c, g, or t
  misc_feature (4546)..(4546): n is a, c, g, or t
  misc_feature (4620)..(4620): n is a, c, g, or t
aggagagtgaatgcaaagcatataatcctagacctgtctgtaaaacatacaccatggataagcagcctctgaatactgggggacagaaagatatgacagagttttttactgatctaattaccaaaatcgaagaaatgtctcccgaactgaaaaataccgtcaaaagtttatttggaggtgtaattacaaacaatgtcgtatccttggattgtgaacatgttagtcaaactgctgaagagttttatactgtgaggtgccaagtggctgatatgaagaacatttatgaatctcttgatgaagttactataaaagacactttggaaggtgataacatgtatacttgttctcattgtgggaagaaagtacgagctgaaaaaagggcatgttttaagaaattgcctcgcattttgagtttcaatactatgagatacacatttaatatggtcacgatgatgaaagagaaagtgaatacacacttttccttcccattacgtttggacatgacgccctatacagaagattttcttatgggaaagagtgagaggaaagaaggttttaaagaagtcagtgatcattcaaaagactcagagagctatgaatatgacttgataggagtgactgttcacacaggaacggcagatggtggacactattatagctttatcagagatatagtaaatccccatgcttataaaaacaataaatggtatctttttaatgatgctgaggtaaaaccttttgattctgctcaacttgcatctgaatgttttggtggagagatgacgaccaagacctatgattctgttacagataaatttatggacttctcttttgaaaagacacacagtgcatatatgctgttttacaaacgcatggaaccagaggaagaaaatggcagagaatacaaatttgatgtttcgtcagagttactagagtggatttggcatgataacatgcagtttcttcaagacaaaaacatttttgaacatacatattttgggtaagtttggtaaatttcatagtagatattttacacattttaaaaaaatcttacgtgtgaattttaaatgattatttttaaattctagatttatgtggcaattgtgtagttgtattcccagtacattaccagatcctaaagctgtgtccttaatgacagcaaaggtaataaatatatgaacttnaaataattctgtcaaaatttactactttaaaatgattgaagcttttttgctttatcttttcttacagttaagcacttcctttgtcctagagacatttattcattctaaagaaaagcccacgatgcttcagtggattgaactgttgacgaaacagtttaataatagtcaggcagcttgtgagtggtttttagatcgtatggctgatgacgactggtggccaatgcagatactaattaagtgccctaatcaaattgtgagacagatgtttcagcgtttgtgtatccatgtgattcagaggctgagacctgtgcatgctcatctctatttgcagccaggaatggaagatgggtcagatgatatggatacctcagtagaagatattggtggtcgttcatgtgtcactcgctttgtgagaaccctgttattaattatggaacatggtgtaaaacctcacagtaaacatcttacagagtattttgccttcctttacgaatttgcaaaaatgggtgaagaagagagccaatttttgctttcattgcaagctatatctacaatggtacatttttacatgggaacaaaaggacctgaaaatcctcaagttgaagtgttatcagaggaagaaggggaagaagaagaggaggaagaagatatcctctctctggcagaagaaaaatacaggccagctgcccttgaaaagatgatagctttagttgctcttttggttgaacagtctcgatcagaaaggcatttgacattatcacagactgacatggcagcattaacaggaggaaagggatttcccttcttgtttcaacatattcgtgatggcatcaatataagacaaacttgtaatctgattttcagcctgtgtcgatacaataatcgacttgcagaacatattgtatctatgcttttcacatcaatagcaaagttgactcctgaggcagccaatcctttctttaagttgttgactatgctaatggagtttgctggtggacctccaggaatgcctccctttgcatcttatattctgcagaggatatgggaggtgattgaatacaatccttctcagtgtctagattggttggcagtgcagacaccccgaaataaactggcacacagctgggtcttacagaatatggaaaactgggtcgagcggtttcttttggctcacaattatcctagagtgaggacttgcagtagaagaactgtttaacctgatgcagctgtttatagctcagaggccagatatgagagaagaagaattagaagatattaaacagttcaagaaaacaaccataagttgttacttacgttgcttagatggccgctcctgctggactactttaataagtgccttcagaatactattagaatctgatgaagacagacttcttgttgtatttaatcgaggattgattctaatgacagaggtaaatattctattgcattttactgtggatattatctcattttaatgttctcaccaagacttactttatagacatttagagtttatggtaaactgttttacaggtggcaaggttttaattatatagatcagtaaacctgaatttatatcccaagaataattaggtcataatttttagggtgctgttcctttttccatagtaattccatacttttcccattattttgtatntagaacagccatttgaaatagactagttttattcatttgtagggacaaaaatganatacatgtgatttcattaagggcacacataatttcccaaaagcctacttatttgacagtatagaaactgaggttaccattgtgaacccggaaaatctgagacaggtctcagttaatttagaaagtttattttgccaaggttgaggacgcgcccgtgacacagcctcaggaagtcctgatggcacgtgcccaaggtggttgggacacagcttgattttatacattttagggagacatgagacatcaatctgtatgtaggaagtacattagctctgtccagaaaggcagagacaacccaaagcaaggcctctccttcctctggggccttcctggtcacaggtatgtgagagacagatggttgcgttcttttgagtttctgataagtctttccaaaggaggcaatcagaatatgcatctatctgggtgagcagagggatgactttgaatagtatgagaggccgatttgccctgagcggttcccagcttgaaggggcccaagatattttcctttcacaccatcctcagaggaaaccagaaggactattacagggttaaaatcagctgtttatgcttcctataattcttgaacatccacaagtatgagatggctgcagagtcaccagaggtacgtgagccctttagtctgataaacatgccaagagtaccataagaattcacaggtaggatgttttttcagttaatgataataaaaaataagagaacaggtttgcactttgaagaatgtggatttgcaaaggtaagggggaaaacatttagataaatgacaataagcactgaggcaaagaaatattggttatgtttgaggaaggctaagtattaaaaaaaaggtaggtgaagaggagtagtaagaatttcattctttaaaatgcaacagatgtttatgctgctttggttgtatttttagaaaaaaaaaatttttttttaatgcaacagatgtttaaatgtctacctctgtgccaagcactgtggtaggtactagggacacagcagtgaacaagacatactggtttctgtccccacagcttacaagttacatactgtacaagtacattgttcatattaggtactgctgcaggttctgggctaagaattttaacatttgaactgtgggtattacagtgtgtaagctgtagtgaactggtggaagaggattcaaagaagggtgctgtatagtaaaataggaaaaaaactaaggncttaattaagctaatacagttaaaggaattaaaagatttaacaagccaatataaaggaaatgaattcctaccttttgcagctctttttacctctttcaggcctactcttttgagtatggctgacagtcactttaccattgtctttggacagagaccctggaaagttggttaaagcagttgcctattctccctaatcttttgtgacctactgctttgtaattttgaagacttaacaatcttagagcaagtacttttttaaaaaaatgtgattaaactatttcttcagactagaatatacacacaaaatagcagagctctgaaggtgaggaatgtttaaaagagcttaatgagagtttaacttcaggatagaaagcaaatacgtttgctttgcacacatgtgcacacacagtctgagtctgaaaacatcnatcgtagaggacgagtactaccattttgtggctcagtaagcaaaaatgaaattaagttttcaattttttcaaancatttgtagtctttcaacactttgcacatgatgtatcacgaagctacagcttgccatgtgactggagatttagtagaacttctgtcaatatttctttcggttttgaagtctacacgcccttatcttcagagaaaagatgtgaaacaagcattaatccagtggcaggagcgaattgaatttgcccataaactgttaactcttcttaattcctatagtcctccagaacttagaaatgcctgtatagatgtcctcaaggaacttgtacttttgagtccccatgattttcttcatactctggttccctttctacaacacaaccattgtacttaccatcacagtaatataccatttctctcggaccttatttcccttgtcgagaaaatatcaagctaataggagggaaaagcaatattcggcctccgcgccctgaactcaatatgtgcctcttgcccacaatggtggaaaccagtaagggcaaagatgacgtttatgatcgtatgctgctagactacttcttttcttatcatcagttcatccatctattatgccgagttgcaatcaactgtgaaaaatttactgaaacattagttaagctgagtgtcctagttgcctatgaaggtttgccacttcatcttgcactgttccccaaactttggactgagctatgccagactcagtctgctatgtcaaaaaactgcatcaagcttttgtgtgaagatcctgttttcgcagaatatattaaatgtatcctaatggatgaaagaacttttttaaacaacaacattgtctacacgttcatgacacatttccttctaaaggttcaaagtcaagtgttttctgaagcaaactgtgccaatttgatcagcactcttattacaaacttgataagccagtatcagaacctacagtctgatttctccaaccgagttgaaatttccaaagcaagtgcttctttaaatggggtaagaactatgcagaggcggcggcacacacttttaaactgtccttcagttaactgtgtggccttcatatgattttactctcgtaactttaacttactgattcaaactcttaagccatgtgcgacaaaaaaacaagttttaaatacacgtttactatgccttgtatgtacacagcacactctatcaccttggaagctacaagctggtatcattaaatgctgaaaggtaataaagggaacatcttagtggtcttatctctacttgggtatatttttggaaacaatacttgtgatgtttctattactgcctatggctcctatgtaactgaaacaattaatgatctactgatttaaaaaaggcagttaaatctagagcattagttgccttgtgcagactcccatgacagccatgtcctagaataatggaacactctggaaatgggctagaatgttgagcagcagcctcccaaatcacagtatgcataaaagccaaaacagatgacagagctcagtaaggaagaccttactatttgtgacatccatcagaattttaacttgagaaactgatttcaaggtttgtttttaaaattcttatatttccttttccatttttcagaaaacactatttcaggctttggtctgacttactggttcgtgggcataaaataatgctattagtgactttaagaactaatgaggctgggcacggtggctcatgcctgcaatccaagcattttgggaggtcgaggccggtggataacgaggtcaggagattgagaccatcctggccaacatggtgaaaccctgtctctactaaaatagaaaaaattaagccaggcgtggtggcgggcgcctgtagtcccagctacttgggaggctgagggaggggaatcgcttgaacccgggtggtggaggttgcagcgagccgagattacaccactgcactccagccttgccaaagaacaagactccatctcaaaaaaaacaaaaacaaaacaaaaaaaaaaacaactaatgaaatgctgtagtatcttaacactggctttctggttttatcattctaagaatcccagagaaaccagggtattcttaggaaagaatggattcctgggaaaataaacatctgcaattaactgtaaacaactgcatcaaagtgttggctttagaatttgaaatgttcctatctgggtttttgtaggacctgagggcactcgctttgctcctgtcagtacacactcccaaacagttaaacccagctctaattccaactctgcaagagcttttaagcaaatgcaggacttgtctgcaacagagaaactcactccaagagcaagaagccaaagaaagaaaaactaaagatgatgaaggagcaactcccattaaaaggcggcgtgttagcagtgatgaggagcacactgtagacagctgcatcagtgacatgaaaacagaaaccagggaggtcctgaccccaacgagcacttctgacaatgagaccagagactcctcaattattgatccaggaactgagcaagatcttccttcccctgaaaatagttctgttaaagaataccgaatggaagttccatcttcgttttcagaagacatgtcaaatatcaggtcacagcatgcagaagaacagtccaacaatggtagatatgacgattgtaaagaatttaaagacctccactgttccaaggattctaccctagccgaggaagaatctgagttcccttctacttctatctctgcagttctgtctgacttagctgacttgagaagctgtgatggccaagctttgccctcccaggaccctgaggttgctttatctctcagttgtggccattccagaggactctttagtcatatgcagcaacatgacattttagataccctgtgtaggaccattgaatctacaatccatgtcgtcacaaggatatctggcaaaggaaaccaagctgcttcttgacattaggtgtagcatgtctacttttaagtccctcacccccaacccccatgctgtttgtataagttttgcttatttgtttttgtgcttcagtttgtccagtgctctctgcttgaatggcaagatagatttataggcttaattcttggtcaggcagaactccagatgaaaaaaacttgcatcttcagtatacttcctaaagggcaatcagataatggatatgttttatgtaattaagagttcactttagtggctttcatttaatatggctgtctgggaagaacagggttgcctagccctgtacaatgtaatttaaacttacagcatttttactgtgtatgatatggtgtcctctgtgccagttttgtaccttatagaggcagattgcctccgatcgctgtggttcttattatcaaaattaagtttacttgtatacggaacaaccacaagaaatttgattctgtaaagaatcctctttagctgtggcctggcagtatataaatggtgctttatttaacagaatacctgtggaggaaataaagcacacttgatgtaaaaataattgttttatttttattgacatgactgattgattgctattctgtgcacttaattaaactgattgtgatgacttttca

SEQ ID NO: 376456 - DNA, 8382 bp, Homo sapiens
  misc_feature (1184)..(1184): n is a, c, g, or t
  misc_feature (2847)..(2847): n is a, c, g, or t
  misc_feature (2902)..(2902): n is a, c, g, or t
  misc_feature (4118)..(4118): n is a, c, g, or t
  misc_feature (4546)..(4546): n is a, c, g, or t
  misc_feature (4620)..(4620): n is a, c, g, or t
aggagagtgaatgcaaagcatataatcctagacctgtctgtaaaacatacaccatggataagcagcctctgaatactgggggacagaaagatatgacagagttttttactgatctaattaccaaaatcgaagaaatgtctcccgaactgaaaaataccgtcaaaagtttatttggaggtgtaattacaaacaatgtcgtatccttggattgtgaacatgttagtcaaactgctgaagagttttatactgtgaggtgccaagtggctgatatgaagaacatttatgaatctcttgatgaagttactataaaagacactttggaaggtgataacatgtatacttgttctcattgtgggaagaaagtacgagctgaaaaaagggcatgttttaagaaattgcctcgcattttgagtttcaatactatgagatacacatttaatatggtcacgatgatgaaagagaaagtgaatacacacttttccttcccattacgtttggacatgacgccctatacagaagattttcttatgggaaagagtgagaggaaagaaggttttaaagaagtcagtgatcattcaaaagactcagagagctatgaatatgacttgataggagtgactgttcacacaggaacggcagatggtggacactattatagctttatcagagatatagtaaatccccatgcttataaaaacaataaatggtatctttttaatgatgctgaggtaaaaccttttgattctgctcaacttgcatctgaatgttttggtggagagatgacgaccaagacctatgattctgttacagataaatttatggacttctcttttgaaaagacacacagtgcatatatgctgttttacaaacgcatggaaccagaggaagaaaatggcagagaatacaaatttgatgtttcgtcagagttactagagtggatttggcatgataacatgcagtttcttcaagacaaaaacatttttgaacatacatattttgggtaagtttggtaaatttcatagtagatattttacacattttaaaaaaatcttacgtgtgaattttaaatgattatttttaaattctagatttatgtggcaattgtgtagttgtattcccagtacattaccagatcctaaagctgtgtccttaatgacagcaaaggtaataaatatatgaacttnaaataattctgtcaaaatttactactttaaaatgattgaagcttttttgctttatcttttcttacagttaagcacttcctttgtcctagagacatttattcattctaaagaaaagcccacgatgcttcagtggattgaactgttgacgaaacagtttaataatagtcaggcagcttgtgagtggtttttagatcgtatggctgatgacgactggtggccaatgcagatactaattaagtgccctaatcaaattgtgagacagatgtttcagcgtttgtgtatccatgtgattcagaggctgagacctgtgcatgctcatctctatttgcagccaggaatggaagatgggtcagatgatatggatacctcagtagaagatattggtggtcgttcatgtgtcactcgctttgtgagaaccctgttattaattatggaacatggtgtaaaacctcacagtaaacatcttacagagtattttgccttcctttacgaatttgcaaaaatgggtgaagaagagagccaatttttgctttcattgcaagctatatctacaatggtacatttttacatgggaacaaaaggacctgaaaatcctcaagttgaagtgttatcagaggaagaaggggaagaagaagaggaggaagaagatatcctctctctggcagaagaaaaatacaggccagctgcccttgaaaagatgatagctttagttgctcttttggttgaacagtctcgatcagaaaggcatttgacattatcacagactgacatggcagcattaacaggaggaaagggatttcccttcttgtttcaacatattcgtgatggcatcaatataagacaaacttgtaatctgattttcagcctgtgtcgatacaataatcgacttgcagaacatattgtatctatgcttttcacatcaatagcaaagttgactcctgaggcagccaatcctttctttaagttgttgactatgctaatggagtttgctggtggacctccaggaatgcctccctttgcatcttatattctgcagaggatatgggaggtgattgaatacaatccttctcagtgtctagattggttggcagtgcagacaccccgaaataaactggcacacagctgggtcttacagaatatggaaaactgggtcgagcggtttcttttggctcacaattatcctagagtgaggacttgcagtagaagaactgtttaacctgatgcagctgtttatagctcagaggccagatatgagagaagaagaattagaagatattaaacagttcaagaaaacaaccataagttgttacttacgttgcttagatggccgctcctgctggactactttaataagtgccttcagaatactattagaatctgatgaagacagacttcttgttgtatttaatcgaggattgattctaatgacagaggtaaatattctattgcattttactgtggatattatctcattttaatgttctcaccaagacttactttatagacatttagagtttatggtaaactgttttacaggtggcaaggttttaattatatagatcagtaaacctgaatttatatcccaagaataattaggtcataatttttagggtgctgttcctttttccatagtaattccatacttttcccattattttgtatntagaacagccatttgaaatagactagttttattcatttgtagggacaaaaatganatacatgtgatttcattaagggcacacataatttcccaaaagcctacttatttgacagtatagaaactgaggttaccattgtgaacccggaaaatctgagacaggtctcagttaatttagaaagtttattttgccaaggttgaggacgcgcccgtgacacagcctcaggaagtcctgatggcacgtgcccaaggtggttgggacacagcttgattttatacattttagggagacatgagacatcaatctgtatgtaggaagtacattagctctgtccagaaaggcagagacaacccaaagcaaggcctctccttcctctggggccttcctggtcacaggtatgtgagagacagatggttgcgttcttttgagtttctgataagtctttccaaaggaggcaatcagaatatgcatctatctgggtgagcagagggatgactttgaatagtatgagaggccgatttgccctgagcggttcccagcttgaaggggcccaagatattttcctttcacaccatcctcagaggaaaccagaaggactattacagggttaaaatcagctgtttatgcttcctataattcttgaacatccacaagtatgagatggctgcagagtcaccagaggtacgtgagccctttagtctgataaacatgccaagagtaccataagaattcacaggtaggatgttttttcagttaatgataataaaaaataagagaacaggtttgcactttgaagaatgtggatttgcaaaggtaagggggaaaacatttagataaatgacaataagcactgaggcaaagaaatattggttatgtttgaggaaggctaagtattaaaaaaaaggtaggtgaagaggagtagtaagaatttcattctttaaaatgcaacagatgtttatgctgctttggttgtatttttagaaaaaaaaaatttttttttaatgcaacagatgtttaaatgtctacctctgtgccaagcactgtggtaggtactagggacacagcagtgaacaagacatactggtttctgtccccacagcttacaagttacatactgtacaagtacattgttcatattaggtactgctgcaggttctgggctaagaattttaacatttgaactgtgggtattacagtgtgtaagctgtagtgaactggtggaagaggattcaaagaagggtgctgtatagtaaaataggaaaaaaactaaggncttaattaagctaatacagttaaaggaattaaaagatttaacaagccaatataaaggaaatgaattcctaccttttgcagctctttttacctctttcaggcctactcttttgagtatggctgacagtcactttaccattgtctttggacagagaccctggaaagttggttaaagcagttgcctattctccctaatcttttgtgacctactgctttgtaattttgaagacttaacaatcttagagcaagtacttttttaaaaaaatgtgattaaactatttcttcagactagaatatacacacaaaatagcagagctctgaaggtgaggaatgtttaaaagagcttaatgagagtttaacttcaggatagaaagcaaatacgtttgctttgcacacatgtgcacacacagtctgagtctgaaaacatcnatcgtagaggacgagtactaccattttgtggctcagtaagcaaaaatgaaattaagttttcaattttttcaaancatttgtagtctttcaacactttgcacatgatgtatcacgaagctacagcttgccatgtgactggagatttagtagaacttctgtcaatatttctttcggttttgaagtctacacgcccttatcttcagagaaaagatgtgaaacaagcattaatccagtggcaggagcgaattgaatttgcccataaactgttaactcttcttaattcctatagtcctccagaacttagaaatgcctgtatagatgtcctcaaggaacttgtacttttgagtccccatgattttcttcatactctggttccctttctacaacacaaccattgtacttaccatcacagtaatataccatttctctcggaccttatttcccttgtcgagaaaatatcaagctaataggagggaaaagcaatattcggcctccgcgccctgaactcaatatgtgcctcttgcccacaatggtggaaaccagtaagggcaaagatgacgtttatgatcgtatgctgctagactacttcttttcttatcatcagttcatccatctattatgccgagttgcaatcaactgtgaaaaatttactgaaacattagttaagctgagtgtcctagttgcctatgaaggtttgccacttcatcttgcactgttccccaaactttggactgagctatgccagactcagtctgctatgtcaaaaaactgcatcaagcttttgtgtgaagatcctgttttcgcagaatatattaaatgtatcctaatggatgaaagaacttttttaaacaacaacattgtctacacgttcatgacacatttccttctaaaggttcaaagtcaagtgttttctgaagcaaactgtgccaatttgatcagcactcttattacaaacttgataagccagtatcagaacctacagtctgatttctccaaccgagttgaaatttccaaagcaagtgcttctttaaatggggtaagaactatgcagaggcggcggcacacacttttaaactgtccttcagttaactgtgtggccttcatatgattttactctcgtaactttaacttactgattcaaactcttaagccatgtgcgacaaaaaaacaagttttaaatacacgtttactatgccttgtatgtacacagcacactctatcaccttggaagctacaagctggtatcattaaatgctgaaaggtaataaagggaacatcttagtggtcttatctctacttgggtatatttttggaaacaatacttgtgatgtttctattactgcctatggctcctatgtaactgaaacaattaatgatctactgatttaaaaaaggcagttaaatctagagcattagttgccttgtgcagactcccatgacagccatgtcctagaataatggaacactctggaaatgggctagaatgttgagcagcagcctcccaaatcacagtatgcataaaagccaaaacagatgacagagctcagtaaggaagaccttactatttgtgacatccatcagaattttaacttgagaaactgatttcaaggtttgtttttaaaattcttatatttccttttccatttttcagaaaacactatttcaggctttggtctgacttactggttcgtgggcataaaataatgctattagtgactttaagaactaatgaggctgggcacggtggctcatgcctgcaatccaagcattttgggaggtcgaggccggtggataacgaggtcaggagattgagaccatcctggccaacatggtgaaaccctgtctctactaaaatagaaaaaattaagccaggcgtggtggcgggcgcctgtagtcccagctacttgggaggctgagggaggggaatcgcttgaacccgggtggtggaggttgcagcgagccgagattacaccactgcactccagccttgccaaagaacaagactccatctcaaaaaaaacaaaaacaaaacaaaaaaaaaaacaactaatgaaatgctgtagtatcttaacactggctttctggttttatcattctaagaatcccagagaaaccagggtattcttaggaaagaatggattcctgggaaaataaacatctgcaattaactgtaaacaactgcatcaaagtgttggctttagaatttgaaatgttcctatctgggtttttgtaggacctgagggcactcgctttgctcctgtcagtacacactcccaaacagttaaacccagctctaattccaactctgcaagagcttttaagcaaatgcaggacttgtctgcaacagagaaactcactccaagagcaagaagccaaagaaagaaaaactaaaggttagctttatggactactatcattacctttagggtgggaggagggagtaatacacttggtgtaactggtttaagagttgtgtgttcagctgaacctcctaaatataaatgctagaaacaaaattaacttcccacatccccccctaacgtgatcttaatgactttcagagaagtttcccttttggcatgtgttttcacagatgatgaaggagcaactcccattaaaaggcggcgtgttagcagtgatgaggagcacactgtagacagctgcatcagtgacatgaaaacagaaaccagggaggtcctgaccccaacgagcacttctgacaatgagaccagagactcctcaattattgatccaggaactgagcaagatcttccttcccctgaaaatagttctgttaaagaataccgaatggaagttccatcttcgttttcagaagacatgtcaaatatcaggtcacagcatgcagaagaacagtccaacaatggtagatatgacgattgtaaagaatttaaagacctccactgttccaaggattctaccctagccgaggaagaatctgagttcccttctacttctatctctgcagttctgtctgacttagctgacttgagaagctgtgatggccaagctttgccctcccaggaccctgaggttgctttatctctcagttgtggccattccagaggactctttagtcatatgcagcaacatgacattttagataccctgtgtaggaccattgaatctacaatccatgtcgtcacaaggatatctggcaaaggaaaccaagctgcttcttgacattaggtgtagcatgtctacttttaagtccctcacccccaacccccatgctgtttgtataagttttgcttatttgtttttgtgcttcagtttgtccagtgctctctgcttgaatggcaagatagatttataggcttaattcttggtcaggcagaactccagatgaaaaaaacttgcatcttcagtatacttcctaaagggcaatcagataatggatatgttttatgtaattaagagttcactttagtggctttcatttaatatggctgtctgggaagaacagggttgcctagccctgtacaatgtaatttaaacttacagcatttttactgtgtatgatatggtgtcctctgtgccagttttgtaccttatagaggcagattgcctccgatcgctgtggttcttattatcaaaattaagtttacttgtatacggaacaaccacaagaaatttgattctgtaaagaatcctctttagctgtggcctggcagtatataaatggtgctttatttaacagaatacctgtggaggaaataaagcacacttgatgtaaaaataattgttttatttttattgacatgactgattgattgctattctgtgcacttaattaaactgattgtgatgacttttca

SEQ ID NO: 376457 - DNA, 8638 bp, Homo sapiens
  misc_feature (1184)..(1184): n is a, c, g, or t
  misc_feature (2847)..(2847): n is a, c, g, or t
  misc_feature (2902)..(2902): n is a, c, g, or t
  misc_feature (4118)..(4118): n is a, c, g, or t
  misc_feature (4546)..(4546): n is a, c, g, or t
  misc_feature (4620)..(4620): n is a, c, g, or t
aggagagtgaatgcaaagcatataatcctagacctgtctgtaaaacatacaccatggataagcagcctctgaatactgggggacagaaagatatgacagagttttttactgatctaattaccaaaatcgaagaaatgtctcccgaactgaaaaataccgtcaaaagtttatttggaggtgtaattacaaacaatgtcgtatccttggattgtgaacatgttagtcaaactgctgaagagttttatactgtgaggtgccaagtggctgatatgaagaacatttatgaatctcttgatgaagttactataaaagacactttggaaggtgataacatgtatacttgttctcattgtgggaagaaagtacgagctgaaaaaagggcatgttttaagaaattgcctcgcattttgagtttcaatactatgagatacacatttaatatggtcacgatgatgaaagagaaagtgaatacacacttttccttcccattacgtttggacatgacgccctatacagaagattttcttatgggaaagagtgagaggaaagaaggttttaaagaagtcagtgatcattcaaaagactcagagagctatgaatatgacttgataggagtgactgttcacacaggaacggcagatggtggacactattatagctttatcagagatatagtaaatccccatgcttataaaaacaataaatggtatctttttaatgatgctgaggtaaaaccttttgattctgctcaacttgcatctgaatgttttggtggagagatgacgaccaagacctatgattctgttacagataaatttatggacttctcttttgaaaagacacacagtgcatatatgctgttttacaaacgcatggaaccagaggaagaaaatggcagagaatacaaatttgatgtttcgtcagagttactagagtggatttggcatgataacatgcagtttcttcaagacaaaaacatttttgaacatacatattttgggtaagtttggtaaatttcatagtagatattttacacattttaaaaaaatcttacgtgtgaattttaaatgattatttttaaattctagatttatgtggcaattgtgtagttgtattcccagtacattaccagatcctaaagctgtgtccttaatgacagcaaaggtaataaatatatgaacttnaaataattctgtcaaaatttactactttaaaatgattgaagcttttttgctttatcttttcttacagttaagcacttcctttgtcctagagacatttattcattctaaagaaaagcccacgatgcttcagtggattgaactgttgacgaaacagtttaataatagtcaggcagcttgtgagtggtttttagatcgtatggctgatgacgactggtggccaatgcagatactaattaagtgccctaatcaaattgtgagacagatgtttcagcgtttgtgtatccatgtgattcagaggctgagacctgtgcatgctcatctctatttgcagccaggaatggaagatgggtcagatgatatggatacctcagtagaagatattggtggtcgttcatgtgtcactcgctttgtgagaaccctgttattaattatggaacatggtgtaaaacctcacagtaaacatcttacagagtattttgccttcctttacgaatttgcaaaaatgggtgaagaagagagccaatttttgctttcattgcaagctatatctacaatggtacatttttacatgggaacaaaaggacctgaaaatcctcaagttgaagtgttatcagaggaagaaggggaagaagaagaggaggaagaagatatcctctctctggcagaagaaaaatacaggccagctgcccttgaaaagatgatagctttagttgctcttttggttgaacagtctcgatcagaaaggcatttgacattatcacagactgacatggcagcattaacaggaggaaagggatttcccttcttgtttcaacatattcgtgatggcatcaatataagacaaacttgtaatctgattttcagcctgtgtcgatacaataatcgacttgcagaacatattgtatctatgcttttcacatcaatagcaaagttgactcctgaggcagccaatcctttctttaagttgttgactatgctaatggagtttgctggtggacctccaggaatgcctccctttgcatcttatattctgcagaggatatgggaggtgattgaatacaatccttctcagtgtctagattggttggcagtgcagacaccccgaaataaactggcacacagctgggtcttacagaatatggaaaactgggtcgagcggtttcttttggctcacaattatcctagagtgaggacttgcagtagaagaactgtttaacctgatgcagctgtttatagctcagaggccagatatgagagaagaagaattagaagatattaaacagttcaagaaaacaaccataagttgttacttacgttgcttagatggccgctcctgctggactactttaataagtgccttcagaatactattagaatctgatgaagacagacttcttgttgtatttaatcgaggattgattctaatgacagaggtaaatattctattgcattttactgtggatattatctcattttaatgttctcaccaagacttactttatagacatttagagtttatggtaaactgttttacaggtggcaaggttttaattatatagatcagtaaacctgaatttatatcccaagaataattaggtcataatttttagggtgctgttcctttttccatagtaattccatacttttcccattattttgtatntagaacagccatttgaaatagactagttttattcatttgtagggacaaaaatganatacatgtgatttcattaagggcacacataatttcccaaaagcctacttatttgacagtatagaaactgaggttaccattgtgaacccggaaaatctgagacaggtctcagttaatttagaaagtttattttgccaaggttgaggacgcgcccgtgacacagcctcaggaagtcctgatggcacgtgcccaaggtggttgggacacagcttgattttatacattttagggagacatgagacatcaatctgtatgtaggaagtacattagctctgtccagaaaggcagagacaacccaaagcaaggcctctccttcctctggggccttcctggtcacaggtatgtgagagacagatggttgcgttcttttgagtttctgataagtctttccaaaggaggcaatcagaatatgcatctatctgggtgagcagagggatgactttgaatagtatgagaggccgatttgccctgagcggttcccagcttgaaggggcccaagatattttcctttcacaccatcctcagaggaaaccagaaggactattacagggttaaaatcagctgtttatgcttcctataattcttgaacatccacaagtatgagatggctgcagagtcaccagaggtacgtgagccctttagtctgataaacatgccaagagtaccataagaattcacaggtaggatgttttttcagttaatgataataaaaaataagagaacaggtttgcactttgaagaatgtggatttgcaaaggtaagggggaaaacatttagataaatgacaataagcactgaggcaaagaaatattggttatgtttgaggaaggctaagtattaaaaaaaaggtaggtgaagaggagtagtaagaatttcattctttaaaatgcaacagatgtttatgctgctttggttgtatttttagaaaaaaaaaatttttttttaatgcaacagatgtttaaatgtctacctctgtgccaagcactgtggtaggtactagggacacagcagtgaacaagacatactggtttctgtccccacagcttacaagttacatactgtacaagtacattgttcatattaggtactgctgcaggttctgggctaagaattttaacatttgaactgtgggtattacagtgtgtaagctgtagtgaactggtggaagaggattcaaagaagggtgctgtatagtaaaataggaaaaaaactaaggncttaattaagctaatacagttaaaggaattaaaagatttaacaagccaatataaaggaaatgaattcctaccttttgcagctctttttacctctttcaggcctactcttttgagtatggctgacagtcactttaccattgtctttggacagagaccctggaaagttggttaaagcagttgcctattctccctaatcttttgtgacctactgctttgtaattttgaagacttaacaatcttagagcaagtacttttttaaaaaaatgtgattaaactatttcttcagactagaatatacacacaaaatagcagagctctgaaggtgaggaatgtttaaaagagcttaatgagagtttaacttcaggatagaaagcaaatacgtttgctttgcacacatgtgcacacacagtctgagtctgaaaacatcnatcgtagaggacgagtactaccattttgtggctcagtaagcaaaaatgaaattaagttttcaattttttcaaancatttgtagtctttcaacactttgcacatgatgtatcacgaagctacagcttgccatgtgactggagatttagtagaacttctgtcaatatttctttcggttttgaagtctacacgcccttatcttcagagaaaagatgtgaaacaagcattaatccagtggcaggagcgaattgaatttgcccataaactgttaactcttcttaattcctatagtcctccagaacttagaaatgcctgtatagatgtcctcaaggaacttgtacttttgagtccccatgattttcttcatactctggttccctttctacaacacaaccattgtacttaccatcacagtaatataccatttctctcggaccttatttcccttgtcgagaaaatatcaagctaataggagggaaaagcaatattcggcctccgcgccctgaactcaatatgtgcctcttgcccacaatggtggaaaccagtaagggcaaagatgacgtttatgatcgtatgctgctagactacttcttttcttatcatcagttcatccatctattatgccgagttgcaatcaactgtgaaaaatttactgaaacattagttaagctgagtgtcctagttgcctatgaaggtttgccacttcatcttgcactgttccccaaactttggactgagctatgccagactcagtctgctatgtcaaaaaactgcatcaagcttttgtgtgaagatcctgttttcgcagaatatattaaatgtatcctaatggatgaaagaacttttttaaacaacaacattgtctacacgttcatgacacatttccttctaaaggttcaaagtcaagtgttttctgaagcaaactgtgccaatttgatcagcactcttattacaaacttgataagccagtatcagaacctacagtctgatttctccaaccgagttgaaatttccaaagcaagtgcttctttaaatggggtaagaactatgcagaggcggcggcacacacttttaaactgtccttcagttaactgtgtggccttcatatgattttactctcgtaactttaacttactgattcaaactcttaagccatgtgcgacaaaaaaacaagttttaaatacacgtttactatgccttgtatgtacacagcacactctatcaccttggaagctacaagctggtatcattaaatgctgaaaggtaataaagggaacatcttagtggtcttatctctacttgggtatatttttggaaacaatacttgtgatgtttctattactgcctatggctcctatgtaactgaaacaattaatgatctactgatttaaaaaaggcagttaaatctagagcattagttgccttgtgcagactcccatgacagccatgtcctagaataatggaacactctggaaatgggctagaatgttgagcagcagcctcccaaatcacagtatgcataaaagccaaaacagatgacagagctcagtaaggaagaccttactatttgtgacatccatcagaattttaacttgagaaactgatttcaaggtttgtttttaaaattcttatatttccttttccatttttcagaaaacactatttcaggctttggtctgacttactggttcgtgggcataaaataatgctattagtgactttaagaactaatgaggctgggcacggtggctcatgcctgcaatccaagcattttgggaggtcgaggccggtggataacgaggtcaggagattgagaccatcctggccaacatggtgaaaccctgtctctactaaaatagaaaaaattaagccaggcgtggtggcgggcgcctgtagtcccagctacttgggaggctgagggaggggaatcgcttgaacccgggtggtggaggttgcagcgagccgagattacaccactgcactccagccttgccaaagaacaagactccatctcaaaaaaaacaaaaacaaaacaaaaaaaaaaacaactaatgaaatgctgtagtatcttaacactggctttctggttttatcattctaagaatcccagagaaaccagggtattcttaggaaagaatggattcctgggaaaataaacatctgcaattaactgtaaacaactgcatcaaagtgttggctttagaatttgaaatgttcctatctgggtttttgtaggacctgagggcactcgctttgctcctgtcagtacacactcccaaacagttaaacccagctctaattccaactctgcaagagcttttaagcaaatgcaggacttgtctgcaacagagaaactcactccaagagcaagaagccaaagaaagaaaaactaaagatgatgaaggagcaactcccattaaaaggcggcgtgttagcagtgatgaggagcacactgtagacagctgcatcagtgacatgaaaacagaaaccagggaggtcctgaccccaacgagcacttctgacaatgagaccagagactcctcaattattgatccaggaactgagcaagatcttccttcccctgaaaatagttctgttaaagaataccgaatggaagttccatcttcgttttcagaagacatgtcaaatatcaggtcacagcatgcagaagaacagtccaacaatggtagatatgacgattgtaaagaatttaaagacctccactgttccaaggattctaccctagccgaggaagaatctgagttcccttctacttctatctctgcagttctgtctgacttagctgacttgagaagctgtgatggccaagctttgccctcccaggaccctgaggttgctttatctctcagttgtggccattccagaggactctttagtcatatgcagcaacatgacattttagataccctgtgtaggaccattgaatctacaatccatgtcgtcacaaggatatctggcaaaggaaaccaagctgcttcttgacattaggtgtagcatgtctacttttaagtccctcacccccaacccccatgctgtttgtataagttttgcttatttgtttttgtgcttcagtttgtccagtgctctctgcttgaatggcaagatagatttataggcttaattcttggtcaggcagaactccagatgaaaaaaacttgcatcttcagtatacttcctaaagggcaatcagataatggatatgttttatgtaattaagagttcactttagtggctttcatttaatatggctgtctgggaagaacagggttgcctagccctgtacaatgtaatttaaacttacagcatttttactgtgtatgatatggtgtcctctgtgccagttttgtaccttatagaggcagattgcctccgatcgctgtggttcttattatcaaaattaagtttacttgtatacggaacaaccacaagaaatttgattctgtaaagaatcctctttagctgtggcctggcagtatataaatggtgctttatttaacagaatacctgtggaggaaataaagcacacttgatgtaaaaataattgttttatttttattgacatgactgattgattgctattctgtgcacttaattaaactgattgtgatgacttttcatttgtttacatacgttgcttcagtcttctcaggtgaaagtagtgagaaaaccgtgaaagaggggggaaacatttatccattatatgctgtttcactggaagtgttaccagcagtccacagaactaatgtgtccccacagacttctcaatcctctccacaccgaagtgcaaaaccacagcagggagatgtgcagggagatgtggagcaaaacacagccaatttgccctcacctcaacatgcttttgaatgcaatataccactgttttacgacctaagatctacacaccttaaaaaccctaaagtaaaataaaggaatagtgtcaacatgccatttattttttgtcatcttgaactaaaagtacagctgcaagcaagcttgctataggacaagcttcagcttgggaaacatcaactatctgcactcaggacttacctatttccagaggaatatcgatg

SEQ ID NO: 376458 - DNA, 8099 bp, Homo sapiens
  misc_feature (1184)..(1184): n is a, c, g, or t
  misc_feature (2847)..(2847): n is a, c, g, or t
  misc_feature (2902)..(2902): n is a, c, g, or t
  misc_feature (4118)..(4118): n is a, c, g, or t
  misc_feature (4546)..(4546): n is a, c, g, or t
  misc_feature (4620)..(4620): n is a, c, g, or t
aggagagtgaatgcaaagcatataatcctagacctgtctgtaaaacatacaccatggataagcagcctctgaatactgggggacagaaagatatgacagagttttttactgatctaattaccaaaatcgaagaaatgtctcccgaactgaaaaataccgtcaaaagtttatttggaggtgtaattacaaacaatgtcgtatccttggattgtgaacatgttagtcaaactgctgaagagttttatactgtgaggtgccaagtggctgatatgaagaacatttatgaatctcttgatgaagttactataaaagacactttggaaggtgataacatgtatacttgttctcattgtgggaagaaagtacgagctgaaaaaagggcatgttttaagaaattgcctcgcattttgagtttcaatactatgagatacacatttaatatggtcacgatgatgaaagagaaagtgaatacacacttttccttcccattacgtttggacatgacgccctatacagaagattttcttatgggaaagagtgagaggaaagaaggttttaaagaagtcagtgatcattcaaaagactcagagagctatgaatatgacttgataggagtgactgttcacacaggaacggcagatggtggacactattatagctttatcagagatatagtaaatccccatgcttataaaaacaataaatggtatctttttaatgatgctgaggtaaaaccttttgattctgctcaacttgcatctgaatgttttggtggagagatgacgaccaagacctatgattctgttacagataaatttatggacttctcttttgaaaagacacacagtgcatatatgctgttttacaaacgcatggaaccagaggaagaaaatggcagagaatacaaatttgatgtttcgtcagagttactagagtggatttggcatgataacatgcagtttcttcaagacaaaaacatttttgaacatacatattttgggtaagtttggtaaatttcatagtagatattttacacattttaaaaaaatcttacgtgtgaattttaaatgattatttttaaattctagatttatgtggcaattgtgtagttgtattcccagtacattaccagatcctaaagctgtgtccttaatgacagcaaaggtaataaatatatgaacttnaaataattctgtcaaaatttactactttaaaatgattgaagcttttttgctttatcttttcttacagttaagcacttcctttgtcctagagacatttattcattctaaagaaaagcccacgatgcttcagtggattgaactgttgacgaaacagtttaataatagtcaggcagcttgtgagtggtttttagatcgtatggctgatgacgactggtggccaatgcagatactaattaagtgccctaatcaaattgtgagacagatgtttcagcgtttgtgtatccatgtgattcagaggctgagacctgtgcatgctcatctctatttgcagccaggaatggaagatgggtcagatgatatggatacctcagtagaagatattggtggtcgttcatgtgtcactcgctttgtgagaaccctgttattaattatggaacatggtgtaaaacctcacagtaaacatcttacagagtattttgccttcctttacgaatttgcaaaaatgggtgaagaagagagccaatttttgctttcattgcaagctatatctacaatggtacatttttacatgggaacaaaaggacctgaaaatcctcaagttgaagtgttatcagaggaagaaggggaagaagaagaggaggaagaagatatcctctctctggcagaagaaaaatacaggccagctgcccttgaaaagatgatagctttagttgctcttttggttgaacagtctcgatcagaaaggcatttgacattatcacagactgacatggcagcattaacaggaggaaagggatttcccttcttgtttcaacatattcgtgatggcatcaatataagacaaacttgtaatctgattttcagcctgtgtcgatacaataatcgacttgcagaacatattgtatctatgcttttcacatcaatagcaaagttgactcctgaggcagccaatcctttctttaagttgttgactatgctaatggagtttgctggtggacctccaggaatgcctccctttgcatcttatattctgcagaggatatgggaggtgattgaatacaatccttctcagtgtctagattggttggcagtgcagacaccccgaaataaactggcacacagctgggtcttacagaatatggaaaactgggtcgagcggtttcttttggctcacaattatcctagagtgaggacttgcagtagaagaactgtttaacctgatgcagctgtttatagctcagaggccagatatgagagaagaagaattagaagatattaaacagttcaagaaaacaaccataagttgttacttacgttgcttagatggccgctcctgctggactactttaataagtgccttcagaatactattagaatctgatgaagacagacttcttgttgtatttaatcgaggattgattctaatgacagaggtaaatattctattgcattttactgtggatattatctcattttaatgttctcaccaagacttactttatagacatttagagtttatggtaaactgttttacaggtggcaaggttttaattatatagatcagtaaacctgaatttatatcccaagaataattaggtcataatttttagggtgctgttcctttttccatagtaattccatacttttcccattattttgtatntagaacagccatttgaaatagactagttttattcatttgtagggacaaaaatganatacatgtgatttcattaagggcacacataatttcccaaaagcctacttatttgacagtatagaaactgaggttaccattgtgaacccggaaaatctgagacaggtctcagttaatttagaaagtttattttgccaaggttgaggacgcgcccgtgacacagcctcaggaagtcctgatggcacgtgcccaaggtggttgggacacagcttgattttatacattttagggagacatgagacatcaatctgtatgtaggaagtacattagctctgtccagaaaggcagagacaacccaaagcaaggcctctccttcctctggggccttcctggtcacaggtatgtgagagacagatggttgcgttcttttgagtttctgataagtctttccaaaggaggcaatcagaatatgcatctatctgggtgagcagagggatgactttgaatagtatgagaggccgatttgccctgagcggttcccagcttgaaggggcccaagatattttcctttcacaccatcctcagaggaaaccagaaggactattacagggttaaaatcagctgtttatgcttcctataattcttgaacatccacaagtatgagatggctgcagagtcaccagaggtacgtgagccctttagtctgataaacatgccaagagtaccataagaattcacaggtaggatgttttttcagttaatgataataaaaaataagagaacaggtttgcactttgaagaatgtggatttgcaaaggtaagggggaaaacatttagataaatgacaataagcactgaggcaaagaaatattggttatgtttgaggaaggctaagtattaaaaaaaaggtaggtgaagaggagtagtaagaatttcattctttaaaatgcaacagatgtttatgctgctttggttgtatttttagaaaaaaaaaatttttttttaatgcaacagatgtttaaatgtctacctctgtgccaagcactgtggtaggtactagggacacagcagtgaacaagacatactggtttctgtccccacagcttacaagttacatactgtacaagtacattgttcatattaggtactgctgcaggttctgggctaagaattttaacatttgaactgtgggtattacagtgtgtaagctgtagtgaactggtggaagaggattcaaagaagggtgctgtatagtaaaataggaaaaaaactaaggncttaattaagctaatacagttaaaggaattaaaagatttaacaagccaatataaaggaaatgaattcctaccttttgcagctctttttacctctttcaggcctactcttttgagtatggctgacagtcactttaccattgtctttggacagagaccctggaaagttggttaaagcagttgcctattctccctaatcttttgtgacctactgctttgtaattttgaagacttaacaatcttagagcaagtacttttttaaaaaaatgtgattaaactatttcttcagactagaatatacacacaaaatagcagagctctgaaggtgaggaatgtttaaaagagcttaatgagagtttaacttcaggatagaaagcaaatacgtttgctttgcacacatgtgcacacacagtctgagtctgaaaacatcnatcgtagaggacgagtactaccattttgtggctcagtaagcaaaaatgaaattaagttttcaattttttcaaancatttgtagtctttcaacactttgcacatgatgtatcacgaagctacagcttgccatgtgactggagatttagtagaacttctgtcaatatttctttcggttttgaagtctacacgcccttatcttcagagaaaagatgtgaaacaagcattaatccagtggcaggagcgaattgaatttgcccataaactgttaactcttcttaattcctatagtcctccagaacttagaaatgcctgtatagatgtcctcaaggaacttgtacttttgagtccccatgattttcttcatactctggttccctttctacaacacaaccattgtacttaccatcacagtaatataccatttctctcggaccttatttcccttgtcgagaaaatatcaagctaataggagggaaaagcaatattcggcctccgcgccctgaactcaatatgtgcctcttgcccacaatggtggaaaccagtaagggcaaagatgacgtttatgatcgtatgctgctagactacttcttttcttatcatcagttcatccatctattatgccgagttgcaatcaactgtgaaaaatttactgaaacattagttaagctgagtgtcctagttgcctatgaaggtttgccacttcatcttgcactgttccccaaactttggactgagctatgccagactcagtctgctatgtcaaaaaactgcatcaagcttttgtgtgaagatcctgttttcgcagaatatattaaatgtatcctaatggatgaaagaacttttttaaacaacaacattgtctacacgttcatgacacatttccttctaaaggttcaaagtcaagtgttttctgaagcaaactgtgccaatttgatcagcactcttattacaaacttgataagccagtatcagaacctacagtctgatttctccaaccgagttgaaatttccaaagcaagtgcttctttaaatggggtaagaactatgcagaggcggcggcacacacttttaaactgtccttcagttaactgtgtggccttcatatgattttactctcgtaactttaacttactgattcaaactcttaagccatgtgcgacaaaaaaacaagttttaaatacacgtttactatgccttgtatgtacacagcacactctatcaccttggaagctacaagctggtatcattaaatgctgaaaggtaataaagggaacatcttagtggtcttatctctacttgggtatatttttggaaacaatacttgtgatgtttctattactgcctatggctcctatgtaactgaaacaattaatgatctactgatttaaaaaaggcagttaaatctagagcattagttgccttgtgcagactcccatgacagccatgtcctagaataatggaacactctggaaatgggctagaatgttgagcagcagcctcccaaatcacagtatgcataaaagccaaaacagatgacagagctcagtaaggaagaccttactatttgtgacatccatcagaattttaacttgagaaactgatttcaaggtttgtttttaaaattcttatatttccttttccatttttcagaaaacactatttcaggctttggtctgacttactggttcgtgggcataaaataatgctattagtgactttaagaactaatgaggctgggcacggtggctcatgcctgcaatccaagcattttgggaggtcgaggccggtggataacgaggtcaggagattgagaccatcctggccaacatggtgaaaccctgtctctactaaaatagaaaaaattaagccaggcgtggtggcgggcgcctgtagtcccagctacttgggaggctgagggaggggaatcgcttgaacccgggtggtggaggttgcagcgagccgagattacaccactgcactccagccttgccaaagaacaagactccatctcaaaaaaaacaaaaacaaaacaaaaaaaaaaacaactaatgaaatgctgtagtatcttaacactggctttctggttttatcattctaagaatcccagagaaaccagggtattcttaggaaagaatggattcctgggaaaataaacatctgcaattaactgtaaacaactgcatcaaagtgttggctttagaatttgaaatgttcctatctgggtttttgtaggacctgagggcactcgctttgctcctgtcagtacacactcccaaacagttaaacccagctctaattccaactctgcaagagcttttaagcaaatgcaggacttgtctgcaacagagaaactcactccaagagcaagaagccaaagaaagaaaaactaaagatgatgaaggagcaactcccattaaaaggcggcgtgttagcagtgatgaggagcacactgtagacagctgcatcagtgacatgaaaacagaaaccagggaggtcctgaccccaacgagcacttctgacaatgagaccagagactcctcaattattgatccaggaactgagcaagatcttccttcccctgaaaatagttctgttaaagaataccgaatggaagttccatcttcgttttcagaagacatgtcaaatatcaggtcacagcatgcagaagaacagtccaacaatggtagatatgacgattgtaaagaatttaaagacctccactgttccaaggattctaccctagccgaggaagaatctgagttcccttctacttctatctctgcagttctgtctgacttagctgacttgagaagctgtgatggccaagctttgccctcccaggaccctgaggttgctttatctctcagttgtggccattccagaggactctttagtcatatgcagcaacatgacattttagataccctgtgtaggaccattgaatctacaatccatgtcgtcacaaggatatctggcaaaggaaaccaagctgcttcttgacattaggtgtagcatgtctacttttaagtccctcacccccaacccccatgctgtttgtataagttttgcttatttgtttttgtgcttcagtttgtccagtgctctctgcttgaatggcaagatagatttataggcttaattcttggtcaggcagaactccagatgaaaaaaacttgcatcttcagtatacttcctaaagggcaatcagataatggatatgttttatgtaattaagagttcactttagtggctttcatttaatatggctgtctgggaagaacagggttgcctagccctgtacaatgtaatttaaacttacagcatttttactgtgtatgatatggtgtcctctgtgccagttttgtaccttatagaggcagattgcctccgatcgctgtggttcttattatcaaaattaagtttacttgtatacggaacaaccacaagaaatttgattctgtaaagaatcctctttagctgtggcctggcagtatataaatggtgctttatttaacagaatacctgtggaggaaataaagcacacttgatgta

SEQ ID NO: 376459 - DNA, 3749 bp, Homo sapiens
gatttttttttgtgtgtgagataattaggaaagaagatttattgtttacccttgcagtgtttatggggggaaaaggtatttacagaattactgttgctagcgagaatatacagtaaagtttaaaacattttggagaattgattttgattcttaaaatgtgtctttttgcaacatatgctctggttacctataaatacattaatttggcccttgaaaacattcacatcctattctttgttagccttatttttccagtccttgttaactctctcagtgctggataataaacctgcatttcttttaaaacatttgttcagtttcggcatcagtgtcttcccccagcactcccttaatctaaattagtaacattttactgtatgaaaaatagttgctgttaactaaaaattcaataggtgagttagacatggcttttcaagtaggattttcagtggcttcagattccatcatacacaagtgtatgttttttctgtgtaagttttttccgtgtaagttttttccgtgctcaaccgtaagtgctcaaccatcttctccccactttagtctgctatgtcaaaaaactgcatcaagcttttgtgtgaagatcctgttttcgcagaatatattaaatgtatcctaatggatgaaagaacttttttaaacaacaacattgtctacacgttcatgacacatttccttctaaaggtacgtagtactttggaaactcagtgtgtcatttccaattagttaatgcttgtggtttcattatgctggtcttttggagatttttttaaatcttctttttcaggttcaaagtcaagtgttttctgaagcaaactgtgccaatttgatcagcactcttattacaaacttgataagccagtatcagaacctacagtctgatttctccaaccgagttgaaatttccaaagcaagtgcttctttaaatggggtaagaactatgcagaggcggcggcacacacttttaaactgtccttcagttaactgtgtggccttcatatgattttactctcgtaactttaacttactgattcaaactcttaagccatgtgcgacaaaaaaacaagttttaaatacacgtttactatgccttgtatgtacacagcacactctatcaccttggaagctacaagctggtatcattaaatgctgaaaggtaataaagggaacatcttagtggtcttatctctacttgggtatatttttggaaacaatacttgtgatgtttctattactgcctatggctcctatgtaactgaaacaattaatgatctactgatttaaaaaaggcagttaaatctagagcattagttgccttgtgcagactcccatgacagccatgtcctagaataatggaacactctggaaatgggctagaatgttgagcagcagcctcccaaatcacagtatgcataaaagccaaaacagatgacagagctcagtaaggaagaccttactatttgtgacatccatcagaattttaacttgagaaactgatttcaaggtttgtttttaaaattcttatatttccttttccatttttcagaaaacactatttcaggctttggtctgacttactggttcgtgggcataaaataatgctattagtgactttaagaactaatgaggctgggcacggtggctcatgcctgcaatccaagcattttgggaggtcgaggccggtggataacgaggtcaggagattgagaccatcctggccaacatggtgaaaccctgtctctactaaaatagaaaaaattaagccaggcgtggtggcgggcgcctgtagtcccagctacttgggaggctgagggaggggaatcgcttgaacccgggtggtggaggttgcagcgagccgagattacaccactgcactccagccttgccaaagaacaagactccatctcaaaaaaaacaaaaacaaaacaaaaaaaaaaacaactaatgaaatgctgtagtatcttaacactggctttctggttttatcattctaagaatcccagagaaaccagggtattcttaggaaagaatggattcctgggaaaataaacatctgcaattaactgtaaacaactgcatcaaagtgttggctttagaatttgaaatgttcctatctgggtttttgtaggacctgagggcactcgctttgctcctgtcagtacacactcccaaacagttaaacccagctctaattccaactctgcaagagcttttaagcaaatgcaggacttgtctgcaacagagaaactcactccaagagcaagaagccaaagaaagaaaaactaaaggttagctttatggactactatcattacctttagggtgggaggagggagtaatacacttggtgtaactggtttaagagttgtgtgttcagctgaacctcctaaatataaatgctagaaacaaaattaacttcccacatccccccctaacgtgatcttaatgactttcagagaagtttcccttttggcatgtgttttcacagatgatgaaggagcaactcccattaaaaggcggcgtgttagcagtgatgaggagcacactgtagacagctgcatcagtgacatgaaaacagaaaccagggaggtcctgaccccaacgagcacttctgacaatgagaccagagactcctcaattattgatccaggaactgagcaagatcttccttcccctgaaaatagttctgttaaagaataccgaatggaagttccatcttcgttttcagaagacatgtcaaatatcaggtcacagcatgcagaagaacagtccaacaatggtagatatgacgattgtaaagaatttaaagacctccactgttccaaggattctaccctagccgaggaagaatctgagttcccttctacttctatctctgcagttctgtctgacttagctgacttgagaagctgtgatggccaagctttgccctcccaggaccctgaggttgctttatctctcagttgtggccattccagaggactctttagtcatatgcagcaacatgacattttagataccctgtgtaggaccattgaatctacaatccatgtcgtcacaaggatatctggcaaaggaaaccaagctgcttcttgacattaggtgtagcatgtctacttttaagtccctcacccccaacccccatgctgtttgtataagttttgcttatttgtttttgtgcttcagtttgtccagtgctctctgcttgaatggcaagatagatttataggcttaattcttggtcaggcagaactccagatgaaaaaaacttgcatcttcagtatacttcctaaagggcaatcagataatggatatgttttatgtaattaagagttcactttagtggctttcatttaatatggctgtctgggaagaacagggttgcctagccctgtacaatgtaatttaaacttacagcatttttactgtgtatgatatggtgtcctctgtgccagttttgtaccttatagaggcagattgcctccgatcgctgtggttcttattatcaaaattaagtttacttgtatacggaacaaccacaagaaatttgattctgtaaagaatcctctttagctgtggcctggcagtatataaatggtgctttatttaacagaatacctgtggaggaaataaagcacacttgatgtaaaaataattgttttatttttattgacatgactgattgattgctattctgtgcacttaattaaactgattgtgatgacttttca

SEQ ID NO: 376460 - DNA, 5550 bp, Homo sapiens
aggagagtgaatgcaaagcatataatcctagacctgtctgtaaaacatacaccatggataagcagcctctgaatactgggggacagaaagatatgacagagttttttactgatctaattaccaaaatcgaagaaatgtctcccgaactgaaaaataccgtcaaaagtttatttggaggtgtaattacaaacaatgtcgtatccttggattgtgaacatgttagtcaaactgctgaagagttttatactgtgaggtgccaagtggctgatatgaagaacatttatgaatctcttgatgaagttactataaaagacactttggaaggtgataacatgtatacttgttctcattgtgggaagaaagtacgagctgaaaaaagggcatgttttaagaaattgcctcgcattttgagtttcaatactatgagatacacatttaatatggtcacgatgatgaaagagaaagtgaatacacacttttccttcccattacgtttggacatgacgccctatacagaagattttcttatgggaaagagtgagaggaaagaaggttttaaagaagtcagtgatcattcaaaagactcagagagctatgaatatgacttgataggagtgactgttcacacaggaacggcagatggtggacactattatagctttatcagagatatagtaaatccccatgcttataaaaacaataaatggtatctttttaatgatgctgaggtaaaaccttttgattctgctcaacttgcatctgaatgttttggtggagagatgacgaccaagacctatgattctgttacagataaatttatggacttctcttttgaaaagacacacagtgcatatatgctgttttacaaacgcatggaaccagaggaagaaaatggcagagaatacaaatttgatgtttcgtcagagttactagagtggatttggcatgataacatgcagtttcttcaagacaaaaacatttttgaacatacatattttggatttatgtggcaattgtgtagttgtattcccagtacattaccagatcctaaagctgtgtccttaatgacagcaaagttaagcacttcctttgtcctagagacatttattcattctaaagaaaagcccacgatgcttcagtggattgaactgttgacgaaacagtttaataatagtcaggcagcttgtgagtggtttttagatcgtatggctgatgacgactggtggccaatgcagatactaattaagtgccctaatcaaattgtgagacagatgtttcagcgtttgtgtatccatgtgattcagaggctgagacctgtgcatgctcatctctatttgcagccaggaatggaagatgggtcagatgatatggatacctcagtagaagatattggtggtcgttcatgtgtcactcgctttgtgagaaccctgttattaattatggaacatggtgtaaaacctcacagtaaacatcttacagagtattttgccttcctttacgaatttgcaaaaatgggtgaagaagagagccaatttttgctttcattgcaagctatatctacaatggtacatttttacatgggaacaaaaggacctgaaaatcctcaagttgaagtgttatcagaggaagaaggggaagaagaagaggaggaagaagatatcctctctctggcagaagaaaaatacaggccagctgcccttgaaaagatgatagctttagttgctcttttggttgaacagtctcgatcagaaaggcatttgacattatcacagactgacatggcagcattaacaggaggaaagggatttcccttcttgtttcaacatattcgtgatggcatcaatataagacaaacttgtaatctgattttcagcctgtgtcgatacaataatcgacttgcagaacatattgtatctatgcttttcacatcaatagcaaagttgactcctgaggcagccaatcctttctttaagttgttgactatgctaatggagtttgctggtggacctccaggaatgcctccctttgcatcttatattctgcagaggatatgggaggtgattgaatacaatccttctcagtgtctagattggttggcagtgcagacaccccgaaataaactggcacacagctgggtcttacagaatatggaaaactgggtcgagcggtttcttttggctcacaattatcctagagtgaggacttctgcagcttatcttctggtgtcccttataccaagcaattcattccgtcagatgttccggtcaacaaggtctttgcacatcccaacccgtgaccttccactcagtccagacacaacagtagtcctacatcaggtctacaacgtgctccttggtttgctctcaagagccaaactttatgttgatgctgctgttcatggcactacaaagctagtgccctattttagctttatgacttactgtttaatttccaaaactgagaagctgatgttttccacatatttcatggatttgtggaaccttttccagcctaaactttctgagccagcaatagctacaaatcacaataaacaggctttgctttcattttggtacaatgtctgtgctgactgtccagagaatatccgccttattgttcagaacccagtggtaaccaagaacattgccttcaattacatccttgctgaccatgatgatcaggatgtggtgctttttaaccgtgggatgctgccagcgtactatggcattctgaggctctgctgtgagcagtctcctgcattcacacgacaactggcttctcaccagaacatccagtgggcctttaagaatcttacaccacatgccagccaataccctggagcagtagaagaactgtttaacctgatgcagctgtttatagctcagaggccagatatgagagaagaagaattagaagatattaaacagttcaagaaaacaaccataagttgttacttacgttgcttagatggccgctcctgctggactactttaataagtgccttcagaatactattagaatctgatgaagacagacttcttgttgtatttaatcgaggattgattctaatgacagagtctttcaacactttgcacatgatgtatcacgaagctacagcttgccatgtgactggagatttagtagaacttctgtcaatatttctttcggttttgaagtctacacgcccttatcttcagagaaaagatgtgaaacaagcattaatccagtggcaggagcgaattgaatttgcccataaactgttaactcttcttaattcctatagtcctccagaacttagaaatgcctgtatagatgtcctcaaggaacttgtacttttgagtccccatgattttcttcatactctggttccctttctacaacacaaccattgtacttaccatcacagtaatataccaagtacgtatttatctagcacagtacttcaatatggttcgcatttaatcgttctgcacactgaagcatggagatttattttttccatttattcttactgtacacttttaatatcctaatttctctcggaccttatttcccttgtcgagaaaatatcaagctaataggagggaaaagcaatattcggcctccgcgccctgaactcaatatgtgcctcttgcccacaatggtggaaaccagtaagggcaaagatgacgtttatgatcgtatgctgctagactacttcttttcttatcatcagttcatccatctattatgccgagttgcaatcaactgtgaaaaatttactgaaacattagttaagctgagtgtcctagttgcctatgaaggtttgccacttcatcttgcactgttccccaaactttggactgagctatgccagactcagtctgctatgtcaaaaaactgcatcaagcttttgtgtgaagatcctgttttcgcagaatatattaaatgtatcctaatggatgaaagaacttttttaaacaacaacattgtctacacgttcatgacacatttccttctaaaggttcaaagtcaagtgttttctgaagcaaactgtgccaatttgatcagcactcttattacaaacttgataagccagtatcagaacctacagtctgatttctccaaccgagttgaaatttccaaagcaagtgcttctttaaatggggacctgagggcactcgctttgctcctgtcagtacacactcccaaacagttaaacccagctctaattccaactctgcaagagcttttaagcaaatgcaggacttgtctgcaacagagaaactcactccaagagcaagaagccaaagaaagaaaaactaaagatgatgaaggagcaactcccattaaaaggcggcgtgttagcagtgatgaggagcacactgtagacagctgcatcagtgacatgaaaacagaaaccagggaggtcctgaccccaacgagcacttctgacaatgagaccagagactcctcaattattgatccaggaactgagcaagatcttccttcccctgaaaatagttctgttaaagaataccgaatggaagttccatcttcgttttcagaagacatgtcaaatatcaggtcacagcatgcagaagaacagtccaacaatggtagatatgacgattgtaaagaatttaaagacctccactgttccaaggattctaccctagccgaggaagaatctgagttcccttctacttctatctctgcagttctgtctgacttagctgacttgagaagctgtgatggccaagctttgccctcccaggaccctgaggttgctttatctctcagttgtggccattccagaggactctttagtcatatgcagcaacatgacattttagataccctgtgtaggaccattgaatctacaatccatgtcgtcacaaggatatctggcaaaggaaaccaagctgcttcttgacattaggtgtagcatgtctacttttaagtccctcacccccaacccccatgctgtttgtataagttttgcttatttgtttttgtgcttcagtttgtccagtgctctctgcttgaatggcaagatagatttataggcttaattcttggtcaggcagaactccagatgaaaaaaacttgcatcttcagtatacttcctaaagggcaatcagataatggatatgttttatgtaattaagagttcactttagtggctttcatttaatatggctgtctgggaagaacagggttgcctagccctgtacaatgtaatttaaacttacagcatttttactgtgtatgatatggtgtcctctgtgccagttttgtaccttatagaggcagattgcctccgatcgctgtggttcttattatcaaaattaagtttacttgtatacggaacaaccacaagaaatttgattctgtaaagaatcctctttagctgtggcctggcagtatataaatggtgctttatttaacagaatacctgtggaggaaataaagcacacttgatgtaaaaataattgttttatttttattgacatgactgattgattgctattctgtgcacttaattaaactgattgtgatgacttttca

SEQ ID NO: 376461 - DNA, 7897 bp, Homo sapiens
  misc_feature (1184)..(1184): n is a, c, g, or t
  misc_feature (2847)..(2847): n is a, c, g, or t
  misc_feature (2902)..(2902): n is a, c, g, or t
  misc_feature (4118)..(4118): n is a, c, g, or t
  misc_feature (4546)..(4546): n is a, c, g, or t
  misc_feature (4620)..(4620): n is a, c, g, or t
aggagagtgaatgcaaagcatataatcctagacctgtctgtaaaacatacaccatggataagcagcctctgaatactgggggacagaaagatatgacagagttttttactgatctaattaccaaaatcgaagaaatgtctcccgaactgaaaaataccgtcaaaagtttatttggaggtgtaattacaaacaatgtcgtatccttggattgtgaacatgttagtcaaactgctgaagagttttatactgtgaggtgccaagtggctgatatgaagaacatttatgaatctcttgatgaagttactataaaagacactttggaaggtgataacatgtatacttgttctcattgtgggaagaaagtacgagctgaaaaaagggcatgttttaagaaattgcctcgcattttgagtttcaatactatgagatacacatttaatatggtcacgatgatgaaagagaaagtgaatacacacttttccttcccattacgtttggacatgacgccctatacagaagattttcttatgggaaagagtgagaggaaagaaggttttaaagaagtcagtgatcattcaaaagactcagagagctatgaatatgacttgataggagtgactgttcacacaggaacggcagatggtggacactattatagctttatcagagatatagtaaatccccatgcttataaaaacaataaatggtatctttttaatgatgctgaggtaaaaccttttgattctgctcaacttgcatctgaatgttttggtggagagatgacgaccaagacctatgattctgttacagataaatttatggacttctcttttgaaaagacacacagtgcatatatgctgttttacaaacgcatggaaccagaggaagaaaatggcagagaatacaaatttgatgtttcgtcagagttactagagtggatttggcatgataacatgcagtttcttcaagacaaaaacatttttgaacatacatattttgggtaagtttggtaaatttcatagtagatattttacacattttaaaaaaatcttacgtgtgaattttaaatgattatttttaaattctagatttatgtggcaattgtgtagttgtattcccagtacattaccagatcctaaagctgtgtccttaatgacagcaaaggtaataaatatatgaacttnaaataattctgtcaaaatttactactttaaaatgattgaagcttttttgctttatcttttcttacagttaagcacttcctttgtcctagagacatttattcattctaaagaaaagcccacgatgcttcagtggattgaactgttgacgaaacagtttaataatagtcaggcagcttgtgagtggtttttagatcgtatggctgatgacgactggtggccaatgcagatactaattaagtgccctaatcaaattgtgagacagatgtttcagcgtttgtgtatccatgtgattcagaggctgagacctgtgcatgctcatctctatttgcagccaggaatggaagatgggtcagatgatatggatacctcagtagaagatattggtggtcgttcatgtgtcactcgctttgtgagaaccctgttattaattatggaacatggtgtaaaacctcacagtaaacatcttacagagtattttgccttcctttacgaatttgcaaaaatgggtgaagaagagagccaatttttgctttcattgcaagctatatctacaatggtacatttttacatgggaacaaaaggacctgaaaatcctcaagttgaagtgttatcagaggaagaaggggaagaagaagaggaggaagaagatatcctctctctggcagaagaaaaatacaggccagctgcccttgaaaagatgatagctttagttgctcttttggttgaacagtctcgatcagaaaggcatttgacattatcacagactgacatggcagcattaacaggaggaaagggatttcccttcttgtttcaacatattcgtgatggcatcaatataagacaaacttgtaatctgattttcagcctgtgtcgatacaataatcgacttgcagaacatattgtatctatgcttttcacatcaatagcaaagttgactcctgaggcagccaatcctttctttaagttgttgactatgctaatggagtttgctggtggacctccaggaatgcctccctttgcatcttatattctgcagaggatatgggaggtgattgaatacaatccttctcagtgtctagattggttggcagtgcagacaccccgaaataaactggcacacagctgggtcttacagaatatggaaaactgggtcgagcggtttcttttggctcacaattatcctagagtgaggacttgcagtagaagaactgtttaacctgatgcagctgtttatagctcagaggccagatatgagagaagaagaattagaagatattaaacagttcaagaaaacaaccataagttgttacttacgttgcttagatggccgctcctgctggactactttaataagtgccttcagaatactattagaatctgatgaagacagacttcttgttgtatttaatcgaggattgattctaatgacagaggtaaatattctattgcattttactgtggatattatctcattttaatgttctcaccaagacttactttatagacatttagagtttatggtaaactgttttacaggtggcaaggttttaattatatagatcagtaaacctgaatttatatcccaagaataattaggtcataatttttagggtgctgttcctttttccatagtaattccatacttttcccattattttgtatntagaacagccatttgaaatagactagttttattcatttgtagggacaaaaatganatacatgtgatttcattaagggcacacataatttcccaaaagcctacttatttgacagtatagaaactgaggttaccattgtgaacccggaaaatctgagacaggtctcagttaatttagaaagtttattttgccaaggttgaggacgcgcccgtgacacagcctcaggaagtcctgatggcacgtgcccaaggtggttgggacacagcttgattttatacattttagggagacatgagacatcaatctgtatgtaggaagtacattagctctgtccagaaaggcagagacaacccaaagcaaggcctctccttcctctggggccttcctggtcacaggtatgtgagagacagatggttgcgttcttttgagtttctgataagtctttccaaaggaggcaatcagaatatgcatctatctgggtgagcagagggatgactttgaatagtatgagaggccgatttgccctgagcggttcccagcttgaaggggcccaagatattttcctttcacaccatcctcagaggaaaccagaaggactattacagggttaaaatcagctgtttatgcttcctataattcttgaacatccacaagtatgagatggctgcagagtcaccagaggtacgtgagccctttagtctgataaacatgccaagagtaccataagaattcacaggtaggatgttttttcagttaatgataataaaaaataagagaacaggtttgcactttgaagaatgtggatttgcaaaggtaagggggaaaacatttagataaatgacaataagcactgaggcaaagaaatattggttatgtttgaggaaggctaagtattaaaaaaaaggtaggtgaagaggagtagtaagaatttcattctttaaaatgcaacagatgtttatgctgctttggttgtatttttagaaaaaaaaaatttttttttaatgcaacagatgtttaaatgtctacctctgtgccaagcactgtggtaggtactagggacacagcagtgaacaagacatactggtttctgtccccacagcttacaagttacatactgtacaagtacattgttcatattaggtactgctgcaggttctgggctaagaattttaacatttgaactgtgggtattacagtgtgtaagctgtagtgaactggtggaagaggattcaaagaagggtgctgtatagtaaaataggaaaaaaactaaggncttaattaagctaatacagttaaaggaattaaaagatttaacaagccaatataaaggaaatgaattcctaccttttgcagctctttttacctctttcaggcctactcttttgagtatggctgacagtcactttaccattgtctttggacagagaccctggaaagttggttaaagcagttgcctattctccctaatcttttgtgacctactgctttgtaattttgaagacttaacaatcttagagcaagtacttttttaaaaaaatgtgattaaactatttcttcagactagaatatacacacaaaatagcagagctctgaaggtgaggaatgtttaaaagagcttaatgagagtttaacttcaggatagaaagcaaatacgtttgctttgcacacatgtgcacacacagtctgagtctgaaaacatcnatcgtagaggacgagtactaccattttgtggctcagtaagcaaaaatgaaattaagttttcaattttttcaaancatttgtagtctttcaacactttgcacatgatgtatcacgaagctacagcttgccatgtgactggagatttagtagaacttctgtcaatatttctttcggttttgaagtctacacgcccttatcttcagagaaaagatgtgaaacaagcattaatccagtggcaggagcgaattgaatttgcccataaactgttaactcttcttaattcctatagtcctccagaacttagaaatgcctgtatagatgtcctcaaggaacttgtacttttgagtccccatgattttcttcatactctggttccctttctacaacacaaccattgtacttaccatcacagtaatataccatttctctcggaccttatttcccttgtcgagaaaatatcaagctaataggagggaaaagcaatattcggcctccgcgccctgaactcaatatgtgcctcttgcccacaatggtggaaaccagtaagggcaaagatgacgtttatgatcgtatgctgctagactacttcttttcttatcatcagttcatccatctattatgccgagttgcaatcaactgtgaaaaatttactgaaacattagttaagctgagtgtcctagttgcctatgaaggtttgccacttcatcttgcactgttccccaaactttggactgagctatgccagactcagtctgctatgtcaaaaaactgcatcaagcttttgtgtgaagatcctgttttcgcagaatatattaaatgtatcctaatggatgaaagaacttttttaaacaacaacattgtctacacgttcatgacacatttccttctaaaggttcaaagtcaagtgttttctgaagcaaactgtgccaatttgatcagcactcttattacaaacttgataagccagtatcagaacctacagtctgatttctccaaccgagttgaaatttccaaagcaagtgcttctttaaatggggtaagaactatgcagaggcggcggcacacacttttaaactgtccttcagttaactgtgtggccttcatatgattttactctcgtaactttaacttactgattcaaactcttaagccatgtgcgacaaaaaaacaagttttaaatacacgtttactatgccttgtatgtacacagcacactctatcaccttggaagctacaagctggtatcattaaatgctgaaaggtaataaagggaacatcttagtggtcttatctctacttgggtatatttttggaaacaatacttgtgatgtttctattactgcctatggctcctatgtaactgaaacaattaatgatctactgatttaaaaaaggcagttaaatctagagcattagttgccttgtgcagactcccatgacagccatgtcctagaataatggaacactctggaaatgggctagaatgttgagcagcagcctcccaaatcacagtatgcataaaagccaaaacagatgacagagctcagtaaggaagaccttactatttgtgacatccatcagaattttaacttgagaaactgatttcaaggtttgtttttaaaattcttatatttccttttccatttttcagaaaacactatttcaggctttggtctgacttactggttcgtgggcataaaataatgctattagtgactttaagaactaatgaggctgggcacggtggctcatgcctgcaatccaagcattttgggaggtcgaggccggtggataacgaggtcaggagattgagaccatcctggccaacatggtgaaaccctgtctctactaaaatagaaaaaattaagccaggcgtggtggcgggcgcctgtagtcccagctacttgggaggctgagggaggggaatcgcttgaacccgggtggtggaggttgcagcgagccgagattacaccactgcactccagccttgccaaagaacaagactccatctcaaaaaaaacaaaaacaaaacaaaaaaaaaaacaactaatgaaatgctgtagtatcttaacactggctttctggttttatcattctaagaatcccagagaaaccagggtattcttaggaaagaatggattcctgggaaaataaacatctgcaattaactgtaaacaactgcatcaaagtgttggctttagaatttgaaatgttcctatctgggtttttgtaggacctgagggcactcgctttgctcctgtcagtacacactcccaaacagttaaacccagctctaattccaactctgcaagagcttttaagcaaatgcaggacttgtctgcaacagagaaactcactccaagagcaagaagccaaagaaagaaaaactaaaggttagctttatggactactatcattacctttagggtgggaggagggagtaatacacttggtgtaactggtttaagagttgtgtgttcagctgaacctcctaaatataaatgctagaaacaaaattaacttcccacatccccccctaacgtgatcttaatgactttcagagaagtttcccttttggcatgtgttttcacagatgatgaaggagcaactcccattaaaaggcggcgtgttagcagtgatgaggagcacactgtagacagctgcatcagtgacatgaaaacagaaaccagggaggtcctgaccccaacgagcacttctgacaatgagaccagagactcctcaattattgatccaggaactgagcaagatcttccttcccctgaaaatagttctgttaaagaataccgaatggaagttccatcttcgttttcagaagacatgtcaaatatcaggtcacagcatgcagaagaacatccagatgaaaaaaacttgcatcttcagtatacttcctaaagggcaatcagataatggatatgttttatgtaattaagagttcactttagtggctttcatttaatatggctgtctgggaagaacagggttgcctagccctgtacaatgtaatttaaacttacagcatttttactgtgtatgatatggtgtcctctgtgccagttttgtaccttatagaggcagattgcctccgatcgctgtggttcttattatcaaaattaagtttacttgtatacggaacaaccacaagaaatttgattctgtaaagaatcctctttagctgtggcctggcagtatataaatggtgctttatttaacagaatacctgtggaggaaataaagcacacttgatgtaaaaataattgttttatttttattgacatgactgattgattgctattctgtgcacttaattaaactgattgtgatgacttttca

SEQ ID NO: 376462 - DNA, 5184 bp, Homo sapiens
aggagagtgaatgcaaagcatataatcctagacctgtctgtaaaacatacaccatggataagcagcctctgaatactgggggacagaaagatatgacagagttttttactgatctaattaccaaaatcgaagaaatgtctcccgaactgaaaaataccgtcaaaagtttatttggaggtgtaattacaaacaatgtcgtatccttggattgtgaacatgttagtcaaactgctgaagagttttatactgtgaggtgccaagtggctgatatgaagaacatttatgaatctcttgatgaagttactataaaagacactttggaaggtgataacatgtatacttgttctcattgtgggaagaaagtacgagctgaaaaaagggcatgttttaagaaattgcctcgcattttgagtttcaatactatgagatacacatttaatatggtcacgatgatgaaagagaaagtgaatacacacttttccttcccattacgtttggacatgacgccctatacagaagattttcttatgggaaagagtgagaggaaagaaggttttaaagaagtcagtgatcattcaaaagactcagagagctatgaatatgacttgataggagtgactgttcacacaggaacggcagatggtggacactattatagctttatcagagatatagtaaatccccatgcttataaaaacaataaatggtatctttttaatgatgctgaggtaaaaccttttgattctgctcaacttgcatctgaatgttttggtggagagatgacgaccaagacctatgattctgttacagataaatttatggacttctcttttgaaaagacacacagtgcatatatgctgttttacaaacgcatggaaccagaggaagaaaatggcagagaatacaaatttgatgtttcgtcagagttactagagtggatttggcatgataacatgcagtttcttcaagacaaaaacatttttgaacatacatattttggatttatgtggcaattgtgtagttgtattcccagtacattaccagatcctaaagctgtgtccttaatgacagcaaagttaagcacttcctttgtcctagagacatttattcattctaaagaaaagcccacgatgcttcagtggattgaactgttgacgaaacagtttaataatagtcaggcagcttgtgagtggtttttagatcgtatggctgatgacgactggtggccaatgcagatactaattaagtgccctaatcaaattgtgagacagatgtttcagcgtttgtgtatccatgtgattcagaggctgagacctgtgcatgctcatctctatttgcagccaggaatggaagatgggtcagatgatatggatacctcagtagaagatattggtggtcgttcatgtgtcactcgctttgtgagaaccctgttattaattatggaacatggtgtaaaacctcacagtaaacatcttacagagtattttgccttcctttacgaatttgcaaaaatgggtgaagaagagagccaatttttgctttcattgcaagctatatctacaatggtacatttttacatgggaacaaaaggacctgaaaatcctcaagttgaagtgttatcagaggaagaaggggaagaagaagaggaggaagaagatatcctctctctggcagaagaaaaatacaggccagctgcccttgaaaagatgatagctttagttgctcttttggttgaacagtctcgatcagaaaggcatttgacattatcacagactgacatggcagcattaacaggaggaaagggatttcccttcttgtttcaacatattcgtgatggcatcaatataagacaaacttgtaatctgattttcagcctgtgtcgatacaataatcgacttgcagaacatattgtatctatgcttttcacatcaatagcaaagttgactcctgaggcagccaatcctttctttaagttgttgactatgctaatggagtttgctggtggacctccaggaatgcctccctttgcatcttatattctgcagaggatatgggaggtgattgaatacaatccttctcagtgtctagattggttggcagtgcagacaccccgaaataaactggcacacagctgggtcttacagaatatggaaaactgggtcgagcggtttcttttggctcacaattatcctagagtgaggacttctgcagcttatcttctggtgtcccttataccaagcaattcattccgtcagatgttccggtcaacaaggtctttgcacatcccaacccgtgaccttccactcagtccagacacaacagtagtcctacatcaggtctacaacgtgctccttggtttgctctcaagagccaaactttatgttgatgctgctgttcatggcactacaaagctagtgccctattttagctttatgacttactgtttaatttccaaaactgagaagctgatgttttccacatatttcatggatttgtggaaccttttccagcctaaactttctgagccagcaatagctacaaatcacaataaacaggctttgctttcattttggtacaatgtctgtgctgactgtccagagaatatccgccttattgttcagaacccagtggtaaccaagaacattgccttcaattacatccttgctgaccatgatgatcaggatgtggtgctttttaaccgtgggatgctgccagcgtactatggcattctgaggctctgctgtgagcagtctcctgcattcacacgacaactggcttctcaccagaacatccagtgggcctttaagaatcttacaccacatgccagccaataccctggagcagtagaagaactgtttaacctgatgcagctgtttatagctcagaggccagatatgagagaagaagaattagaagatattaaacagttcaagaaaacaaccataagttgttacttacgttgcttagatggccgctcctgctggactactttaataagtgccttcagaatactattagaatctgatgaagacagacttcttgttgtatttaatcgaggattgattctaatgacagagtctttcaacactttgcacatgatgtatcacgaagctacagcttgccatgtgactggagatttagtagaacttctgtcaatatttctttcggttttgaagtctacacgcccttatcttcagagaaaagatgtgaaacaagcattaatccagtggcaggagcgaattgaatttgcccataaactgttaactcttcttaattcctatagtcctccagaacttagaaatgcctgtatagatgtcctcaaggaacttgtacttttgagtccccatgattttcttcatactctggttccctttctacaacacaaccattgtacttaccatcacagtaatataccagtgtcctagttgcctatgaaggtttgccacttcatcttgcactgttccccaaactttggactgagctatgccagactcagtctgctatgtcaaaaaactgcatcaagcttttgtgtgaagatcctgttttcgcagaatatattaaatgtatcctaatggatgaaagaacttttttaaacaacaacattgtctacacgttcatgacacatttccttctaaaggttcaaagtcaagtgttttctgaagcaaactgtgccaatttgatcagcactcttattacaaacttgataagccagtatcagaacctacagtctgatttctccaaccgagttgaaatttccaaagcaagtgcttctttaaatggggacctgagggcactcgctttgctcctgtcagtacacactcccaaacagttaaacccagctctaattccaactctgcaagagcttttaagcaaatgcaggacttgtctgcaacagagaaactcactccaagagcaagaagccaaagaaagaaaaactaaagatgatgaaggagcaactcccattaaaaggcggcgtgttagcagtgatgaggagcacactgtagacagctgcatcagtgacatgaaaacagaaaccagggaggtcctgaccccaacgagcacttctgacaatgagaccagagactcctcaattattgatccaggaactgagcaagatcttccttcccctgaaaatagttctgttaaagaataccgaatggaagttccatcttcgttttcagaagacatgtcaaatatcaggtcacagcatgcagaagaacagtccaacaatggtagatatgacgattgtaaagaatttaaagacctccactgttccaaggattctaccctagccgaggaagaatctgagttcccttctacttctatctctgcagttctgtctgacttagctgacttgagaagctgtgatggccaagctttgccctcccaggaccctgaggttgctttatctctcagttgtggccattccagaggactctttagtcatatgcagcaacatgacattttagataccctgtgtaggaccattgaatctacaatccatgtcgtcacaaggatatctggcaaaggaaaccaagctgcttcttgacattaggtgtagcatgtctacttttaagtccctcacccccaacccccatgctgtttgtataagttttgcttatttgtttttgtgcttcagtttgtccagtgctctctgcttgaatggcaagatagatttataggcttaattcttggtcaggcagaactccagatgaaaaaaacttgcatcttcagtatacttcctaaagggcaatcagataatggatatgttttatgtaattaagagttcactttagtggctttcatttaatatggctgtctgggaagaacagggttgcctagccctgtacaatgtaatttaaacttacagcatttttactgtgtatgatatggtgtcctctgtgccagttttgtaccttatagaggcagattgcctccgatcgctgtggttcttattatcaaaattaagtttacttgtatacggaacaaccacaagaaatttgattctgtaaagaatcctctttagctgtggcctggcagtatataaatggtgctttatttaacagaatacctgtggaggaaataaagcacacttgatgtaaaaataattgttttatttttattgacatgactgattgattgctattctgtgcacttaattaaactgattgtgatgacttttca

SEQ ID NO: 376463 - DNA, 7814 bp, Homo sapiens
  misc_feature (1184)..(1184): n is a, c, g, or t
  misc_feature (2847)..(2847): n is a, c, g, or t
  misc_feature (2902)..(2902): n is a, c, g, or t
  misc_feature (4118)..(4118): n is a, c, g, or t
  misc_feature (4546)..(4546): n is a, c, g, or t
  misc_feature (4620)..(4620): n is a, c, g, or t
aggagagtgaatgcaaagcatataatcctagacctgtctgtaaaacatacaccatggataagcagcctctgaatactgggggacagaaagatatgacagagttttttactgatctaattaccaaaatcgaagaaatgtctcccgaactgaaaaataccgtcaaaagtttatttggaggtgtaattacaaacaatgtcgtatccttggattgtgaacatgttagtcaaactgctgaagagttttatactgtgaggtgccaagtggctgatatgaagaacatttatgaatctcttgatgaagttactataaaagacactttggaaggtgataacatgtatacttgttctcattgtgggaagaaagtacgagctgaaaaaagggcatgttttaagaaattgcctcgcattttgagtttcaatactatgagatacacatttaatatggtcacgatgatgaaagagaaagtgaatacacacttttccttcccattacgtttggacatgacgccctatacagaagattttcttatgggaaagagtgagaggaaagaaggttttaaagaagtcagtgatcattcaaaagactcagagagctatgaatatgacttgataggagtgactgttcacacaggaacggcagatggtggacactattatagctttatcagagatatagtaaatccccatgcttataaaaacaataaatggtatctttttaatgatgctgaggtaaaaccttttgattctgctcaacttgcatctgaatgttttggtggagagatgacgaccaagacctatgattctgttacagataaatttatggacttctcttttgaaaagacacacagtgcatatatgctgttttacaaacgcatggaaccagaggaagaaaatggcagagaatacaaatttgatgtttcgtcagagttactagagtggatttggcatgataacatgcagtttcttcaagacaaaaacatttttgaacatacatattttgggtaagtttggtaaatttcatagtagatattttacacattttaaaaaaatcttacgtgtgaattttaaatgattatttttaaattctagatttatgtggcaattgtgtagttgtattcccagtacattaccagatcctaaagctgtgtccttaatgacagcaaaggtaataaatatatgaacttnaaataattctgtcaaaatttactactttaaaatgattgaagcttttttgctttatcttttcttacagttaagcacttcctttgtcctagagacatttattcattctaaagaaaagcccacgatgcttcagtggattgaactgttgacgaaacagtttaataatagtcaggcagcttgtgagtggtttttagatcgtatggctgatgacgactggtggccaatgcagatactaattaagtgccctaatcaaattgtgagacagatgtttcagcgtttgtgtatccatgtgattcagaggctgagacctgtgcatgctcatctctatttgcagccaggaatggaagatgggtcagatgatatggatacctcagtagaagatattggtggtcgttcatgtgtcactcgctttgtgagaaccctgttattaattatggaacatggtgtaaaacctcacagtaaacatcttacagagtattttgccttcctttacgaatttgcaaaaatgggtgaagaagagagccaatttttgctttcattgcaagctatatctacaatggtacatttttacatgggaacaaaaggacctgaaaatcctcaagttgaagtgttatcagaggaagaaggggaagaagaagaggaggaagaagatatcctctctctggcagaagaaaaatacaggccagctgcccttgaaaagatgatagctttagttgctcttttggttgaacagtctcgatcagaaaggcatttgacattatcacagactgacatggcagcattaacaggaggaaagggatttcccttcttgtttcaacatattcgtgatggcatcaatataagacaaacttgtaatctgattttcagcctgtgtcgatacaataatcgacttgcagaacatattgtatctatgcttttcacatcaatagcaaagttgactcctgaggcagccaatcctttctttaagttgttgactatgctaatggagtttgctggtggacctccaggaatgcctccctttgcatcttatattctgcagaggatatgggaggtgattgaatacaatccttctcagtgtctagattggttggcagtgcagacaccccgaaataaactggcacacagctgggtcttacagaatatggaaaactgggtcgagcggtttcttttggctcacaattatcctagagtgaggacttgcagtagaagaactgtttaacctgatgcagctgtttatagctcagaggccagatatgagagaagaagaattagaagatattaaacagttcaagaaaacaaccataagttgttacttacgttgcttagatggccgctcctgctggactactttaataagtgccttcagaatactattagaatctgatgaagacagacttcttgttgtatttaatcgaggattgattctaatgacagaggtaaatattctattgcattttactgtggatattatctcattttaatgttctcaccaagacttactttatagacatttagagtttatggtaaactgttttacaggtggcaaggttttaattatatagatcagtaaacctgaatttatatcccaagaataattaggtcataatttttagggtgctgttcctttttccatagtaattccatacttttcccattattttgtatntagaacagccatttgaaatagactagttttattcatttgtagggacaaaaatganatacatgtgatttcattaagggcacacataatttcccaaaagcctacttatttgacagtatagaaactgaggttaccattgtgaacccggaaaatctgagacaggtctcagttaatttagaaagtttattttgccaaggttgaggacgcgcccgtgacacagcctcaggaagtcctgatggcacgtgcccaaggtggttgggacacagcttgattttatacattttagggagacatgagacatcaatctgtatgtaggaagtacattagctctgtccagaaaggcagagacaacccaaagcaaggcctctccttcctctggggccttcctggtcacaggtatgtgagagacagatggttgcgttcttttgagtttctgataagtctttccaaaggaggcaatcagaatatgcatctatctgggtgagcagagggatgactttgaatagtatgagaggccgatttgccctgagcggttcccagcttgaaggggcccaagatattttcctttcacaccatcctcagaggaaaccagaaggactattacagggttaaaatcagctgtttatgcttcctataattcttgaacatccacaagtatgagatggctgcagagtcaccagaggtacgtgagccctttagtctgataaacatgccaagagtaccataagaattcacaggtaggatgttttttcagttaatgataataaaaaataagagaacaggtttgcactttgaagaatgtggatttgcaaaggtaagggggaaaacatttagataaatgacaataagcactgaggcaaagaaatattggttatgtttgaggaaggctaagtattaaaaaaaaggtaggtgaagaggagtagtaagaatttcattctttaaaatgcaacagatgtttatgctgctttggttgtatttttagaaaaaaaaaatttttttttaatgcaacagatgtttaaatgtctacctctgtgccaagcactgtggtaggtactagggacacagcagtgaacaagacatactggtttctgtccccacagcttacaagttacatactgtacaagtacattgttcatattaggtactgctgcaggttctgggctaagaattttaacatttgaactgtgggtattacagtgtgtaagctgtagtgaactggtggaagaggattcaaagaagggtgctgtatagtaaaataggaaaaaaactaaggncttaattaagctaatacagttaaaggaattaaaagatttaacaagccaatataaaggaaatgaattcctaccttttgcagctctttttacctctttcaggcctactcttttgagtatggctgacagtcactttaccattgtctttggacagagaccctggaaagttggttaaagcagttgcctattctccctaatcttttgtgacctactgctttgtaattttgaagacttaacaatcttagagcaagtacttttttaaaaaaatgtgattaaactatttcttcagactagaatatacacacaaaatagcagagctctgaaggtgaggaatgtttaaaagagcttaatgagagtttaacttcaggatagaaagcaaatacgtttgctttgcacacatgtgcacacacagtctgagtctgaaaacatcnatcgtagaggacgagtactaccattttgtggctcagtaagcaaaaatgaaattaagttttcaattttttcaaancatttgtagtctttcaacactttgcacatgatgtatcacgaagctacagcttgccatgtgactggagatttagtagaacttctgtcaatatttctttcggttttgaagtctacacgcccttatcttcagagaaaagatgtgaaacaagcattaatccagtggcaggagcgaattgaatttgcccataaactgttaactcttcttaattcctatagtcctccagaacttagaaatgcctgtatagatgtcctcaaggaacttgtacttttgagtccccatgattttcttcatactctggttccctttctacaacacaaccattgtacttaccatcacagtaatataccatttctctcggaccttatttcccttgtcgagaaaatatcaagctaataggagggaaaagcaatattcggcctccgcgccctgaactcaatatgtgcctcttgcccacaatggtggaaaccagtaagggcaaagatgacgtttatgatcgtatgctgctagactacttcttttcttatcatcagttcatccatctattatgccgagttgcaatcaactgtgaaaaatttactgaaacattagttaagctgagtgtcctagttgcctatgaaggtttgccacttcatcttgcactgttccccaaactttggactgagctatgccagactcagtctgctatgtcaaaaaactgcatcaagcttttgtgtgaagatcctgttttcgcagaatatattaaatgtatcctaatggatgaaagaacttttttaaacaacaacattgtctacacgttcatgacacatttccttctaaaggttcaaagtcaagtgttttctgaagcaaactgtgccaatttgatcagcactcttattacaaacttgataagccagtatcagaacctacagtctgatttctccaaccgagttgaaatttccaaagcaagtgcttctttaaatggggtaagaactatgcagaggcggcggcacacacttttaaactgtccttcagttaactgtgtggccttcatatgattttactctcgtaactttaacttactgattcaaactcttaagccatgtgcgacaaaaaaacaagttttaaatacacgtttactatgccttgtatgtacacagcacactctatcaccttggaagctacaagctggtatcattaaatgctgaaaggtaataaagggaacatcttagtggtcttatctctacttgggtatatttttggaaacaatacttgtgatgtttctattactgcctatggctcctatgtaactgaaacaattaatgatctactgatttaaaaaaggcagttaaatctagagcattagttgccttgtgcagactcccatgacagccatgtcctagaataatggaacactctggaaatgggctagaatgttgagcagcagcctcccaaatcacagtatgcataaaagccaaaacagatgacagagctcagtaaggaagaccttactatttgtgacatccatcagaattttaacttgagaaactgatttcaaggtttgtttttaaaattcttatatttccttttccatttttcagaaaacactatttcaggctttggtctgacttactggttcgtgggcataaaataatgctattagtgactttaagaactaatgaggctgggcacggtggctcatgcctgcaatccaagcattttgggaggtcgaggccggtggataacgaggtcaggagattgagaccatcctggccaacatggtgaaaccctgtctctactaaaatagaaaaaattaagccaggcgtggtggcgggcgcctgtagtcccagctacttgggaggctgagggaggggaatcgcttgaacccgggtggtggaggttgcagcgagccgagattacaccactgcactccagccttgccaaagaacaagactccatctcaaaaaaaacaaaaacaaaacaaaaaaaaaaacaactaatgaaatgctgtagtatcttaacactggctttctggttttatcattctaagaatcccagagaaaccagggtattcttaggaaagaatggattcctgggaaaataaacatctgcaattaactgtaaacaactgcatcaaagtgttggctttagaatttgaaatgttcctatctgggtttttgtaggacctgagggcactcgctttgctcctgtcagtacacactcccaaacagttaaacccagctctaattccaactctgcaagagcttttaagcaaatgcaggacttgtctgcaacagagaaactcactccaagagcaagaagccaaagaaagaaaaactaaaggttagctttatggactactatcattacctttagggtgggaggagggagtaatacacttggtgtaactggtttaagagttgtgtgttcagctgaacctcctaaatataaatgctagaaacaaaattaacttcccacatccccccctaacgtgatcttaatgactttcagagaagtttcccttttggcatgtgttttcacagatgatgaaggagcaactcccattaaaaggcggcgtgttagcagtgatgaggagcacactgtagacagctgcatcagtgacatgaaaacagaaaccagggaggtcctgaccccaacgagcacttctgacaatgagaccagagactcctcaattattgatccaggaactgagcaagatcttccttcccctgaaaatagttctgttaaagaataccgaatggaagttccatcttcgttttcagaagacatgtcaaatatcaggtcacagcatgcagaagaacatccagatgaaaaaaacttgcatcttcagtatacttcctaaagggcaatcagataatggatatgttttatgtaattaagagttcactttagtggctttcatttaatatggctgtctgggaagaacagggttgcctagccctgtacaatgtaatttaaacttacagcatttttactgtgtatgatatggtgtcctctgtgccagttttgtaccttatagaggcagattgcctccgatcgctgtggttcttattatcaaaattaagtttacttgtatacggaacaaccacaagaaatttgattctgtaaagaatcctctttagctgtggcctggcagtatataaatggtgctttatttaacagaatacctgtggaggaaataaagcacacttgatgta

SEQ ID NO: 376464 - DNA, 2452 bp, Homo sapiens
  misc_feature (168)..(168): n is a, c, g, or t
cattggtccgagagaaattaggaaattgggagggtggaagaggataagagggtgtgtgatacttgagtttgagctctcataggtagacagttggagttgatgaaaaggtcaaaggtaaggccatgggaattagttctcagtggagcttatgtgaatgctaatttctcncggagccggtccattggtccgagagaaattagaaatgcctgtatagatgtcctcaaggaacttgtacttttgagtccccatgattttcttcatactctggttccctttctacaacacaaccattgtacttaccatcacagtaatataccaagtacgtatttatctagcacagtacttcaatatggttcgcatttaatcgttctgcacactgaagcatggagatttattttttccatttattcttactgtacacttttaatatcctaatttctctcggaccttatttcccttgtcgagaaaatatcaagctaataggagggaaaagcaatattcggcctccgcgccctgaactcaatatgtgcctcttgcccacaatggtggaaaccagtaagggcaaagatgacgtttatgatcgtatgctgctagactacttcttttcttatcatcagttcatccatctattatgccgagttgcaatcaactgtgaaaaatttactgaaacattagttaagctgagtgtcctagttgcctatgaaggtttgccacttcatcttgcactgttccccaaactttggactgagctatgccagactcagtctgctatgtcaaaaaactgcatcaagcttttgtgtgaagatcctgttttcgcagaatatattaaatgtatcctaatggatgaaagaacttttttaaacaacaacattgtctacacgttcatgacacatttccttctaaaggttcaaagtcaagtgttttctgaagcaaactgtgccaatttgatcagcactcttattacaaacttgataagccagtatcagaacctacagtctgatttctccaaccgagttgaaatttccaaagcaagtgcttctttaaatggggacctgagggcactcgctttgctcctgtcagtacacactcccaaacagttaaacccagctctaattccaactctgcaagagcttttaagcaaatgcaggacttgtctgcaacagagaaactcactccaagagcaagaagccaaagaaagaaaaactaaagatgatgaaggagcaactcccattaaaaggcggcgtgttagcagtgatgaggagcacactgtagacagctgcatcagtgacatgaaaacagaaaccagggaggtcctgaccccaacgagcacttctgacaatgagaccagagactcctcaattattgatccaggaactgagcaagatcttccttcccctgaaaatagttctgttaaagaataccgaatggaagttccatcttcgttttcagaagacatgtcaaatatcaggtcacagcatgcagaagaacagtccaacaatggtagatatgacgattgtaaagaatttaaagacctccactgttccaaggattctaccctagccgaggaagaatctgagttcccttctacttctatctctgcagttctgtctgacttagctgacttgagaagctgtgatggccaagctttgccctcccaggaccctgaggttgctttatctctcagttgtggccattccagaggactctttagtcatatgcagcaacatgacattttagataccctgtgtaggaccattgaatctacaatccatgtcgtcacaaggatatctggcaaaggaaaccaagctgcttcttgacattaggtgtagcatgtctacttttaagtccctcacccccaacccccatgctgtttgtataagttttgcttatttgtttttgtgcttcagtttgtccagtgctctctgcttgaatggcaagatagatttataggcttaattcttggtcaggcagaactccagatgaaaaaaacttgcatcttcagtatacttcctaaagggcaatcagataatggatatgttttatgtaattaagagttcactttagtggctttcatttaatatggctgtctgggaagaacagggttgcctagccctgtacaatgtaatttaaacttacagcatttttactgtgtatgatatggtgtcctctgtgccagttttgtaccttatagaggcagattgcctccgatcgctgtggttcttattatcaaaattaagtttacttgtatacggaacaaccacaagaaatttgattctgtaaagaatcctctttagctgtggcctggcagtatataaatggtgctttatttaacagaatacctgtggaggaaataaagcacacttgatgtaaaaataattgttttatttttattgacatgactgattgattgctattctgtgcacttaattaaactgattgtgatgacttttca

SEQ ID NO: 376465 - DNA, 1888 bp, Homo sapiens
aaaatatagaaaatatgcagttatgactagaaatagctgtaatattgtacctgcagagttgagtatctcactagtataatttataattataacctattctgatttcttttcaaatattaggtgtcctagttgcctatgaaggtttgccacttcatcttgcactgttccccaaactttggactgagctatgccagactcagtctgctatgtcaaaaaactgcatcaagcttttgtgtgaagatcctgttttcgcagaatatattaaatgtatcctaatggatgaaagaacttttttaaacaacaacattgtctacacgttcatgacacatttccttctaaaggttcaaagtcaagtgttttctgaagcaaactgtgccaatttgatcagcactcttattacaaacttgataagccagtatcagaacctacagtctgatttctccaaccgagttgaaatttccaaagcaagtgcttctttaaatggggacctgagggcactcgctttgctcctgtcagtacacactcccaaacagttaaacccagctctaattccaactctgcaagagcttttaagcaaatgcaggacttgtctgcaacagagaaactcactccaagagcaagaagccaaagaaagaaaaactaaagatgatgaaggagcaactcccattaaaaggcggcgtgttagcagtgatgaggagcacactgtagacagctgcatcagtgacatgaaaacagaaaccagggaggtcctgaccccaacgagcacttctgacaatgagaccagagactcctcaattattgatccaggaactgagcaagatcttccttcccctgaaaatagttctgttaaagaataccgaatggaagttccatcttcgttttcagaagacatgtcaaatatcaggtcacagcatgcagaagaacagtccaacaatggtagatatgacgattgtaaagaatttaaagacctccactgttccaaggattctaccctagccgaggaagaatctgagttcccttctacttctatctctgcagttctgtctgacttagctgacttgagaagctgtgatggccaagctttgccctcccaggaccctgaggttgctttatctctcagttgtggccattccagaggactctttagtcatatgcagcaacatgacattttagataccctgtgtaggaccattgaatctacaatccatgtcgtcacaaggatatctggcaaaggaaaccaagctgcttcttgacattaggtgtagcatgtctacttttaagtccctcacccccaacccccatgctgtttgtataagttttgcttatttgtttttgtgcttcagtttgtccagtgctctctgcttgaatggcaagatagatttataggcttaattcttggtcaggcagaactccagatgaaaaaaacttgcatcttcagtatacttcctaaagggcaatcagataatggatatgttttatgtaattaagagttcactttagtggctttcatttaatatggctgtctgggaagaacagggttgcctagccctgtacaatgtaatttaaacttacagcatttttactgtgtatgatatggtgtcctctgtgccagttttgtaccttatagaggcagattgcctccgatcgctgtggttcttattatcaaaattaagtttacttgtatacggaacaaccacaagaaatttgattctgtaaagaatcctctttagctgtggcctggcagtatataaatggtgctttatttaacagaatacctgtggaggaaataaagcacacttgatgtaaaaataattgttttatttttattgacatgactgattgattgctattctgtgcacttaattaaactgattgtgatgacttttca

SEQ ID NO: 376466 - DNA, 831 bp, Homo sapiens
gcctactactactactaaattcgcggccgcgtcgacggaccctgaggttgctttatctctcagttgtggccattccagaggactctttagtcatatgcagcaacatgacattttagataccctgtgtaggaccattgaatctacaatccatgtcgtcacaaggatatctggcaaaggaaaccaagctgcttcttgacattaggtgtagcatgtctacttttaagtccctcacccccaacccccatgctgtttgtataagttttgcttatttgtttttgtgcttcagtttgtccagtgctctctgcttgaatggcaagatagatttataggcttaattcttggtcaggcagaactccagatgaaaaaaacttgcatcttcagtatacttcctaaagggcaatcagataatggatatgttttatgtaattaagagttcactttagtggctttcatttaatatggctgtctgggaagaacagggttgcctagccctgtacaatgtaatttaaacttacagcatttttactgtgtatgatatggtgtcctctgtgccagttttgtaccttatagaggcagattgcctccgatcgctgtggttcttattatcaaaattaagtttacttgtatacggaacaaccacaagaaatttgattctgtaaagaatcctctttagctgtggcctggcagtatataaatggtgctttatttaacagaatacctgtggaggaaataaagcacacttgatgtaaaaataattgttttatttttattgacatgactgattgattgctattctgtgcacttaattaaactgattgtgatgacttttca

SEQ ID NO: 376467 - DNA, 3853 bp, Homo sapiens
aggagagtgaatgcaaagcatataatcctagacctgtctgtaaaacatacaccatggataagcagcctctgaatactgggggacagaaagatatgacagagttttttactgatctaattaccaaaatcgaagaaatgtctcccgaactgaaaaataccgtcaaaagtttatttggaggtgtaattacaaacaatgtcgtatccttggattgtgaacatgttagtcaaactgctgaagagttttatactgtgaggtgccaagtggctgatatgaagaacatttatgaatctcttgatgaagttactataaaagacactttggaaggtgataacatgtatacttgttctcattgtgggaagaaagtacgagctgaaaaaagggcatgttttaagaaattgcctcgcattttgagtttcaatactatgagatacacatttaatatggtcacgatgatgaaagagaaagtgaatacacacttttccttcccattacgtttggacatgacgccctatacagaagattttcttatgggaaagagtgagaggaaagaaggttttaaagaagtcagtgatcattcaaaagactcagagagctatgaatatgacttgataggagtgactgttcacacaggaacggcagatggtggacactattatagctttatcagagatatagtaaatccccatgcttataaaaacaataaatggtatctttttaatgatgctgaggtaaaaccttttgattctgctcaacttgcatctgaatgttttggtggagagatgacgaccaagacctatgattctgttacagataaatttatggacttctcttttgaaaagacacacagtgcatatatgctgttttacaaacgcatggaaccagaggaagaaaatggcagagaatacaaatttgatgtttcgtcagagttactagagtggatttggcatgataacatgcagtttcttcaagacaaaaacatttttgaacatacatattttggatttatgtggcaattgtgtagttgtattcccagtacattaccagatcctaaagctgtgtccttaatgacagcaaagttaagcacttcctttgtcctagagacatttattcattctaaagaaaagcccacgatgcttcagtggattgaactgttgacgaaacagtttaataatagtcaggcagcttgtgagtggtttttagatcgtatggctgatgacgactggtggccaatgcagatactaattaagtgccctaatcaaattgtgagacagatgtttcagcgtttgtgtatccatgtgattcagaggctgagacctgtgcatgctcatctctatttgcagccaggaatggaagatgggtcagatgatatggatacctcagtagaagatattggtggtcgttcatgtgtcactcgctttgtgagaaccctgttattaattatggaacatggtgtaaaacctcacagtaaacatcttacagagtattttgccttcctttacgaatttgcaaaaatgggtgaagaagagagccaatttttgctttcattgcaagctatatctacaatggtacatttttacatgggaacaaaaggacctgaaaatcctcaagttgaagtgttatcagaggaagaaggggaagaagaagaggaggaagaagatatcctctctctggcagaagaaaaatacaggccagctgcccttgaaaagatgatagctttagttgctcttttggttgaacagtctcgatcagaaaggcatttgacattatcacagactgacatggcagcattaacaggaggaaagggatttcccttcttgtttcaacatattcgtgatggcatcaatataagacaaacttgtaatctgattttcagcctgtgtcgatacaataatcgacttgcagaacatattgtatctatgcttttcacatcaatagcaaagttgactcctgaggcagccaatcctttctttaagttgttgactatgctaatggagtttgctggtggacctccaggaatgcctccctttgcatcttatattctgcagaggatatgggaggtgattgaatacaatccttctcagtgtctagattggttggcagtgcagacaccccgaaataaactggcacacagctgggtcttacagaatatggaaaactgggtcgagcggtttcttttggctcacaattatcctagagtgaggacttctgcagcttatcttctggtgtcccttataccaagcaattcattccgtcagatgttccggtcaacaaggtctttgcacatcccaacccgtgaccttccactcagtccagacacaacagtagtcctacatcaggtctacaacgtgctccttggtttgctctcaagagccaaactttatgttgatgctgctgttcatggcactacaaagctagtgccctattttagctttatgacttactgtttaatttccaaaactgagaagctgatgttttccacatatttcatggatttgtggaaccttttccagcctaaactttctgagccagcaatagctacaaatcacaataaacaggctttgctttcattttggtacaatgtctgtgctgactgtccagagaatatccgccttattgttcagaacccagtggtaaccaagaacattgccttcaattacatccttgctgaccatgatgatcaggatgtggtgctttttaaccgtgggatgctgccagcgtactatggcattctgaggctctgctgtgagcagtctcctgcattcacacgacaactggcttctcaccagaacatccagtgggcctttaagaatcttacaccacatgccagccaataccctggagcagtagaagaactgtttaacctgatgcagctgtttatagctcagaggccagatatgagagaagaagaattagaagatattaaacagttcaagaaaacaaccataagttgttacttacgttgcttagatggccgctcctgctggactactttaataagtgccttcagaatactattagaatctgatgaagacagacttcttgttgtatttaatcgaggattgattctaatgacagagtctttcaacactttgcacatgatgtatcacgaagctacagcttgccatgtgactggagatttagtagaacttctgtcaatatttctttcggttttgaagtctacacgcccttatcttcagagaaaagatgtgaaacaagcattaatccagtggcaggagcgaattgaatttgcccataaactgttaactcttcttaattcctatagtcctccagaacttagaaatgcctgtatagatgtcctcaaggaacttgtacttttgagtccccatgattttcttcatactctggttccctttctacaacacaaccattgtacttaccatcacagtaatataccatttctctcggaccttatttcccttgtcgagaaaatatcaagctaataggagggaaaagcaatattcggcctccgcgccctgaactcaatatgtgcctcttgcccacaatggtggaaaccagtaagggcaaagatgacgtttatgatcgtatgctgctagactacttcttttcttatcatcagttcatccatctattatgccgagttgcaatcaactgtgaaaaatttactgaaacattagttaagctgagtgtcctagttgcctatgaaggtttgccacttcatcttgcactgttccccaaactttggactgagctatgccagactcagtctgctatgtcaaaaaactgcatcaagcttttgtgtgaagaacgtgtagacaatgttgttgtttaaaaaagttctttcatccattagatacattaacgggatcctgaa

SEQ ID NO: 376468 - DNA, 878 bp, Homo sapiens
gatttttttttgtgtgtgagataattaggaaagaagatttattgtttacccttgcagtgtttatggggggaaaaggtatttacagaattactgttgctagcgagaatatacagtaaagtttaaaacattttggagaattgattttgattcttaaaatgtgtctttttgcaacatatgctctggttacctataaatacattaatttggcccttgaaaacattcacatcctattctttgttagccttatttttccagtccttgttaactctctcagtgctggataataaacctgcatttcttttaaaacatttgttcagtttcggcatcagtgtcttcccccagcactcccttaatctaaattagtaacattttactgtatgaaaaatagttgctgttaactaaaaattcaataggtgagttagacatggcttttcaagtaggattttcagtggcttcagattccatcatacacaagtgtatgttttttctgtgtaagttttttccgtgtaagttttttccgtgctcaaccgtaagtgctcaaccatcttctccccactttagtctgctatgtcaaaaaactgcatcaagcttttgtgtgaagatcctgttttcgcagaatatattaaatgtatcctaatggatgaaagaacttttttaaacaacaacattgtctacacgttcatgacacatttccttctaaaggttcaaagtcaagtgttttctgaagcaaactgtgccaatttgatcagcactcttattacaaacttgataagccaaccagccgcatccgccagtctctgatgaagtaagcaaacagtgcagcagcatatagccaactgccaaaaactgtgcacactcccaacgatcgagacatagca

SEQ ID NO: 376469 - DNA, 2036 bp, Homo sapiens
aggagagtgaatgcaaagcatataatcctagacctgtctgtaaaacatacaccatggataagcagcctctgaatactgggggacagaaagatatgacagagttttttactgatctaattaccaaaatcgaagaaatgtctcccgaactgaaaaataccgtcaaaagtttatttggaggtgtaattacaaacaatgtcgtatccttggattgtgaacatgttagtcaaactgctgaagagttttatactgtgaggtgccaagtggctgatatgaagaacatttatgaatctcttgatgaagttactataaaagacactttggaaggtgataacatgtatacttgttctcattgtgggaagaaagtacgagctgaaaaaagggcatgttttaagaaattgcctcgcattttgagtttcaatactatgagatacacatttaatatggtcacgatgatgaaagagaaagtgaatacacacttttccttcccattacgtttggacatgacgccctatacagaagattttcttatgggaaagagtgagaggaaagaaggttttaaagaagtcagtgatcattcaaaagactcagagagctatgaatatgacttgataggagtgactgttcacacaggaacggcagatggtggacactattatagctttatcagagatatagtaaatccccatgcttataaaaacaataaatggtatctttttaatgatgctgaggtaaaaccttttgattctgctcaacttgcatctgaatgttttggtggagagatgacgaccaagacctatgattctgttacagataaatttatggacttctcttttgaaaagacacacagtgcatatatgctgttttacaaacgcatggaaccagaggaagaaaatggcagagaatacaaatttgatgtttcgtcagagttactagagtggatttggcatgataacatgcagtttcttcaagacaaaaacatttttgaacatacatattttggatttatgtggcaattgtgtagttgtattcccagtacattaccagatcctaaagctgtgtccttaatgacagcaaagttaagcacttcctttgtcctagagacatttattcattctaaagaaaagcccacgatgcttcagtggattgaactgttgacgaaacagtttaataatagtcaggcagcttgtgagtggtttttagatcgtatggctgatgacgactggtggccaatgcagatactaattaagtgccctaatcaaattgtgagacagatgtttcagcgtttgtgtatccatgtgattcagaggctgagacctgtgcatgctcatctctatttgcagccaggaatggaagatgggtcagatgatatggatacctcagtagaagatattggtggtcgttcatgtgtcactcgctttgtgagaaccctgttattaattatggaacatggtgtaaaacctcacagtaaacatcttacagagtattttgccttcctttacgaatttgcaaaaatgggtgaagaagagagccaatttttgctttcattgcaagctatatctacaatggtacatttttacatgggaacaaaaggacctgaaaatcctcaagttgaagtgttatcagaggaagaaggggaagaagaagaggaggaagaagatatcctctctctggcagaagaaaaatacaggccagctgcccttgaaaagatgatagctttagttgctcttttggttgaacagtctcgatcagaaaggtgaaatgtttcgaatttaaaatgtttaaagcatgtttggttttattatttttacataattgtttaccactagtttttccactagctttttattatatatgtttaattatgtaattgttattcactagcttttattatataattccttttaaataatactactattcatcaactcttgtggcataagaatttcagttttttctaccaaacttttacttcatctatgagtcgtgttagaaatagtcattgaaaaaatatacagtaaaatatctagcaaaataga

SEQ ID NO: 376470 - DNA, 2322 bp, Homo sapiens
aggagagtgaatgcaaagcatataatcctagacctgtctgtaaaacatacaccatggataagcagcctctgaatactgggggacagaaagatatgacagagttttttactgatctaattaccaaaatcgaagaaatgtctcccgaactgaaaaataccgtcaaaagtttatttggaggtgtaattacaaacaatgtcgtatccttggattgtgaacatgttagtcaaactgctgaagagttttatactgtgaggtgccaagtggctgatatgaagaacatttatgaatctcttgatgaagttactataaaagacactttggaaggtgataacatgtatacttgttctcattgtgggaagaaagtacgagctgaaaaaagggcatgttttaagaaattgcctcgcattttgagtttcaatactatgagatacacatttaatatggtcacgatgatgaaagagaaagtgaatacacacttttccttcccattacgtttggacatgacgccctatacagaagattttcttatgggaaagagtgagaggaaagaaggttttaaagaagtcagtgatcattcaaaagactcagagagctatgaatatgacttgataggagtgactgttcacacaggaacggcagatggtggacactattatagctttatcagagatatagtaaatccccatgcttataaaaacaataaatggtatctttttaatgatgctgaggtaaaaccttttgattctgctcaacttgcatctgaatgttttggtggagagatgacgaccaagacctatgattctgttacagataaatttatggacttctcttttgaaaagacacacagtgcatatatgctgttttacaaacgcatggaaccagaggaagaaaatggcagagaatacaaatttgatgtttcgtcagagttactagagtggatttggcatgataacatgcagtttcttcaagacaaaaacatttttgaacatacatattttggatttatgtggcaattgtgtagttgtattcccagtacattaccagatcctaaagctgtgtccttaatgacagcaaagttaagcacttcctttgtcctagagacatttattcattctaaagaaaagcccacgatgcttcagtggattgaactgttgacgaaacagtttaataatagtcaggcagcttgtgagtggtttttagatcgtatggctgatgacgactggtggccaatgcagatactaattaagtgccctaatcaaattgtgagacagatgtttcagcgtttgtgtatccatgtgattcagaggctgagacctgtgcatgctcatctctatttgcagccaggaatggaagatgggtcagatgatatggatacctcagtagaagatattggtggtcgttcatgtgtcactcgctttgtgagaaccctgttattaattatggaacatggtgtaaaacctcacagtaaacatcttacagagtattttgccttcctttacgaatttgcaaaaatgggtgaagaagagagccaatttttgctttcattgcaagctatatctacaatggtacatttttacatgggaacaaaaggacctgaaaatcctcaagttgaagtgttatcagaggaagaaggggaagaagaagaggaggaagaagatatcctctctctggcagaagaaaaatacaggccagctgcccttgaaaagatgatagctttagttgctcttttggttgaacagtctcgatcagaaaggcatttgacattatcacagactgacatggcagcattaacaggaggaaagggatttcccttcttgtttcaacatattcgtgatggcatcaatataagacaaacttgtaatctgattttcagcctgtgtcgatacaataatcgacttgcagaacatattgtatctatgcttttcacatcaatagcaaagttgactcctgaggcagccaatcctttctttaagttgttgactatgctaatggagtttgctggtggacctccaggaatgcctccctttgcatcttatattctgcagaggatatgggaggtgattgaatacaatccttctcagtgtctagattggttggcagtgcagacaccccgaaataaactggcacacagctgggtcttacagaatatggaaaactgggtcgagcggtttcttttggctcacaattatcctagagtgaggacttgtaagtcaaatatttagaatttcataaaccatttatttattgttcaaagttatgtttcattttgtttttaggcaactacgacatgcccattgttgtatactacgaaattcttggaga

SEQ ID NO: 376471 - DNA, 5433 bp, Homo sapiens
aggagagtgaatgcaaagcatataatcctagacctgtctgtaaaacatacaccatggataagcagcctctgaatactgggggacagaaagatatgacagagttttttactgatctaattaccaaaatcgaagaaatgtctcccgaactgaaaaataccgtcaaaagtttatttggaggtgtaattacaaacaatgtcgtatccttggattgtgaacatgttagtcaaactgctgaagagttttatactgtgaggtgccaagtggctgatatgaagaacatttatgaatctcttgatgaagttactataaaagacactttggaaggtgataacatgtatacttgttctcattgtgggaagaaagtacgagctgaaaaaagggcatgttttaagaaattgcctcgcattttgagtttcaatactatgagatacacatttaatatggtcacgatgatgaaagagaaagtgaatacacacttttccttcccattacgtttggacatgacgccctatacagaagattttcttatgggaaagagtgagaggaaagaaggttttaaagaagtcagtgatcattcaaaagactcagagagctatgaatatgacttgataggagtgactgttcacacaggaacggcagatggtggacactattatagctttatcagagatatagtaaatccccatgcttataaaaacaataaatggtatctttttaatgatgctgaggtaaaaccttttgattctgctcaacttgcatctgaatgttttggtggagagatgacgaccaagacctatgattctgttacagataaatttatggacttctcttttgaaaagacacacagtgcatatatgctgttttacaaacgcatggaaccagaggaagaaaatggcagagaatacaaatttgatgtttcgtcagagttactagagtggatttggcatgataacatgcagtttcttcaagacaaaaacatttttgaacatacatattttggatttatgtggcaattgtgtagttgtattcccagtacattaccagatcctaaagctgtgtccttaatgacagcaaagttaagcacttcctttgtcctagagacatttattcattctaaagaaaagcccacgatgcttcagtggattgaactgttgacgaaacagtttaataatagtcaggcagcttgtgagtggtttttagatcgtatggctgatgacgactggtggccaatgcagatactaattaagtgccctaatcaaattgtgagacagatgtttcagcgtttgtgtatccatgtgattcagaggctgagacctgtgcatgctcatctctatttgcagccaggaatggaagatgggtcagatgatatggatacctcagtagaagatattggtggtcgttcatgtgtcactcgctttgtgagaaccctgttattaattatggaacatggtgtaaaacctcacagtaaacatcttacagagtattttgccttcctttacgaatttgcaaaaatgggtgaagaagagagccaatttttgctttcattgcaagctatatctacaatggtacatttttacatgggaacaaaaggacctgaaaatcctcaagttgaagtgttatcagaggaagaaggggaagaagaagaggaggaagaagatatcctctctctggcagaagaaaaatacaggccagctgcccttgaaaagatgatagctttagttgctcttttggttgaacagtctcgatcagaaaggcatttgacattatcacagactgacatggcagcattaacaggaggaaagggatttcccttcttgtttcaacatattcgtgatggcatcaatataagacaaacttgtaatctgattttcagcctgtgtcgatacaataatcgacttgcagaacatattgtatctatgcttttcacatcaatagcaaagttgactcctgaggcagccaatcctttctttaagttgttgactatgctaatggagtttgctggtggacctccaggaatgcctccctttgcatcttatattctgcagaggatatgggaggtgattgaatacaatccttctcagtgtctagattggttggcagtgcagacaccccgaaataaactggcacacagctgggtcttacagaatatggaaaactgggtcgagcggtttcttttggctcacaattatcctagagtgaggacttctgcagcttatcttctggtgtcccttataccaagcaattcattccgtcagatgttccggtcaacaaggtctttgcacatcccaacccgtgaccttccactcagtccagacacaacagtagtcctacatcaggtctacaacgtgctccttggtttgctctcaagagccaaactttatgttgatgctgctgttcatggcactacaaagctagtgccctattttagctttatgacttactgtttaatttccaaaactgagaagctgatgttttccacatatttcatggatttgtggaaccttttccagcctaaactttctgagccagcaatagctacaaatcacaataaacaggctttgctttcattttggtacaatgtctgtgctgactgtccagagaatatccgccttattgttcagaacccagtggtaaccaagaacattgccttcaattacatccttgctgaccatgatgatcaggatgtggtgctttttaaccgtgggatgctgccagcgtactatggcattctgaggctctgctgtgagcagtctcctgcattcacacgacaactggcttctcaccagaacatccagtgggcctttaagaatcttacaccacatgccagccaataccctggagcagtagaagaactgtttaacctgatgcagctgtttatagctcagaggccagatatgagagaagaagaattagaagatattaaacagttcaagaaaacaaccataagttgttacttacgttgcttagatggccgctcctgctggactactttaataagtgccttcagaatactattagaatctgatgaagacagacttcttgttgtatttaatcgaggattgattctaatgacagagtctttcaacactttgcacatgatgtatcacgaagctacagcttgccatgtgactggagatttagtagaacttctgtcaatatttctttcggttttgaagtctacacgcccttatcttcagagaaaagatgtgaaacaagcattaatccagtggcaggagcgaattgaatttgcccataaactgttaactcttcttaattcctatagtcctccagaacttagaaatgcctgtatagatgtcctcaaggaacttgtacttttgagtccccatgattttcttcatactctggttccctttctacaacacaaccattgtacttaccatcacagtaatataccatttctctcggaccttatttcccttgtcgagaaaatatcaagctaataggagggaaaagcaatattcggcctccgcgccctgaactcaatatgtgcctcttgcccacaatggtggaaaccagtaagggcaaagatgacgtttatgatcgtatgctgctagactacttcttttcttatcatcagttcatccatctattatgccgagttgcaatcaactgtgaaaaatttactgaaacattagttaagctgagtgtcctagttgcctatgaaggtttgccacttcatcttgcactgttccccaaactttggactgagctatgccagactcagtctgctatgtcaaaaaactgcatcaagcttttgtgtgaagatcctgttttcgcagaatatattaaatgtatcctaatggatgaaagaacttttttaaacaacaacattgtctacacgttcatgacacatttccttctaaaggttcaaagtcaagtgttttctgaagcaaactgtgccaatttgatcagcactcttattacaaacttgataagccagtatcagaacctacagtctgatttctccaaccgagttgaaatttccaaagcaagtgcttctttaaatggggacctgagggcactcgctttgctcctgtcagtacacactcccaaacagttaaacccagctctaattccaactctgcaagagcttttaagcaaatgcaggacttgtctgcaacagagaaactcactccaagagcaagaagccaaagaaagaaaaactaaagatgatgaaggagcaactcccattaaaaggcggcgtgttagcagtgatgaggagcacactgtagacagctgcatcagtgacatgaaaacagaaaccagggaggtcctgaccccaacgagcacttctgacaatgagaccagagactcctcaattattgatccaggaactgagcaagatcttccttcccctgaaaatagttctgttaaagaataccgaatggaagttccatcttcgttttcagaagacatgtcaaatatcaggtcacagcatgcagaagaacagtccaacaatggtagatatgacgattgtaaagaatttaaagacctccactgttccaaggattctaccctagccgaggaagaatctgagttcccttctacttctatctctgcagttctgtctgacttagctgacttgagaagctgtgatggccaagctttgccctcccaggaccctgaggttgctttatctctcagttgtggccattccagaggactctttagtcatatgcagcaacatgacattttagataccctgtgtaggaccattgaatctacaatccatgtcgtcacaaggatatctggcaaaggaaaccaagctgcttcttgacattaggtgtagcatgtctacttttaagtccctcacccccaacccccatgctgtttgtataagttttgcttatttgtttttgtgcttcagtttgtccagtgctctctgcttgaatggcaagatagatttataggcttaattcttggtcaggcagaactccagatgaaaaaaacttgcatcttcagtatacttcctaaagggcaatcagataatggatatgttttatgtaattaagagttcactttagtggctttcatttaatatggctgtctgggaagaacagggttgcctagccctgtacaatgtaatttaaacttacagcatttttactgtgtatgatatggtgtcctctgtgccagttttgtaccttatagaggcagattgcctccgatcgctgtggttcttattatcaaaattaagtttacttgtatacggaacaaccacaagaaatttgattctgtaaagaatcctctttagctgtggcctggcagtatataaatggtgctttatttaacagaatacctgtggaggaaataaagcacacttgatgtaaaaataattgttttatttttattgacatgactgattgattgctattctgtgcacttaattaaactgattgtgatgacttttca

SEQ ID NO: 376472 - DNA, 3838 bp, Homo sapiens
cctgtaatcccagcactttgggaggccaaggcgggaggatcgcttgagcctaggagtttgagaccagcctaggcaacatagtgagaacccgtctctacacaaaatagaaaaatctagccgggtgtagtggcacatgcctgtagtcccagccactcggaggctgaggcaggaggatcgcttgagcctgagaagtggaggctgcagtgagctgtgatctcgccactgcatcccagcctgggtgacatagcgaaaccctgtctcaaaaacaaaacaaaacaagaatatcctgaaatcctcctctttctgttttagattgtatctatgcttttcacatcaatagcaaagttgactcctgaggcagccaatcctttctttaagttgttgactatgctaatggagtttgctggtggacctccaggaatgcctccctttgcatcttatattctgcagaggatatgggaggtgattgaatacaatccttctcagtgtctagattggttggcagtgcagacaccccgaaataaactggcacacagctgggtcttacagaatatggaaaactgggtcgagcggtttcttttggctcacaattatcctagagtgaggacttctgcagcttatcttctggtgtcccttataccaagcaattcattccgtcagatgttccggtcaacaaggtctttgcacatcccaacccgtgaccttccactcagtccagacacaacagtagtcctacatcaggtctacaacgtgctccttggtttgctctcaagagccaaactttatgttgatgctgctgttcatggcactacaaagctagtgccctattttagctttatgacttactgtttaatttccaaaactgagaagctgatgttttccacatatttcatggatttgtggaaccttttccagcctaaactttctgagccagcaatagctacaaatcacaataaacaggctttgctttcattttggtacaatgtctgtgctgactgtccagagaatatccgccttattgttcagaacccagtggtaaccaagaacattgccttcaattacatccttgctgaccatgatgatcaggatgtggtgctttttaaccgtgggatgctgccagcgtactatggcattctgaggctctgctgtgagcagtctcctgcattcacacgacaactggcttctcaccagaacatccagtgggcctttaagaatcttacaccacatgccagccaataccctggagcagtagaagaactgtttaacctgatgcagctgtttatagctcagaggccagatatgagagaagaagaattagaagatattaaacagttcaagaaaacaaccataagttgttacttacgttgcttagatggccgctcctgctggactactttaataagtgccttcagaatactattagaatctgatgaagacagacttcttgttgtatttaatcgaggattgattctaatgacagagtctttcaacactttgcacatgatgtatcacgaagctacagcttgccatgtgactggagatttagtagaacttctgtcaatatttctttcggttttgaagtctacacgcccttatcttcagagaaaagatgtgaaacaagcattaatccagtggcaggagcgaattgaatttgcccataaactgttaactcttcttaattcctatagtcctccagaacttagaaatgcctgtatagatgtcctcaaggaacttgtacttttgagtccccatgattttcttcatactctggttccctttctacaacacaaccattgtacttaccatcacagtaatataccatttctctcggaccttatttcccttgtcgagaaaatatcaagctaataggagggaaaagcaatattcggcctccgcgccctgaactcaatatgtgcctcttgcccacaatggtggaaaccagtaagggcaaagatgacgtttatgatcgtatgctgctagactacttcttttcttatcatcagttcatccatctattatgccgagttgcaatcaactgtgaaaaatttactgaaacattagttaagctgagtgtcctagttgcctatgaaggtttgccacttcatcttgcactgttccccaaactttggactgagctatgccagactcagtctgctatgtcaaaaaactgcatcaagcttttgtgtgaagatcctgttttcgcagaatatattaaatgtatcctaatggatgaaagaacttttttaaacaacaacattgtctacacgttcatgacacatttccttctaaaggttcaaagtcaagtgttttctgaagcaaactgtgccaatttgatcagcactcttattacaaacttgataagccagtatcagaacctacagtctgatttctccaaccgagttgaaatttccaaagcaagtgcttctttaaatggggacctgagggcactcgctttgctcctgtcagtacacactcccaaacagttaaacccagctctaattccaactctgcaagagcttttaagcaaatgcaggacttgtctgcaacagagaaactcactccaagagcaagaagccaaagaaagaaaaactaaagatgatgaaggagcaactcccattaaaaggcggcgtgttagcagtgatgaggagcacactgtagacagctgcatcagtgacatgaaaacagaaaccagggaggtcctgaccccaacgagcacttctgacaatgagaccagagactcctcaattattgatccaggaactgagcaagatcttccttcccctgaaaatagttctgttaaagaataccgaatggaagttccatcttcgttttcagaagacatgtcaaatatcaggtcacagcatgcagaagaacagtccaacaatggtagatatgacgattgtaaagaatttaaagacctccactgttccaaggattctaccctagccgaggaagaatctgagttcccttctacttctatctctgcagttctgtctgacttagctgacttgagaagctgtgatggccaagctttgccctcccaggaccctgaggttgctttatctctcagttgtggccattccagaggactctttagtcatatgcagcaacatgacattttagataccctgtgtaggaccattgaatctacaatccatgtcgtcacaaggatatctggcaaaggaaaccaagctgcttcttgacattaggtgtagcatgtctacttttaagtccctcacccccaacccccatgctgtttgtataagttttgcttatttgtttttgtgcttcagtttgtccagtgctctctgcttgaatggcaagatagatttataggcttaattcttggtcaggcagaactccagatgaaaaaaacttgcatcttcagtatacttcctaaagggcaatcagataatggatatgttttatgtaattaagagttcactttagtggctttcatttaatatggctgtctgggaagaacagggttgcctagccctgtacaatgtaatttaaacttacagcatttttactgtgtatgatatggtgtcctctgtgccagttttgtaccttatagaggcagattgcctccgatcgctgtggttcttattatcaaaattaagtttacttgtatacggaacaaccacaagaaatttgattctgtaaagaatcctctttagctgtggcctggcagtatataaatggtgctttatttaacagaatacctgtggaggaaataaagcacacttgatgtaaaaataattgttttatttttattgacatgactgattgattgctattctgtgcacttaattaaactgattgtgatgacttttca

SEQ ID NO: 376473 - DNA, 2088 bp, Homo sapiens
ccaggtgtacgctcggttccgggatgtgctgctgctcctttgcaccttactgtatgactcctggcaggtatgatgccttgacggcatttgtttcaacagaccaagatgtgatgggagtcattaggcagctggagtgagcagcctagggtctgcccctccattgttgagctcttcttgattactagtagcattccactgcttaaaatgcctgtatagatgtcctcaaggaacttgtacttttgagtccccatgattttcttcatactctggttccctttctacaacacaaccattgtacttaccatcacagtaatataccagtgtcctagttgcctatgaaggtttgccacttcatcttgcactgttccccaaactttggactgagctatgccagactcagtctgctatgtcaaaaaactgcatcaagcttttgtgtgaagatcctgttttcgcagaatatattaaatgtatcctaatggatgaaagaacttttttaaacaacaacattgtctacacgttcatgacacatttccttctaaaggttcaaagtcaagtgttttctgaagcaaactgtgccaatttgatcagcactcttattacaaacttgataagccagtatcagaacctacagtctgatttctccaaccgagttgaaatttccaaagcaagtgcttctttaaatggggacctgagggcactcgctttgctcctgtcagtacacactcccaaacagttaaacccagctctaattccaactctgcaagagcttttaagcaaatgcaggacttgtctgcaacagagaaactcactccaagagcaagaagccaaagaaagaaaaactaaagatgatgaaggagcaactcccattaaaaggcggcgtgttagcagtgatgaggagcacactgtagacagctgcatcagtgacatgaaaacagaaaccagggaggtcctgaccccaacgagcacttctgacaatgagaccagagactcctcaattattgatccaggaactgagcaagatcttccttcccctgaaaatagttctgttaaagaataccgaatggaagttccatcttcgttttcagaagacatgtcaaatatcaggtcacagcatgcagaagaacagtccaacaatggtagatatgacgattgtaaagaatttaaagacctccactgttccaaggattctaccctagccgaggaagaatctgagttcccttctacttctatctctgcagttctgtctgacttagctgacttgagaagctgtgatggccaagctttgccctcccaggaccctgaggttgctttatctctcagttgtggccattccagaggactctttagtcatatgcagcaacatgacattttagataccctgtgtaggaccattgaatctacaatccatgtcgtcacaaggatatctggcaaaggaaaccaagctgcttcttgacattaggtgtagcatgtctacttttaagtccctcacccccaacccccatgctgtttgtataagttttgcttatttgtttttgtgcttcagtttgtccagtgctctctgcttgaatggcaagatagatttataggcttaattcttggtcaggcagaactccagatgaaaaaaacttgcatcttcagtatacttcctaaagggcaatcagataatggatatgttttatgtaattaagagttcactttagtggctttcatttaatatggctgtctgggaagaacagggttgcctagccctgtacaatgtaatttaaacttacagcatttttactgtgtatgatatggtgtcctctgtgccagttttgtaccttatagaggcagattgcctccgatcgctgtggttcttattatcaaaattaagtttacttgtatacggaacaaccacaagaaatttgattctgtaaagaatcctctttagctgtggcctggcagtatataaatggtgctttatttaacagaatacctgtggaggaaataaagcacacttgatgtaaaaataattgttttatttttattgacatgactgattgattgctattctgtgcacttaattaaactgattgtgatgacttttca

SEQ ID NO: 376474 - DNA, 1483 bp, Homo sapiens
gcggagcgtcaaacgggtagagctacagtcggattcgccatccgagtgagattccaaagcacgtgcttctgttaaatggggacctgagggcactcgctttgctcctgtcagtacacactcccaaacagttaaacccagctctaattccaactctgcaagagcttttaagcaaatgcaggacttgtctgcaacagagaaactcactccaagagcaagaagccaaagaaagaaaaactaaagatgatgaaggagcaactcccattaaaaggcggcgtgttagcagtgatgaggagcacactgtagacagctgcatcagtgacatgaaaacagaaaccagggaggtcctgaccccaacgagcacttctgacaatgagaccagagactcctcaattattgatccaggaactgagcaagatcttccttcccctgaaaatagttctgttaaagaataccgaatggaagttccatcttcgttttcagaagacatgtcaaatatcaggtcacagcatgcagaagaacagtccaacaatggtagatatgacgattgtaaagaatttaaagacctccactgttccaaggattctaccctagccgaggaagaatctgagttcccttctacttctatctctgcagttctgtctgacttagctgacttgagaagctgtgatggccaagctttgccctcccaggaccctgaggttgctttatctctcagttgtggccattccagaggactctttagtcatatgcagcaacatgacattttagataccctgtgtaggaccattgaatctacaatccatgtcgtcacaaggatatctggcaaaggaaaccaagctgcttcttgacattaggtgtagcatgtctacttttaagtccctcacccccaacccccatgctgtttgtataagttttgcttatttgtttttgtgcttcagtttgtccagtgctctctgcttgaatggcaagatagatttataggcttaattcttggtcaggcagaactccagatgaaaaaaacttgcatcttcagtatacttcctaaagggcaatcagataatggatatgttttatgtaattaagagttcactttagtggctttcatttaatatggctgtctgggaagaacagggttgcctagccctgtacaatgtaatttaaacttacagcatttttactgtgtatgatatggtgtcctctgtgccagttttgtaccttatagaggcagattgcctccgatcgctgtggttcttattatcaaaattaagtttacttgtatacggaacaaccacaagaaatttgattctgtaaagaatcctctttagctgtggcctggcagtatataaatggtgctttatttaacagaatacctgtggaggaaataaagcacacttgatgtaaaaataattgttttatttttattgacatgactgattgattgctattctgtgcacttaattaaactgattgtgatgacttttca

SEQ ID NO: 376475 - DNA, 4654 bp, Homo sapiens
aggagagtgaatgcaaagcatataatcctagacctgtctgtaaaacatacaccatggataagcagcctctgaatactgggggacagaaagatatgacagagttttttactgatctaattaccaaaatcgaagaaatgtctcccgaactgaaaaataccgtcaaaagtttatttggaggtgtaattacaaacaatgtcgtatccttggattgtgaacatgttagtcaaactgctgaagagttttatactgtgaggtgccaagtggctgatatgaagaacatttatgaatctcttgatgaagttactataaaagacactttggaaggtgataacatgtatacttgttctcattgtgggaagaaagtacgagctgaaaaaagggcatgttttaagaaattgcctcgcattttgagtttcaatactatgagatacacatttaatatggtcacgatgatgaaagagaaagtgaatacacacttttccttcccattacgtttggacatgacgccctatacagaagattttcttatgggaaagagtgagaggaaagaaggttttaaagaagtcagtgatcattcaaaagactcagagagctatgaatatgacttgataggagtgactgttcacacaggaacggcagatggtggacactattatagctttatcagagatatagtaaatccccatgcttataaaaacaataaatggtatctttttaatgatgctgaggtaaaaccttttgattctgctcaacttgcatctgaatgttttggtggagagatgacgaccaagacctatgattctgttacagataaatttatggacttctcttttgaaaagacacacagtgcatatatgctgttttacaaacgcatggaaccagaggaagaaaatggcagagaatacaaatttgatgtttcgtcagagttactagagtggatttggcatgataacatgcagtttcttcaagacaaaaacatttttgaacatacatattttggatttatgtggcaattgtgtagttgtattcccagtacattaccagatcctaaagctgtgtccttaatgacagcaaagttaagcacttcctttgtcctagagacatttattcattctaaagaaaagcccacgatgcttcagtggattgaactgttgacgaaacagtttaataatagtcaggcagcttgtgagtggtttttagatcgtatggctgatgacgactggtggccaatgcagatactaattaagtgccctaatcaaattgtgagacagatgtttcagcgtttgtgtatccatgtgattcagaggctgagacctgtgcatgctcatctctatttgcagccaggaatggaagatgggtcagatgatatggatacctcagtagaagatattggtggtcgttcatgtgtcactcgctttgtgagaaccctgttattaattatggaacatggtgtaaaacctcacagtaaacatcttacagagtattttgccttcctttacgaatttgcaaaaatgggtgaagaagagagccaatttttgctttcattgcaagctatatctacaatggtacatttttacatgggaacaaaaggacctgaaaatcctcaagttgaagtgttatcagaggaagaaggggaagaagaagaggaggaagaagatatcctctctctggcagaagaaaaatacaggccagctgcccttgaaaagatgatagctttagttgctcttttggttgaacagtctcgatcagaaaggcatttgacattatcacagactgacatggcagcattaacaggaggaaagggatttcccttcttgtttcaacatattcgtgatggcatcaatataagacaaacttgtaatctgattttcagcctgtgtcgatacaataatcgacttgcagaacatattgtatctatgcttttcacatcaatagcaaagttgactcctgaggcagccaatcctttctttaagttgttgactatgctaatggagtttgctggtggacctccaggaatgcctccctttgcatcttatattctgcagaggatatgggaggtgattgaatacaatccttctcagtgtctagattggttggcagtgcagacaccccgaaataaactggcacacagctgggtcttacagaatatggaaaactgggtcgagcggtttcttttggctcacaattatcctagagtgaggacttctgcagcttatcttctggtgtcccttataccaagcaattcattccgtcagatgttccggtcaacaaggtctttgcacatcccaacccgtgaccttccactcagtccagacacaacagtagtcctacatcaggtctacaacgtgctccttggtttgctctcaagagccaaactttatgttgatgctgctgttcatggcactacaaagctagtgccctattttagctttatgacttactgtttaatttccaaaactgagaagctgatgttttccacatatttcatggatttgtggaaccttttccagcctaaactttctgagccagcaatagctacaaatcacaataaacaggctttgctttcattttggtacaatgtctgtgctgactgtccagagaatatccgccttattgttcagaacccagtggtaaccaagaacattgccttcaattacatccttgctgaccatgatgatcaggatgtggtgctttttaaccgtgggatgctgccagcgtactatggcattctgaggctctgctgtgagcagtctcctgcattcacacgacaactggcttctcaccagaacatccagtgggcctttaagaatcttacaccacatgccagccaataccctggagcagtagaagaactgtttaacctgatgcagctgtttatagctcagaggccagatatgagagaagaagaattagaagatattaaacagttcaagaaaacaaccataagttgttacttacgttgcttagatggccgctcctgctggactactttaataagtgccttcagaatactattagaatctgatgaagacagacttcttgttgtatttaatcgaggattgattctaatgacagagtctttcaacactttgcacatgatgtatcacgaagctacagcttgccatgtgactggagatttagtagaacttctgtcaatatttctttcggttttgaagtctacacgcccttatcttcagagaaaagatgtgaaacaagcattaatccagtggcaggagcgaattgaatttgcccataaactgttaactcttcttaattcctatagtcctccagaacttagaaatgcctgtatagatgtcctcaaggaacttgtacttttgagtccccatgattttcttcatactctggttccctttctacaacacaaccattgtacttaccatcacagtaatataccatttctctcggaccttatttcccttgtcgagaaaatatcaagctaataggagggaaaagcaatattcggcctccgcgccctgaactcaatatgtgcctcttgcccacaatggtggaaaccagtaagggcaaagatgacgtttatgatcgtatgctgctagactacttcttttcttatcatcagttcatccatctattatgccgagttgcaatcaactgtgaaaaatttactgaaacattagttaagctgagtgtcctagttgcctatgaaggtttgccacttcatcttgcactgttccccaaactttggactgagctatgccagactcaggtaaagaaaatgagttttagatgattggtctttaatcttatctgaccaagtggtcaataattttaggaacagtgggttgaagacttgctgaaaagtggggacattttagaatcttgataggtaacatatgaatgaatgaaaatactagctattacatattaggcatctagtttccctttgatttttttaacttaagtagatttctatcatagaggatattttaaataagctggttataattgaatttctcatttatagatgtatatcaacagttgtggggaaaatccaaaacagggagatagtgggggaaaaggcacttgccacttcttcctctccttcacctccctgtctctacctcttttccaccattccaaaacctctagcagaaaccctgtcagcagtctgtcctttagcttttcataatctgtagtttttcaggggtctgatgcacttgttttcttacagcgatctccttgaaaacaggaaagattactgttcctaccttaagtgtctaagagccaactccttaaaattaagtggctgcataaataatgcttgttaagttacaaaggcagaattgggaagaggaggaggtactaatgtttggctcattccttggatcaggcataaaggatccccactacctttcagtccctgaaaaaactgttgattgtactgcctggttgcatctgctctaccccattggaagagatgaatttattcaccttccttaggtgcaacccttgacccacatcatgctttcctgaagtattttgagtctggttcagcctcctaccaggctgtagtgtgctctggattctcctagatgtttgccatcctgtactctactggtggtttctctacttttccaaaacagaactcaagtgtagagaccttatcagagtcatc

SEQ ID NO: 376476 - DNA, 970 bp, Homo sapiens
  misc_feature (951)..(951): n is a, c, g, or t
aggagagtgaatgcaaagcatataatcctagacctgtctgtaaaacatacaccatggataagcagcctctgaatactgggggacagaaagatatgacagagttttttactgatctaattaccaaaatcgaagaaatgtctcccgaactgaaaaataccgtcaaaagtttatttggaggtgtaattacaaacaatgtcgtatccttggattgtgaacatgttagtcaaactgctgaagagttttatactgtgaggtgccaagtggctgatatgaagaacatttatgaatctcttgatgaagttactataaaagacactttggaaggtgataacatgtatacttgttctcattgtgggaagaaagtacgagctgaaaaaagggcatgttttaagaaattgcctcgcattttgagtttcaatactatgagatacacatttaatatggtcacgatgatgaaagagaaagtgaatacacacttttccttcccattacgtttggacatgacgccctatacagaagattttcttatgggaaagagtgagaggaaagaaggttttaaagaagtcagtgatcattcaaaagactcagagagctatgaatatgacttgataggagtgactgttcacacaggaacggcagatggtggacactattatagctttatcagagatatagtaaatccccatgcttataaaaacaataaatggtatctttttaatgatgctgaggtaaaaccttttgattctgctcaacttgcatctgaatgttttggtggagagatgacgaccaagacctatgattctgttacagataaatttatggacttctcttttgaaaagacacacagtgcatatatgctgttttacaaacgcatggaaccagaggatgagctggaacagtgaatgaagattattttttttccaagaagtttagttttcaaagatgaacctnagagagtctccgtcgaact

SEQ ID NO: 376477 - DNA, 627 bp, Homo sapiens
tctacagtctgtggagacaggtgagcgacgaacttctgagacagttgtgtccctgtggctttggtgcgcctgtgtgcactttctccctccacctggagcatgggctaacaccggaggaaaggaaaagacagagtcagacagggagcctggggaggggccatggtgccaatgcacttactggggagactggagaagccgcttctcctcctgtgctgcgcctccttcctactggggctggctttgctgggcataaagacggacatcacccccgttgcttatttctttctcacattgggtggcttcttcttgtttgcctatctcctggtccggtttctggaatgggggcttcggtcccagctccaatcaatgcagactgagagcccagggccctcaggcaatgcacgctatgaagccttttgaagtgccagtcttatttgacacgcagggccggttgggtgtgggacgttagaaattccctagttgcctgccctccaatgacggttatgaacccacacccatctcccctgacttacatgcaactggttgtgttgataccccccccaggccacccttgcgcgagggaaccacactaaggcaatcccaaatgggggtcccagtgactacgga

SEQ ID NO: 376478 - DNA, 2881 bp, Homo sapiens
tctacagtctgtggagacaggtgagcgacgaacttctgagacaggtgtgggtgcgagggtcgggagggtcatgggattgggaccgaggtgtgaggagggaatctgcaattccttgctacacagagcgctggcaacttctgacaggctgtttctggggtatgggctgcctcgggttgttgctgttacaaggaaagaaaagagttcccctgcccaccgcctcccagccactgggctacctcctggcaggaaatttgcaaactgagtttaacaagttaggatcagcagagggtagaggagggccctggcagatgtggggtctagaagaggacaggagttatcagggcctccggccattgtgctgggcctttgcctgtacaattgtttctcaagcagttgtgtccctgtggctttggtgcgcctgtgtgcactttctccctccacctggagcatgggctaacaccggaggaaaggaaaagacagagtcagacagggtaagtggggctccctcccctcttctctctaacggggctggattgagggcctctggctggggaggtgggggtggagatccagtaggagcaataacagaggaagggcagggcctgccccatcacctgaattccagagatgccagtgtgcactgaagccccaggcagggcgtgcccaggaccggatcctggatggtggtaagggacaaagctggaagggagactacagggaaggagaaaggaaagaaggcagagccatgacacagtcaacttacagaatggctgggagtcaaagctcctgggctggtttcctggctattccacacactccaagacatagagagaatttcggaactggaggggactctacagatgatttatttgagattgaagaacctagaaaccaaacaaagaaatatcatatggttactttggtatctgacacagccatgacaccaattgctagtgtagacacaatagctgtgtgtctttttgcaggagcctggggaggggccatggtgccaatgcacttactggggagactggagaagccgcttctcctcctgtgctgcgcctccttcctactggggctggctttgctgggcataaagacggacatcacccccgttgcttatttctttctcacattgggtggcttcttcttgtttgcctatctcctggtccggtttctggaatgggggcttcggtcccagctccaatcaatgcagactgagagcccagggccctcaggcaatgcacgggacaatgaagcctttgaagtgccagtctatgaagaggccgtggtgggactagaatcccagtgccgcccccaagagttggaccaaccacccccctacagcactgttgtgatacccccagcacctgaggaggaacaacctagccatccagaggggtccaggagagccaaactggaacagaggcgaatggcctcagaggggtccatggcccaggaaggaagccctggaagagctccaatcaaccttcggcttcggggaccacgggctgtgtccactgctcctgatctgcagagcttggcggcagtccccacattagagcctctgactccaccccctgcctatgatgtctgctttggtcaccctgatgatgatagtgttttttatgaggacaactgggcacccccttaaatgactctcccaagatttctcttctctccacaccagacctcgttcatttgactaacattttccagcgcctactatgtgtcagaaacaagtgtttctgcctggacatcataaatggggacttggaccctgaggagagtcaggccacggtaagcccttcccagctgagatatgggtggcataatttgagtcttctggcaacatttggtgacctaccccatatccaatatttccagcgttagattgaggatgaggtagggaggtgatccagagaaggcggagaaggaagaagtaacctctgagtggcggctattgcttctgttccaggtgctgttcgagctgttagaacccttaggcttgacagctttgtgagttattattgaaaaatgaggattccaagagtcagaggagtttgataatgtgcacgagggcacactgctagtaaataacattaaaataactggaatgaactcctgatcccaaagcctattgtgttttcaacacaaggtaataggaagccaagcaacttgcatgtctcccaatccctgtctagggacagctgctggtgcaggatggaagacttcctataaacagaatgggcgaccaattgtgtctacagagggggtgggctgagcatgggcacgcatgtccccagcctcctggacgagcaaagtcagtcaaagcgctggtgatccctgctccgcgtgcgtagcagtgtctgtgcctctcctgcccaggggctagagagcagtctccagtgcagggtccccatcctatctgaaaacagtggagtcagtgaccccaggtggagggacttccagttttaacaatgggttggtatgaaggccagaaggagtgaaacatgtgaactttctggcgaggagactccctcttgaatcatccatatgtagccccggggtcacttgcgaagagtctctaacagcttctgcctcactcctaagctctgaccgctaggctttcaccccagccgccggtcctgattcctgagatcccaatattgagcaccaggtttcctggaattgtgtgctgcggctgtgatgtaggtttcggtcgctggaagctgctaaaccatagctgacgccccctcctaagccagccttccttccccgcgcgggcatctgtccagggccttgtcgcgctctcagtctccttcgcagcctggccccaaccgttcaacttcaataaagcaaaactccagccaaaaaaaaa

SEQ ID NO: 376479 - DNA, 1775 bp, Homo sapiens
tctacagtctgtggagacaggtgagcgacgaacttctgagacagttgtgtccctgtggctttggtgcgcctgtgtgcactttctccctccacctggagcatgggctaacaccggaggaaaggaaaagacagagtcagacaggggacaatgaagcctttgaagtgccagtctatgaagaggccgtggtgggactagaatcccagtgccgcccccaagagttggaccaaccacccccctacagcactgttgtgatacccccagcacctgaggaggaacaacctagccatccagaggggtccaggagagccaaactggaacagaggcgaatggcctcagaggggtccatggcccaggaaggaagccctggaagagctccaatcaaccttcggcttcggggaccacgggctgtgtccactgctcctgatctgcagagcttggcggcagtccccacattagagcctctgactccaccccctgcctatgatgtctgctttggtcaccctgatgatgatagtgttttttatgaggacaactgggcacccccttaaatgactctcccaagatttctcttctctccacaccagacctcgttcatttgactaacattttccagcgcctactatgtgtcagaaacaagtgtttctgcctggacatcataaatggggacttggaccctgaggagagtcaggccacggtaagcccttcccagctgagatatgggtggcataatttgagtcttctggcaacatttggtgacctaccccatatccaatatttccagcgttagattgaggatgaggtagggaggtgatccagagaaggcggagaaggaagaagtaacctctgagtggcggctattgcttctgttccaggtgctgttcgagctgttagaacccttaggcttgacagctttgtgagttattattgaaaaatgaggattccaagagtcagaggagtttgataatgtgcacgagggcacactgctagtaaataacattaaaataactggaatgaactcctgatcccaaagcctattgtgttttcaacacaaggtaataggaagccaagcaacttgcatgtctcccaatccctgtctagggacagctgctggtgcaggatggaagacttcctataaacagaatgggcgaccaattgtgtctacagagggggtgggctgagcatgggcacgcatgtccccagcctcctggacgagcaaagtcagtcaaagcgctggtgatccctgctccgcgtgcgtagcagtgtctgtgcctctcctgcccaggggctagagagcagtctccagtgcagggtccccatcctatctgaaaacagtggagtcagtgaccccaggtggagggacttccagttttaacaatgggttggtatgaaggccagaaggagtgaaacatgtgaactttctggcgaggagactccctcttgaatcatccatatgtagccccggggtcacttgcgaagagtctctaacagcttctgcctcactcctaagctctgaccgctaggctttcaccccagccgccggtcctgattcctgagatcccaatattgagcaccaggtttcctggaattgtgtgctgcggctgtgatgtaggtttcggtcgctggaagctgctaaaccatagctgacgccccctcctaagccagccttccttccccgcgcgggcatctgtccagggccttgtcgcgctctcagtctccttcgcagcctggccccaaccgttcaacttcaataaagcaaaactccagccaaaaaaaaa

SEQ ID NO: 376480 - DNA, 1677 bp, Homo sapiens
tctacagtctgtggagacaggtgagcgacgaacttctgagacagggacaatgaagcctttgaagtgccagtctatgaagaggccgtggtgggactagaatcccagtgccgcccccaagagttggaccaaccacccccctacagcactgttgtgatacccccagcacctgaggaggaacaacctagccatccagaggggtccaggagagccaaactggaacagaggcgaatggcctcagaggggtccatggcccaggaaggaagccctggaagagctccaatcaaccttcggcttcggggaccacgggctgtgtccactgctcctgatctgcagagcttggcggcagtccccacattagagcctctgactccaccccctgcctatgatgtctgctttggtcaccctgatgatgatagtgttttttatgaggacaactgggcacccccttaaatgactctcccaagatttctcttctctccacaccagacctcgttcatttgactaacattttccagcgcctactatgtgtcagaaacaagtgtttctgcctggacatcataaatggggacttggaccctgaggagagtcaggccacggtaagcccttcccagctgagatatgggtggcataatttgagtcttctggcaacatttggtgacctaccccatatccaatatttccagcgttagattgaggatgaggtagggaggtgatccagagaaggcggagaaggaagaagtaacctctgagtggcggctattgcttctgttccaggtgctgttcgagctgttagaacccttaggcttgacagctttgtgagttattattgaaaaatgaggattccaagagtcagaggagtttgataatgtgcacgagggcacactgctagtaaataacattaaaataactggaatgaactcctgatcccaaagcctattgtgttttcaacacaaggtaataggaagccaagcaacttgcatgtctcccaatccctgtctagggacagctgctggtgcaggatggaagacttcctataaacagaatgggcgaccaattgtgtctacagagggggtgggctgagcatgggcacgcatgtccccagcctcctggacgagcaaagtcagtcaaagcgctggtgatccctgctccgcgtgcgtagcagtgtctgtgcctctcctgcccaggggctagagagcagtctccagtgcagggtccccatcctatctgaaaacagtggagtcagtgaccccaggtggagggacttccagttttaacaatgggttggtatgaaggccagaaggagtgaaacatgtgaactttctggcgaggagactccctcttgaatcatccatatgtagccccggggtcacttgcgaagagtctctaacagcttctgcctcactcctaagctctgaccgctaggctttcaccccagccgccggtcctgattcctgagatcccaatattgagcaccaggtttcctggaattgtgtgctgcggctgtgatgtaggtttcggtcgctggaagctgctaaaccatagctgacgccccctcctaagccagccttccttccccgcgcgggcatctgtccagggccttgtcgcgctctcagtctccttcgcagcctggccccaaccgttcaacttcaataaagcaaaactccagccaaaaaaaaa

SEQ ID NO: 376481 - DNA, 2261 bp, Homo sapiens
tctacagtctgtggagacaggtgagcgacgaacttctgagacaggtgtgggtgcgagggtcgggagggtcatgggattgggaccgaggtgtgaggagggaatctgcaattccttgctacacagagcgctggcaacttctgacaggctgtttctggggtatgggctgcctcgggttgttgctgttacaaggaaagaaaagagttcccctgcccaccgcctcccagccactgggctacctcctggcaggaaatttgcaaactgagtttaacaagttaggatcagcagagggtagaggagggccctggcagatgtggggtctagaagaggacaggagttatcagggcctccggccattgtgctgggcctttgcctgtacaattgtttctcaagcagttgtgtccctgtggctttggtgcgcctgtgtgcactttctccctccacctggagcatgggctaacaccggaggaaaggaaaagacagagtcagacagggagcctggggaggggccatggtgccaatgcacttactggggagactggagaagccgcttctcctcctgtgctgcgcctccttcctactggggctggctttgctgggcataaagacggacatcacccccgttgcttatttctttctcacattgggtggcttcttcttgtttgcctatctcctggtccggtttctggaatgggggcttcggtcccagctccaatcaatgcagactgagagcccagggccctcaggcaatgcacgggacaatgaagcctttgaagtgccagtctatgaagaggccgtggtgggactagaatcccagtgccgcccccaagagttggaccaaccacccccctacagcactgttgtgatacccccagcacctgaggaggaacaacctagccatccagaggggtccaggagagccaaactggaacagaggcgaatggcctcagaggggtccatggcccaggaaggaagccctggaagagctccaatcaaccttcggcttcggggaccacgggctgtgtccactgctcctgatctgcagagcttggcggcagtccccacattagagcctctgactccaccccctgcctatgatgtctgctttggtcaccctgatgatgatagtgttttttatgaggacaactgggcacccccttaaatgactctcccaagatttctcttctctccacaccagacctcgttcatttgactaacattttccagcgcctactatgtgtcagaaacaagtgtttctgcctggacatcataaatggggacttggaccctgaggagagtcaggccacggtaagcccttcccagctgagatatgggtggcataatttgagtttctgttccaggtgctgttcgagctgttagaacccttaggcttgacagctttgtgagttattattgaaaaatgaggattccaagagtcagaggagtttgataatgtgcacgagggcacactgctagtaaataacattaaaataactggaatgaactcctgatcccaaagcctattgtgttttcaacacaaggtaataggaagccaagcaacttgcatgtctcccaatccctgtctagggacagctgctggtgcaggatggaagacttcctataaacagaatgggcgaccaattgtgtctacagagggggtgggctgagcatgggcacgcatgtccccagcctcctggacgagcaaagtcagtcaaagcgctggtgatccctgctccgcgtgcgtagcagtgtctgtgcctctcctgcccaggggctagagagcagtctccagtgcagggtccccatcctatctgaaaacagtggagtcagtgaccccaggtggagggacttccagttttaacaatgggttggtatgaaggccagaaggagtgaaacatgtgaactttctggcgaggagactccctcttgaatcatccatatgtagccccggggtcacttgcgaagagtctctaacagcttctgcctcactcctaagctctgaccgctaggctttcaccccagccgccggtcctgattcctgagatcccaatattgagcaccaggtttcctggaattgtgtgctgcggctgtgatgtaggtttcggtcgctggaagctgctaaaccatagctgacgccccctcctaagccagccttccttccccgcgcgggcatctgtccagggccttgtcgcgctctcagtctccttcgcagcctggccccaaccgttcaacttcaataaagcaaaactccagccaaaaaaaaa

SEQ ID NO: 376482 - DNA, 1404 bp, Homo sapiens
tctacagtctgtggagacaggtgagcgacgaacttctgagacaggtgtgggtgcgagggtcgggagggtcatgggattgggaccgaggtgtgaggagggaatctgcaattccttgctacacagagcgctggcaacttctgacaggctgtttctggggtatgggctgcctcgggttgttgctgttacaaggaaagaaaagagttcccctgcccaccgcctcccagccactgggctacctcctggcaggaaatttgcaaactgagtttaacaagttaggatcagcagagggtagaggagggccctggcagatgtggggtctagaagaggacaggagttatcagggcctccggccattgtgctgggcctttgcctgtacaattgtttctcaagcagttgtgtccctgtggctttggtgcgcctgtgtgcactttctccctccacctggagcatgggctaacaccggaggaaaggaaaagacagagtcagacagggtaagtggggctccctcccctcttctctctaacggggctggattgagggcctctggctggggaggtgggggtggagatccagtaggagcaataacagaggaagggcagggcctgccccatcacctgaattccagagatgccagtgtgcactgaagccccaggcagggcgtgcccaggaccggatcctggatggtggtaagggacaaagctggaagggagactacagggaaggagaaaggaaagaaggcagagccatgacacagtcaacttacagaatggctgggagtcaaagctcctgggctggtttcctggctattccacacactccaagacatagagagaatttcggaactggaggggactctacagatgatttatttgagattgaagaacctagaaaccaaacaaagaaatatcatatggttactttggtatctgacacagccatgacaccaattgctagtgtagacacaatagctgtgtgtctttttgcaggagcctggggaggggccatggtgccaatgcacttactggggagactggagaagccgcttctcctcctgtgctgcgcctccttcctactggggctggctttgctgggcataaagacggacatcacccccgttgcttatttctttctcacattgggtggcttcttcttgtttgcctatctcctggtccggtttctggaatgggggcttcggtcccagctccaatcaatgcagactgagagcccagggccctcaggcaatgcacgtgagttaagggtgggcatcgtaagaggaatacaccttgggcccatcctccctctctccctgtagtctctgaggcagagagtctctggtttcctgtcattggcatcagcgggaggaggggtcagaggccaacagaggatcttttgcccacagcagac

SEQ ID NO: 376483 - DNA, 2386 bp, Homo sapiens
tctacagtctgtggagacaggtgagcgacgaacttctgagacaggtgtgggtgcgagggtcgggagggtcatgggattgggaccgaggtgtgaggagggaatctgcaattccttgctacacagagcgctggcaacttctgacaggctgtttctggggtatgggctgcctcgggttgttgctgttacaaggaaagaaaagagttcccctgcccaccgcctcccagccactgggctacctcctggcaggaaatttgcaaactgagtttaacaagttaggatcagcagagggtagaggagggccctggcagatgtggggtctagaagaggacaggagttatcagggcctccggccattgtgctgggcctttgcctgtacaattgtttctcaagcagttgtgtccctgtggctttggtgcgcctgtgtgcactttctccctccacctggagcatgggctaacaccggaggaaaggaaaagacagagtcagacagggagcctggggaggggccatggtgccaatgcacttactggggagactggagaagccgcttctcctcctgtgctgcgcctccttcctactggggctggctttgctgggcataaagacggacatcacccccgttgcttatttctttctcacattgggtggcttcttcttgtttgcctatctcctggtccggtttctggaatgggggcttcggtcccagctccaatcaatgcagactgagagcccagggccctcaggcaatgcacgggacaatgaagcctttgaagtgccagtctatgaagaggccgtggtgggactagaatcccagtgccgcccccaagagttggaccaaccacccccctacagcactgttgtgatacccccagcacctgaggaggaacaacctagccatccagaggggtccaggagagccaaactggaacagaggcgaatggcctcagaggggtccatggcccaggaaggaagccctggaagagctccaatcaaccttcggcttcggggaccacgggctgtgtccactgctcctgatctgcagagcttggcggcagtccccacattagagcctctgactccaccccctgcctatgatgtctgctttggtcaccctgatgatgatagtgttttttatgaggacaactgggcacccccttaaatgactctcccaagatttctcttctctccacaccagacctcgttcatttgactaacattttccagcgcctactatgtgtcagaaacaagtgtttctgcctggacatcataaatggggacttggaccctgaggagagtcaggccacggtaagcccttcccagctgagatatgggtggcataatttgagtcttctggcaacatttggtgacctaccccatatccaatatttccagcgttagattgaggatgaggtagggaggtgatccagagaaggcggagaaggaagaagtaacctctgagtggcggctattgcttctgttccaggtgctgttcgagctgttagaacccttaggcttgacagctttgtgagttattattgaaaaatgaggattccaagagtcagaggagtttgataatgtgcacgagggcacactgctagtaaataacattaaaataactggaatgaactcctgatcccaaagcctattgtgttttcaacacaaggtaataggaagccaagcaacttgcatgtctcccaatccctgtctagggacagctgctggtgcaggatggaagacttcctataaacagaatgggcgaccaattgtgtctacagagggggtgggctgagcatgggcacgcatgtccccagcctcctggacgagcaaagtcagtcaaagcgctggtgatccctgctccgcgtgcgtagcagtgtctgtgcctctcctgcccaggggctagagagcagtctccagtgcagggtccccatcctatctgaaaacagtggagtcagtgaccccaggtggagggacttccagttttaacaatgggttggtatgaaggccagaaggagtgaaacatgtgaactttctggcgaggagactccctcttgaatcatccatatgtagccccggggtcacttgcgaagagtctctaacagcttctgcctcactcctaagctctgaccgctaggctttcaccccagccgccggtcctgattcctgagatcccaatattgagcaccaggtttcctggaattgtgtgctgcggctgtgatgtaggtttcggtcgctggaagctgctaaaccatagctgacgccccctcctaagccagccttccttccccgcgcgggcatctgtccagggccttgtcgcgctctcagtctccttcgcagcctggccccaaccgttcaacttcaataaagcaaaactccagccaaaaaaaaa

SEQ ID NO: 376484 - DNA, 2124 bp, Homo sapiens
tctacagtctgtggagacaggtgagcgacgaacttctgagacaggtgtgggtgcgagggtcgggagggtcatgggattgggaccgaggtgtgaggagggaatctgcaattccttgctacacagagcgctggcaacttctgacaggctgtttctggggtatgggctgcctcgggttgttgctgttacaaggaaagaaaagagttcccctgcccaccgcctcccagccactgggctacctcctggcaggaaatttgcaaactgagtttaacaagttaggatcagcagagggtagaggagggccctggcagatgtggggtctagaagaggacaggagttatcagggcctccggccattgtgctgggcctttgcctgtacaattgtttctcaagcagttgtgtccctgtggctttggtgcgcctgtgtgcactttctccctccacctggagcatgggctaacaccggaggaaaggaaaagacagagtcagacaggggacaatgaagcctttgaagtgccagtctatgaagaggccgtggtgggactagaatcccagtgccgcccccaagagttggaccaaccacccccctacagcactgttgtgatacccccagcacctgaggaggaacaacctagccatccagaggggtccaggagagccaaactggaacagaggcgaatggcctcagaggggtccatggcccaggaaggaagccctggaagagctccaatcaaccttcggcttcggggaccacgggctgtgtccactgctcctgatctgcagagcttggcggcagtccccacattagagcctctgactccaccccctgcctatgatgtctgctttggtcaccctgatgatgatagtgttttttatgaggacaactgggcacccccttaaatgactctcccaagatttctcttctctccacaccagacctcgttcatttgactaacattttccagcgcctactatgtgtcagaaacaagtgtttctgcctggacatcataaatggggacttggaccctgaggagagtcaggccacggtaagcccttcccagctgagatatgggtggcataatttgagtcttctggcaacatttggtgacctaccccatatccaatatttccagcgttagattgaggatgaggtagggaggtgatccagagaaggcggagaaggaagaagtaacctctgagtggcggctattgcttctgttccaggtgctgttcgagctgttagaacccttaggcttgacagctttgtgagttattattgaaaaatgaggattccaagagtcagaggagtttgataatgtgcacgagggcacactgctagtaaataacattaaaataactggaatgaactcctgatcccaaagcctattgtgttttcaacacaaggtaataggaagccaagcaacttgcatgtctcccaatccctgtctagggacagctgctggtgcaggatggaagacttcctataaacagaatgggcgaccaattgtgtctacagagggggtgggctgagcatgggcacgcatgtccccagcctcctggacgagcaaagtcagtcaaagcgctggtgatccctgctccgcgtgcgtagcagtgtctgtgcctctcctgcccaggggctagagagcagtctccagtgcagggtccccatcctatctgaaaacagtggagtcagtgaccccaggtggagggacttccagttttaacaatgggttggtatgaaggccagaaggagtgaaacatgtgaactttctggcgaggagactccctcttgaatcatccatatgtagccccggggtcacttgcgaagagtctctaacagcttctgcctcactcctaagctctgaccgctaggctttcaccccagccgccggtcctgattcctgagatcccaatattgagcaccaggtttcctggaattgtgtgctgcggctgtgatgtaggtttcggtcgctggaagctgctaaaccatagctgacgccccctcctaagccagccttccttccccgcgcgggcatctgtccagggccttgtcgcgctctcagtctccttcgcagcctggccccaaccgttcaacttcaataaagcaaaactccagccaaaaaaaaa

SEQ ID NO: 376485 - DNA, 2304 bp, Homo sapiens
tctacagtctgtggagacaggtgagcgacgaacttctgagacaggtgtgggtgcgagggtcgggagggtcatgggattgggaccgaggtgtgaggagggaatctgcaattccttgctacacagagcgctggcaacttctgacaggctgtttctggggtatgggctgcctcgggttgttgctgttacaaggaaagaaaagagttcccctgcccaccgcctcccagccactgggctacctcctggcaggaaatttgcaaactgagtttaacaagttaggatcagcagagggtagaggagggccctggcagatgtggggtctagaagaggacaggagttatcagggcctccggccattgtgctgggcctttgcctgtacaattgtttctcaagcagttgtgtccctgtggctttggtgcgcctgtgtgcactttctccctccacctggagcatgggctaacaccggaggaaaggaaaagacagagtcagacagggagcctggggaggggccatggtgccaatgcacttactggggagactggagaagccgcttctcctcctgtgctgcgcctccttcctactggggctggctttgctgggcataaagacggacatcacccccgttgcttatttctttctcacattgggtggcttcttcttgtttgcctatctcctggtccggtttctggaatgggggcttcggtcccagctccaatcaatgcagactgagagcccagggccctcaggcaatgcacgggacaatgaagcctttgaagtgccagtctatgaagaggccgtggtgggactagaatcccagtgccgcccccaagagttggaccaaccacccccctacagcactgttgtgatacccccagcacctgaggaggaacaacctagccatccagaggggtccaggagagccaaactggaacagaggcgaatggcctcagaggggtccatggcccaggaaggaagccctggaagagctccaatcaaccttcggcttcggggaccacgggctgtgtccactgctcctgatctgcagagcttggcggcagtccccacattagagcctctgactccaccccctgcctatgatgtctgctttggtcaccctgatgatgatagtgttttttatgaggacaactgggcacccccttaaatgactctcccaagatttctcttctctccacaccagacctcgttcatttgactaacattttccagcgcctactatgtgtcagaaacaagtgtttctgcctggacatcataaatggggacttggaccctgaggagagtcaggccacggtaagcccttcccagctgagatatgggtggcataatttgagtcttctggcaacatttggtgacctaccccatatccaatatttccagcgttagattgaggatgaggtagggaggtgatccagagaaggcggagaaggaagaagtaacctctgagtggcggctattgcttctgttccaggtgctgttcgagctgttagaacccttaggcttgacagctttgtgagttattattgaaaaatgaggattccaagagtcagaggagtttgataatgtgcacgagggcacactgctagtaaataacattaaaataactggaatgaactcctgatcccaaagcctattgtgttttcaacacaaggtaataggaagccaagcaacttgcatgtctcccaatccctgtctagggacagctgctggtgcaggatggaagacttcctataaacagaatgggcgaccaattgtgtctacagagggggtgggctgagcatgggcacgcatgtccccagcctcctggacgagcaaagtcagtcaaagcgctggtgatccctgctccgcgtgcgtagcagtgtctgtgcctctcctgcccaggggctagagagcagtctccagtgcagggtccccatcctatctgaaaacagtggagtcagtgaccccaggtggagggacttccagttttaacaatgggttggtatgaaggccagaaggagtgaaacatgtgaactttctggcgaggagactccctcttgaatcatccatatgtagccccggggtcacttgcgaagagtctctaacagcttctgcctcactcctaagctctgaccgctaggctttcaccccagccgccggtcctgattcctgagatcccaatattgagcaccaggtttcctggaattgtgtgctgcggctgtgatgtaggtttcggtcgctggaagctgctaaaccatagctgacgccccaaccgttcaacttcaataaagcaaaactccagccaaaaaaaaa

SEQ ID NO: 376486 - DNA, 309 bp, Homo sapiens
ctctcatcttccataattttttggtgttaagattaaaacagattgcacagccaatataagggcacataagctgcccagagtacagtttggcccttaaagagaaattttcattcattgtctttatcagcactcctcaatcaggtaaatgaagataaacttgcccctaaattcctaaggctctcagcccaatttccagtattgtacttagcagacagggtgtggaattttcaaacggtaagtggcaaggaacatcaattaatccagtggagaagccctcatctctctggcaccaaagacagtgacattagg

SEQ ID NO: 376487 - DNA, 788 bp, Homo sapiens
tcaggtagtatgtggtctgattctaactcaacaacttgcagaaactcacttcttttttctttttttttccccaggaggagctatcgtattaactgacgaaactcacttcatttctttggacctgcaaaatgaggatgggctctaaaccacctctaaagttaatattctatgattccatgataaggctatttgtcatttataaaaaaaggaacttccacatagcccagagaaaggaaatgactttttcaagtttacagagtcaattaatggacgaaatataatttgaaattcaatctcctgatccccagtctattgggagttctttcagaatgtcccttgactgtccctcaaagtgccagcatgtatgaaaccttgttaaggatgtatgctcaatgaaaatacacaaattgacttaacaagaaactaaactctccagaaagatgcagttgacccaaaactctgaatatcttttatgtttaaaactttcttttttgaacaaaattgtacagttacttctctatttcaactcttaagccttttatgccacgtcaaaggttagctctcttttctctctgttaataaagtcttattcttgactttggaactgtatgccaagctaaggggtcctttattgtttatttattttttgattctctacttttgattcacacatcttttctacaagaaagacaatttatagcaggggcatattactttctttgggcctctgtgtccttatctatagccaaaaggtatggaaataaatgttttctaaaggtctttctggc

SEQ ID NO: 376488 - DNA, 427 bp, Homo sapiens
ggggggaacctagggcctcctatcgcatgatcccccatggcctccctcagcctctcttggtttgggcaggcatggcctcctcttctctccagtccccacccagactgctctcctcctctgtcccctgcgatcttcagccaacccgcatgctgaaaggggtgccgacctgggccctggggggaggcatggagggaggggtccccagtggcttggcctgaagaaggttgacgtctgccgtggcccagagctgagtcaccgaccctgcgtctgtcctgtgcagctgccaaggctgtcagctttcctcagcaacatgaagtctcggtaagggttcttctgtgtctagctgccggcccctgcctgtcctgatccgagtctgggtctgggtagtttctgacaggaaaggacttgagggaagtagcctctgagg

SEQ ID NO: 376489 - DNA, 2683 bp, Homo sapiens
tgatccagtccgggttttgcggcggagcgggcgggctgcgcgtgcggcggcttcaactgtcgcggtaggcagcagcaggctgaagggatcatggtgcagtacgagctgtgggccgcgctgcctggcgcctccggggtcgccctggcctgctgcttcgtggcggcggccgtggccctgcgctggtccgggcgccggacggcgcggggcgcggtggtccgggcgcgacagaggcagcgagcgggcctggagaacatggacagggcggcgcagcgcttccggctccagaacccagacctggactcagaggcgctgctagccctgcccctgcctcagctggtgcagaagttacacagtagagagctggcccctgaggccgtgctcttcacctatgtgggaaaggcctgggaagtgaacaaagggaccaactgtgtgacctcctatctggctgactgtgagactcagctgtctcaggccccaaggcagggcctgctctatggcgtccctgtgagcctcaaggagtgcttcacctacaagggccaggactccacgctgggcttgagcctgaatgaaggggtgccggcggagtgcgacagcgtagtggtgcatgtgctgaagctgcagggtgccgtgcccttcgtgcacaccaatgttccacagtccatgttcagctatgactgcagtaaccccctctttggccagaccgtgaacccatggaagtcctccaaaagcccagggggctcctcagggggtgaaggggccctcatcgggtctggaggctcccccctgggcttaggcactgatatcggaggcagcatccgcttcccctcctccttctgcggcatctgcggcctcaagcccacagggaaccgcctcagcaagagtggcctgaagggctgtgtctatggacaggaggcagtgcgtctctccgtgggccccatggcccgggacgtggagagcctggcactgtgcctgcgagccctgctgtgcgaggacatgttccgcttggaccccactgtgcctcccttgcccttcagagaagaggtctacaccagctctcagcccctgcgtgtggggtactatgagactgacaactataccatgccctccccggccatgaggcgggccgtgctggagaccaaacagagccttgaggctgcggggcacacgctggttcccttcttgccaagcaacataccccatgctctggagaccctgtcaacaggtgggctcttcagtgatggtggccacaccttcctacagaacttcaaaggtgatttcgtggacccctgcctgggggacctggtctcaattctgaagcttccccaatggcttaaaggactgctggccttcctggtgaagcctctgctgccaaggctgtcagctttcctcagcaacatgaagtctcgttcggctggaaaactctgggaactgcagcacgagatcgaggtgtaccgcaaaaccgtgattgcccagtggagggcgctggacctggatgtggtgctgacccccatgctggcccctgctctggacttgaatgccccaggcagggccacaggggccgtcagctacactatgctgtacaactgcctggacttccctgcaggggtggtgcctgtcaccacggtgactgctgaggacgaggcccagatggaacattacaggggctactttggggatatctgggacaagatgctgcagaagggcatgaagaagagtgtggggctgccggtggccgtgcagtgtgtggctctgccctggcaagaagagttgtgtctgcggttcatgcgggaggtggagcgactgatgacccctgaaaagcagtcatcctgatggctctggctccagaggacctgagactcacactctctgcagcccagcctagtcagggcacagctgccctgctgccacagcaaggaaatgtcctgcatggggcagaggcttccgtgtcctctcccccaaccccctgcaagaagcgccgactccctgagtctggacctccatccctgctctggtcccctctcttcgtcctgatccctccacccccatgtggcagcccatgggtatgacataggccaaggcccaactaacagtcaagaaacaaaaaaaaaaaaaaaaaaaaaaaaaaaaaaaaaaaaaaaaaaaaaaaaaaaaaaaaaaaaaaaaaaaaaaaaaaaaaaagagaggggcgcgcgcgcgcgtcctcatcagtatcgtctctctccctgcgtggggcggaccctactagtcccctcctcgccgccccgcgctcttttctgtttctatcagcgggcgctccgccctctctgctagtgggcgtcgttctttatttacgcgcgcgcgggacgacacgcgcggcgacgcgcgtcattcgtctttctcccacccgctcgcgatcgcggcgcgctgagtggaacaacagacagacgggaggctcacggaggggcgctcactcctcctcgctgctggtagtacaaccgcggccgccggcgcgccggccgccatcctatgcagtatcctgctgctccagtgggagagcggggcggcggtggaggaggaccagaaaatagtgctgcggtggcgggcgcagaagatcttctcttatctcccgtgcggggaggggtatagttttctctacgaggggcgcgcgctcttgcgcagggggggcgcggggatagtgggtcta

SEQ ID NO: 376490 - DNA, 2603 bp, Homo sapiens
ggaggagaacaacatctttaagcggtcaaggaagaaggagcgacagatattgcctgtgctgcaagtgcagcttcttgcggctggactccttgccaccaaaccaggaggccatgttgtctattctacctgctcactctcacacttacagaacgagtatgtggtgcaaggtgccattgagctcctggccaatcaatacagcatccagaacccagacctggactcagaggcgctgctagccctgcccctgcctcagctggtgcagaagttacacagtagagagctggcccctgaggccgtgctcttcacctatgtgggaaaggcctgggaagtgaacaaagggaccaactgtgtgacctcctatctggctgactgtgagactcagctgtctcaggccccaaggcagggcctgctctatggcgtccctgtgagcctcaaggagtgcttcacctacaagggccaggactccacgctgggcttgagcctgaatgaaggggtgccggcggagtgcgacagcgtagtggtgcatgtgctgaagctgcagggtgccgtgcccttcgtgcacaccaatgttccacagtccatgttcagctatgactgcagtaaccccctctttggccagaccgtgaacccatggaagtcctccaaaagcccagggggctcctcagggggtgaaggggccctcatcgggtctggaggctcccccctgggcttaggcactgatatcggaggcagcatccgcttcccctcctccttctgcggcatctgcggcctcaagcccacagggaaccgcctcagcaagagtggcctgaagggctgtgtctatggacaggaggcagtgcgtctctccgtgggccccatggcccgggacgtggagagcctggcactgtgcctgcgagccctgctgtgcgaggacatgttccgcttggaccccactgtgcctcccttgcccttcagagaagaggtctacaccagctctcagcccctgcgtgtggggtactatgagactgacaactataccatgccctccccggccatgaggcgggccgtgctggagaccaaacagagccttgaggctgcggggcacacgctggttcccttcttgccaagcaacataccccatgctctggagaccctgtcaacaggtgggctcttcagtgatggtggccacaccttcctacagaacttcaaaggtgatttcgtggacccctgcctgggggacctggtctcaattctgaagcttccccaatggcttaaaggactgctggccttcctggtgaagcctctgctgccaaggctgtcagctttcctcagcaacatgaagtctcgttcggctggaaaactctgggaactgcagcacgagatcgaggtgtaccgcaaaaccgtgattgcccagtggagggcgctggacctggatgtggtgctgacccccatgctggcccctgctctggacttgaatgccccaggcagggccacaggggccgtcagctacactatgctgtacaactgcctggacttccctgcaggggtggtgcctgtcaccacggtgactgctgaggacgaggcccagatggaacattacaggggctactttggggatatctgggacaagatgctgcagaagggcatgaagaagagtgtggggctgccggtggccgtgcagtgtgtggctctgccctggcaagaagagttgtgtctgcggttcatgcgggaggtggagcgactgatgacccctgaaaagcagtcatcctgatggctctggctccagaggacctgagactcacactctctgcagcccagcctagtcagggcacagctgccctgctgccacagcaaggaaatgtcctgcatggggcagaggcttccgtgtcctctcccccaaccccctgcaagaagcgccgactccctgagtctggacctccatccctgctctggtcccctctcttcgtcctgatccctccacccccatgtggcagcccatgggtatgacataggccaaggcccaactaacagtcaagaaacaaaaaaaaaaaaaaaaaaaaaaaaaaaaaaaaaaaaaaaaaaaaaaaaaaaaaaaaaaaaaaaaaaaaaaaaaaaaaaagagaggggcgcgcgcgcgcgtcctcatcagtatcgtctctctccctgcgtggggcggaccctactagtcccctcctcgccgccccgcgctcttttctgtttctatcagcgggcgctccgccctctctgctagtgggcgtcgttctttatttacgcgcgcgcgggacgacacgcgcggcgacgcgcgtcattcgtctttctcccacccgctcgcgatcgcggcgcgctgagtggaacaacagacagacgggaggctcacggaggggcgctcactcctcctcgctgctggtagtacaaccgcggccgccggcgcgccggccgccatcctatgcagtatcctgctgctccagtgggagagcggggcggcggtggaggaggaccagaaaatagtgctgcggtggcgggcgcagaagatcttctcttatctcccgtgcggggaggggtatagttttctctacgaggggcgcgcgctcttgcgcagggggggcgcggggatagtgggtcta

SEQ ID NO: 376491 - DNA, 2652 bp, Homo sapiens
tgatccagtccgggttttgcggcggagcgggcgggctgcgcgtgcggcggcttcaactgtcgcggtaggcagcagcaggctgaagggatcatggtgcagtacgagctgtgggccgcgctgcctggcgcctccggggtcgccctggcctgctgcttcgtggcggcggccgtggccctgcgctggtccgggcgccggacggcgcggggcgcggtggtccgggcgcgacagaggcagcgagcgggcctggagaacatggacagggcggcgcagcgcttccggctccagaacccagacctggactcagaggcgctgctagccctgcccctgcctcagctggtgcagaagttacacagtagagagctggcccctgaggccgtgctcttcacctatgtgggaaaggcctgggaagtgaacaaagggaccaactgtgtgacctcctatctggctgactgtgagactcagctgtctcaggccccaaggcagggcctgctctatggcgtccctgtgagcctcaaggagtgcttcacctacaagggccaggactccacgctgggcttgagcctgaatgaaggggtgccggcggagtgcgacagcgtagtggtgcatgtgctgaagctgcagggtgccgtgcccttcgtgcacaccaatgttccacagtccatgttcagaccgtgaacccatggaagtcctccaaaagcccagggggctcctcagggggtgaaggggccctcatcgggtctggaggctcccccctgggcttaggcactgatatcggaggcagcatccgcttcccctcctccttctgcggcatctgcggcctcaagcccacagggaaccgcctcagcaagagtggcctgaagggctgtgtctatggacaggaggcagtgcgtctctccgtgggccccatggcccgggacgtggagagcctggcactgtgcctgcgagccctgctgtgcgaggacatgttccgcttggaccccactgtgcctcccttgcccttcagagaagaggtctacaccagctctcagcccctgcgtgtggggtactatgagactgacaactataccatgccctccccggccatgaggcgggccgtgctggagaccaaacagagccttgaggctgcggggcacacgctggttcccttcttgccaagcaacataccccatgctctggagaccctgtcaacaggtgggctcttcagtgatggtggccacaccttcctacagaacttcaaaggtgatttcgtggacccctgcctgggggacctggtctcaattctgaagcttccccaatggcttaaaggactgctggccttcctggtgaagcctctgctgccaaggctgtcagctttcctcagcaacatgaagtctcgttcggctggaaaactctgggaactgcagcacgagatcgaggtgtaccgcaaaaccgtgattgcccagtggagggcgctggacctggatgtggtgctgacccccatgctggcccctgctctggacttgaatgccccaggcagggccacaggggccgtcagctacactatgctgtacaactgcctggacttccctgcaggggtggtgcctgtcaccacggtgactgctgaggacgaggcccagatggaacattacaggggctactttggggatatctgggacaagatgctgcagaagggcatgaagaagagtgtggggctgccggtggccgtgcagtgtgtggctctgccctggcaagaagagttgtgtctgcggttcatgcgggaggtggagcgactgatgacccctgaaaagcagtcatcctgatggctctggctccagaggacctgagactcacactctctgcagcccagcctagtcagggcacagctgccctgctgccacagcaaggaaatgtcctgcatggggcagaggcttccgtgtcctctcccccaaccccctgcaagaagcgccgactccctgagtctggacctccatccctgctctggtcccctctcttcgtcctgatccctccacccccatgtggcagcccatgggtatgacataggccaaggcccaactaacagtcaagaaacaaaaaaaaaaaaaaaaaaaaaaaaaaaaaaaaaaaaaaaaaaaaaaaaaaaaaaaaaaaaaaaaaaaaaaaaaaaaaaagagaggggcgcgcgcgcgcgtcctcatcagtatcgtctctctccctgcgtggggcggaccctactagtcccctcctcgccgccccgcgctcttttctgtttctatcagcgggcgctccgccctctctgctagtgggcgtcgttctttatttacgcgcgcgcgggacgacacgcgcggcgacgcgcgtcattcgtctttctcccacccgctcgcgatcgcggcgcgctgagtggaacaacagacagacgggaggctcacggaggggcgctcactcctcctcgctgctggtagtacaaccgcggccgccggcgcgccggccgccatcctatgcagtatcctgctgctccagtgggagagcggggcggcggtggaggaggaccagaaaatagtgctgcggtggcgggcgcagaagatcttctcttatctcccgtgcggggaggggtatagttttctctacgaggggcgcgcgctcttgcgcagggggggcgcggggatagtgggtcta

SEQ ID NO: 376492 - DNA, 2635 bp, Homo sapiens
tgatccagtccgggttttgcggcggagcgggcgggctgcgcgtgcggcggcttcaactgtcgcggtaggcagcagcaggctgaagggatcatggtgcagtacgagctgtgggccgcgctgcctggcgcctccggggtcgccctggcctgctgcttcgtggcggcggccgtggccctgcgctggtccgggcgccggacggcgcggggcgcggtggtccgggcgcgacagaggcagcgagcgggcctggagaacatggacagggcggcgcagcgcttccggctccagaacccagacctggactcagaggcgctgctagccctgcccctgcctcagctggtgcagaagttacacagtagagagctggcccctgaggccgtgctcttcacctatgtgggaaaggcctgggaagtgaacaaagggaccaactgtgtgacctcctatctggctgactgtgagactcagctgtctcaggccccaaggcagggcctgctctatggcgtccctgtgagcctcaaggagtgcttcacctacaagggccaggactccacgctgggcttgagcctgaatgaaggggtgccggcggagtgcgacagcgtagtggtgcatgtgctgaagctgcagggtgccgtgcccttcgtgcacaccaatgttccacagtccatgttcagctatgactgcagtaaccccctctttggccagaccgtgaacccatggaagtcctccaaaagcccagggggctcctcagggggtgaaggggccctcatcgggtctggaggctcccccctgggcttaggcactgatatcggaggcagcatccgcttcccctcctccttctgcggcatctgcggcctcaagcccacagggaaccgcctcagcaagagtggcctgaagggctgtgtctatggacaggaggcagtgcgtctctccgtgggccccatggcccgggacgtggagagcctggcactgtgcctgcgagccctgctgtgcgaggacatgttccgcttggaccccactgtgcctcccttgcccttcagagaagaggtctacaccagctctcagcccctgcgtgtggggtactatgagactgacaactataccatgccctccccggccatgaggcgggccgtgctggagaccaaacagagccttgaggctgcggggcacacgctggttcccttcttgccaagcaacataccccatgctctggagaccctgtcaacaggtgggctcttcagtgatggtggccacaccttcctacagaacttcaaaggtgatttcgtggacccctgcctgggggacctggtctcaattctgaagcttccccaatggcttaaaggactgctggccttcctggtgaagcctctgctgccaaggctgtcagctttcctcagcaacatgaagtctcgttcggctggaaaactctgggaactgcagcacgagatcgaggtgtaccgcaaaaccgtgattgcccagtggagggcgctggacctggatgtggtgctgacccccatgctggcccctgctctggacttgaatgccccaggcagggccacaggggtggtgcctgtcaccacggtgactgctgaggacgaggcccagatggaacattacaggggctactttggggatatctgggacaagatgctgcagaagggcatgaagaagagtgtggggctgccggtggccgtgcagtgtgtggctctgccctggcaagaagagttgtgtctgcggttcatgcgggaggtggagcgactgatgacccctgaaaagcagtcatcctgatggctctggctccagaggacctgagactcacactctctgcagcccagcctagtcagggcacagctgccctgctgccacagcaaggaaatgtcctgcatggggcagaggcttccgtgtcctctcccccaaccccctgcaagaagcgccgactccctgagtctggacctccatccctgctctggtcccctctcttcgtcctgatccctccacccccatgtggcagcccatgggtatgacataggccaaggcccaactaacagtcaagaaacaaaaaaaaaaaaaaaaaaaaaaaaaaaaaaaaaaaaaaaaaaaaaaaaaaaaaaaaaaaaaaaaaaaaaaaaaaaaaaagagaggggcgcgcgcgcgcgtcctcatcagtatcgtctctctccctgcgtggggcggaccctactagtcccctcctcgccgccccgcgctcttttctgtttctatcagcgggcgctccgccctctctgctagtgggcgtcgttctttatttacgcgcgcgcgggacgacacgcgcggcgacgcgcgtcattcgtctttctcccacccgctcgcgatcgcggcgcgctgagtggaacaacagacagacgggaggctcacggaggggcgctcactcctcctcgctgctggtagtacaaccgcggccgccggcgcgccggccgccatcctatgcagtatcctgctgctccagtgggagagcggggcggcggtggaggaggaccagaaaatagtgctgcggtggcgggcgcagaagatcttctcttatctcccgtgcggggaggggtatagttttctctacgaggggcgcgcgctcttgcgcagggggggcgcggggatagtgggtcta

SEQ ID NO: 376493 - DNA, 1598 bp, Homo sapiens
ggggggaacctagggcctcctatcgcatgatcccccatggcctccctcagcctctcttggtttgggcaggcatggcctcctcttctctccagtccccacccagactgctctcctcctctgtcccctgcgatcttcagccaacccgcatgctgaaaggggtgccgacctgggccctggggggaggcatggagggaggggtccccagtggcttggcctgaagaaggttgacgtctgccgtggcccagagctgagtcaccgaccctgcgtctgtcctgtgcagctgccaaggctgtcagctttcctcagcaacatgaagtctcgttcggctggaaaactctgggaactgcagcacgagatcgaggtgtaccgcaaaaccgtgattgcccagtggagggcgctggacctggatgtggtgctgacccccatgctggcccctgctctggacttgaatgccccaggcagggccacaggggccgtcagctacactatgctgtacaactgcctggacttccctgcaggggtggtgcctgtcaccacggtgactgctgaggacgaggcccagatggaacattacaggggctactttggggatatctgggacaagatgctgcagaagggcatgaagaagagtgtggggctgccggtggccgtgcagtgtgtggctctgccctggcaagaagagttgtgtctgcggttcatgcgggaggtggagcgactgatgacccctgaaaagcagtcatcctgatggctctggctccagaggacctgagactcacactctctgcagcccagcctagtcagggcacagctgccctgctgccacagcaaggaaatgtcctgcatggggcagaggcttccgtgtcctctcccccaaccccctgcaagaagcgccgactccctgagtctggacctccatccctgctctggtcccctctcttcgtcctgatccctccacccccatgtggcagcccatgggtatgacataggccaaggcccaactaacagtcaagaaacaaaaaaaaaaaaaaaaaaaaaaaaaaaaaaaaaaaaaaaaaaaaaaaaaaaaaaaaaaaaaaaaaaaaaaaaaaaaaaagagaggggcgcgcgcgcgcgtcctcatcagtatcgtctctctccctgcgtggggcggaccctactagtcccctcctcgccgccccgcgctcttttctgtttctatcagcgggcgctccgccctctctgctagtgggcgtcgttctttatttacgcgcgcgcgggacgacacgcgcggcgacgcgcgtcattcgtctttctcccacccgctcgcgatcgcggcgcgctgagtggaacaacagacagacgggaggctcacggaggggcgctcactcctcctcgctgctggtagtacaaccgcggccgccggcgcgccggccgccatcctatgcagtatcctgctgctccagtgggagagcggggcggcggtggaggaggaccagaaaatagtgctgcggtggcgggcgcagaagatcttctcttatctcccgtgcggggaggggtatagttttctctacgaggggcgcgcgctcttgcgcagggggggcgcggggatagtgggtcta

SEQ ID NO: 376494 - DNA, 2304 bp, Homo sapiens
tgatccagtccgggttttgcggcggagcgggcgggctgcgcgtgcggcggcttcaactgtcgcggtaggcagcagcaggctgaagggatcatggtgcagtacgagctgtgggccgcgctgcctggcgcctccggggtcgccctggcctgctgcttcgtggcggcggccgtggccctgcgctggtccgggcgccggacggcgcggggcgcggtggtccgggcgcgacagaggcagcgagcgggcctggagaacatggacagggcggcgcagcgcttccggctccagaacccagacctggactcagaggcgctgctagccctgcccctgcctcagctggtgcagaagttacacagtagagagctggcccctgaggccgtgctcttcacctatgtgggaaaggcctgggaagtgaacaaagggaccaactgtgtgacctcctatctggctgactgtgagactcagctgtctcaggccccaaggcagggcctgctctatggcgtccctgtgagcctcaaggagtgcttcacctacaagggccaggactccacgctgggcttgagcctgaatgaaggggtgccggcggagtgcgacagcgtagtggtgcatgtgctgaagctgcagggtgccgtgcccttcgtgcacaccaatgttccacagtccatgttcagctatgactgcagtaaccccctctttggccagaccgtgaacccatggaagtcctccaaaagcccagggggctcctcagggggtgaaggggccctcatcgggtctggaggctcccccctgggcttaggcactgatatcggaggcagcatccgcttcccctcctccttctgcggcatctgcggcctcaagcccacagggaaccgcctcagcaagagtggcctgaagggctgtgtctatggacaggaggcagtgcgtctctccgtgggccccatggcccgggacgtggagagcctggcactgtgcctgcgagccctgctgtgcgaggacatgttccgcttggaccccactgtgcctcccttgcccttcagagaagaggtctacaccagctctcagcccctgcgtgtggggtactatgagactgacaactataccatgccctccccggccatgaggcgggccgtgctggagaccaaacagagccttgaggctgcggggcacacgctggttcccttcttgccaagcaacataccccatgctctggagaccctgtcaacaggtgggctcttcagtgatggtggccacaccttcctacagaacttcaaaggtgatttcgtggacccctgcctgggggacctggtctcaattctgaagcttccccaatggcttaaaggactgctggccttcctggtgaagcctctgctgccaaggctgtcagctttcctcagcaacatgaagtctcgttcggctggaaaactctgggaactgcagcacgagatcgaggtgtaccgcaaaaccgtgattgcccagtggagggcgctggacctggatgtggtgctgacccccatgctggcccctgctctggacttgaatgccccaggcagggccacaggggccgtcagctacactatgctgtacaactgcctggacttccctgcaggggtggtgcctgtcaccacggtgactgctgaggacgaggcccagatggaacattacaggggctactttggggatatctgggacaagatgctgcagaagggcatgaagaagagtgtggggctgccggtggccgtgcagtgtgtggctctgccctggcaagaagagttgtgtctgcggttcatgcgggaggtggagcgactgatgacccctgaaaagcagtcatcctgatggctctggctccagaggacctgagactcacactctctgcagcccagcctagtcagggcacagctgccctgctgccacagcaaggaaatgtcctgcatggggcagaggcttccgtgtcctctcccccaaccccctgcaagaagcgccgactccctgagtctggacctccatccctgctctggtcccctctcttcgtcctgatcccagcagtcaccgtggtgacaggcaccaccccgtcgggtggagcgctccacccgacggggtgcacttcaccgctgaccttgcctcacctttaaccccccacctgagccccagctcctacctctgaccccaacttctctttgatctctgaatcccctctgactccaacttctctttcaccctctatgagtcccattttacttctacacctgcaagtcctggtttatattggacccctccctccgagctgcagttcacctttgactagcctca

SEQ ID NO: 376495 - DNA, 2008 bp, Homo sapiens
tgatccagtccgggttttgcggcggagcgggcgggctgcgcgtgcggcggcttcaactgtcgcggtaggcagcagcaggctgaagggatcatggtgcagtacgagctgtgggccgcgctgcctggcgcctccggggtcgccctggcctgctgcttcgtggcggcggccgtggccctgcgctggtccgggcgccggacggcgcggggcgcggtggtccgggcgcgacagaggcagcgagcgggcctggagaacatggacagggcggcgcagcgcttccggctccagaacccagacctggactcagaggcgctgctagccctgcccctgcctcagctggtgcagaagttacacagtagagagctggcccctgaggccgtgctcttcacctatgtgggaaaggcctgggaagtgaacaaagggaccaactgtgtgacctcctatctggctgactgtgagactcagctgtctcaggccccaaggcagggcctgctctatggcgtccctgtgagcctcaaggagtgcttcacctacaagggccaggactccacgctgggcttgagcctgaatgaaggggtgccggcggagtgcgacagcgtagtggtgcatgtgctgaagctgcagggtgccgtgcccttcgtgcacaccaatgttccacagtccatgttcagctatgactgcagtaaccccctctttggccagaccgtgaacccatggaagtcctccaaaagcccagggggctcctcagggggtgaaggggccctcatcgggtctggaggctcccccctgggcttaggcactgatatcggaggcagcatccgcttcccctcctccttctgcggcatctgcggcctcaagcccacagggaaccgcctcagcaagagtggcctgaagggctgtgtctatggacaggaggcagtgcgtctctccgtgggccccatggcccgggacgtggagagcctggcactgtgcctgcgagccctgctgtgcgaggacatgttccgcttggaccccactgtgcctcccttgcccttcagagaagaggtctacaccagctctcagcccctgcgtgtggggtactatgagactgacaactataccatgccctccccggccatgaggcgggccgtgctggagaccaaacagagccttgaggctgcggggcacacgctggttcccttcttgccaagcaacataccccatgctctggagaccctgtcaacaggtgggctcttcagtgatggtggccacaccttcctacagaacttcaaaggtgatttcgtggacccctgcctgggggacctggtctcaattctgaagcttccccaatggcttaaaggactgctggccttcctggtgaagcctctgctgccaaggctgtcagctttcctcagcaacatgaagtctcgttcggctggaaaactctgggaactgcagcacgagatcgaggtgtaccgcaaaaccgtgattgcccagtggagggcgctggacctggatgtggtgctgacccccatgctggcccctgctctggacttgaatgccccaggcagggccacaggggccgtcagctacactatgctgtacaactgcctggacttccctgcaggggtggtgcctgtcaccacggtgactgctgaggacgaggcccagatggaacattacaggggctactttggggatatctgggacaagatgctgcagaagggcatgaagaagagtgtggggctgccggtggccgtgcagtgtgtggctctgccctggcaagaagagttgtgtctgcggttcatgcgggaggtggagcgactgatgacccctgaaaagcagtcatcctgatggctctggctccagaggacctgagactcacactctctgcagccccacactcttcttcatgcccttctgcagcatcttgtcccagatatccccaaagtagcccctgtaatgttccatctgggcctcgtcctcagcagtcaccgtggtgaacaggcaccacctctgcaaggaacccacg

SEQ ID NO: 376496 - DNA, 1524 bp, Homo sapiens
tgatccagtccgggttttgcggcggagcgggcgggctgcgcgtgcggcggcttcaactgtcgcggtaggcagcagcaggctgaagggatcatggtgcagtacgagctgtgggccgcgctgcctggcgcctccggggtcgccctggcctgctgcttcgtggcggcggccgtggccctgcgctggtccgggcgccggacggcgcggggcgcggtggtccgggcgcgacagaggcagcgagcgggcctggagaacatggacagggcggcgcagcgcttccggctccagaacccagacctggactcagaggcgctgctagccctgcccctgcctcagctggtgcagaagttacacagtagagagctggcccctgaggccgtgctcttcacctatgtgggaaaggcctgggaagtgaacaaagggaccaactgtgtgacctcctatctggctgactgtgagactcagctgtctcaggccccaaggcagggcctgctctatggcgtccctgtgagcctcaaggagtgcttcacctacaagggccaggactccacgctgggcttgagcctgaatgaaggggtgccggcggagtgcgacagcgtagtggtgcatgtgctgaagctgcagggtgccgtgcccttcgtgcacaccaatgttccacagtccatgttcagctatgactgcagtaaccccctctttggccagaccgtgaacccatggaagtcctccaaaagcccagggggctcctcagggggtgaaggggccctcatcgggtctggaggctcccccctgggcttaggcactgatatcggaggcagcatccgcttcccctcctccttctgcggcatctgcggcctcaagcccacagggaaccgcctcagctccacccccatgtggcagcccatgggtatgacataggccaaggcccaactaacagtcaagaaacaaaaaaaaaaaaaaaaaaaaaaaaaaaaaaaaaaaaaaaaaaaaaaaaaaaaaaaaaaaaaaaaaaaaaaaaaaaaaaagagaggggcgcgcgcgcgcgtcctcatcagtatcgtctctctccctgcgtggggcggaccctactagtcccctcctcgccgccccgcgctcttttctgtttctatcagcgggcgctccgccctctctgctagtgggcgtcgttctttatttacgcgcgcgcgggacgacacgcgcggcgacgcgcgtcattcgtctttctcccacccgctcgcgatcgcggcgcgctgagtggaacaacagacagacgggaggctcacggaggggcgctcactcctcctcgctgctggtagtacaaccgcggccgccggcgcgccggccgccatcctatgcagtatcctgctgctccagtgggagagcggggcggcggtggaggaggaccagaaaatagtgctgcggtggcgggcgcagaagatcttctcttatctcccgtgcggggaggggtatagttttctctacgaggggcgcgcgctcttgcgcagggggggcgcggggatagtgggtcta

SEQ ID NO: 376497 - DNA, 2353 bp, Homo sapiens
tgatccagtccgggttttgcggcggagcgggcgggctgcgcgtgcggcggcttcaactgtcgcggtaggcagcagcaggctgaagggatcatggtgcagtacgagctgtgggccgcgctgcctggcgcctccggggtcgccctggcctgctgcttcgtggcggcggccgtggccctgcgctggtccgggcgccggacggcgcggggcgcggtggtccgggcgcgacagaggcagcgagcgggcctggagaacatggacagggcggcgcagcgcttccggctccagaacccagacctggactcagaggcgctgctagccctgcccctgcctcagctggtgcagaagttacacagtagagagctggcccctgaggccgtgctcttcacctatgtgggaaaggcctgggaagtgaacaaagggaccaactgtgtgacctcctatctggctgactgtgagactcagctgtctcaggccccaaggcagggcctgctctatggcgtccctgtgagcctcaaggagtgcttcacctacaagggccaggactccacgctgggcttgagcctgaatgaaggggtgccggcggagtgcgacagcgtagtggtgcatgtgctgaagctgcagggtgccgtgcccttcgtgcacaccaatgttccacagtccatgttcagctatgactgcagtaaccccctctttggccagaccgtgaacccatggaagtcctccaaaagcccagggggctcctcagggggtgaaggggccctcatcgggtctggaggctcccccctgggcttaggcactgatatcggaggcagcatccgcttcccctcctccttctgcctggttcccttcttgccaagcaacataccccatgctctggagaccctgtcaacaggtgggctcttcagtgatggtggccacaccttcctacagaacttcaaaggtgatttcgtggacccctgcctgggggacctggtctcaattctgaagcttccccaatggcttaaaggactgctggccttcctggtgaagcctctgctgccaaggctgtcagctttcctcagcaacatgaagtctcgttcggctggaaaactctgggaactgcagcacgagatcgaggtgtaccgcaaaaccgtgattgcccagtggagggcgctggacctggatgtggtgctgacccccatgctggcccctgctctggacttgaatgccccaggcagggccacaggggccgtcagctacactatgctgtacaactgcctggacttccctgcaggggtggtgcctgtcaccacggtgactgctgaggacgaggcccagatggaacattacaggggctactttggggatatctgggacaagatgctgcagaagggcatgaagaagagtgtggggctgccggtggccgtgcagtgtgtggctctgccctggcaagaagagttgtgtctgcggttcatgcgggaggtggagcgactgatgacccctgaaaagcagtcatcctgatggctctggctccagaggacctgagactcacactctctgcagcccagcctagtcagggcacagctgccctgctgccacagcaaggaaatgtcctgcatggggcagaggcttccgtgtcctctcccccaaccccctgcaagaagcgccgactccctgagtctggacctccatccctgctctggtcccctctcttcgtcctgatccctccacccccatgtggcagcccatgggtatgacataggccaaggcccaactaacagtcaagaaacaaaaaaaaaaaaaaaaaaaaaaaaaaaaaaaaaaaaaaaaaaaaaaaaaaaaaaaaaaaaaaaaaaaaaaaaaaaaaaagagaggggcgcgcgcgcgcgtcctcatcagtatcgtctctctccctgcgtggggcggaccctactagtcccctcctcgccgccccgcgctcttttctgtttctatcagcgggcgctccgccctctctgctagtgggcgtcgttctttatttacgcgcgcgcgggacgacacgcgcggcgacgcgcgtcattcgtctttctcccacccgctcgcgatcgcggcgcgctgagtggaacaacagacagacgggaggctcacggaggggcgctcactcctcctcgctgctggtagtacaaccgcggccgccggcgcgccggccgccatcctatgcagtatcctgctgctccagtgggagagcggggcggcggtggaggaggaccagaaaatagtgctgcggtggcgggcgcagaagatcttctcttatctcccgtgcggggaggggtatagttttctctacgaggggcgcgcgctcttgcgcagggggggcgcggggatagtgggtcta

SEQ ID NO: 376498 - DNA, 2429 bp, Homo sapiens
tgatccagtccgggttttgcggcggagcgggcgggctgcgcgtgcggcggcttcaactgtcgcggtaggcagcagcaggctgaagggatcatggtgcagtacgagctgtgggccgcgctgcctggcgcctccggggtcgccctggcctgctgcttcgtggcggcggccgtggccctgcgctggtccgggcgccggacggcgcggggcgcggtggtccgggcgcgacagaggcagcgagcgggcctggagaacatggacagggcggcgcagcgcttccggctccagaacccagacctggactcagaggcgctgctagccctgcccctgcctcagctggtgcagaagttacacagtagagagctggcccctgaggccgtgctcttcacctatgtgggaaaggcctgggaagtgaacaaagggaccaactgtgtgacctcctatctggctgactgtgagactcagctgtctcaggccccaaggcagggcctgctctatggcgtccctgtgagcctcaaggagtgcttcacctacaagggccaggactccacgctgggcttgagcctgaatgaaggggtgccggcggagtgcgacagcgtagtggtgcatgtgctgaagctgcagggtgccgtgcccttcgtgcacaccaatgttccacagtccatgttcagctatgactgcagtaaccccctctttggccagaccgtgaacccatggaagtcctccaaaagcccagggggctcctcagggggtgaaggggccctcatcgggtctggaggctcccccctgggcttaggcactgatatcggaggcagcatccgcttcccctcctccttctgcggcatctgcggcctcaagcccacagggaaccgcctcaggtctacaccagctctcagcccctgcgtgtggggtactatgagactgacaactataccatgccctccccggccatgaggcgggccgtgctggagaccaaacagagccttgaggctgcggggcacacgctggttcccttcttgccaagcaacataccccatgctctggagaccctgtcaacaggtgggctcttcagtgatggtggccacaccttcctacagaacttcaaaggtgatttcgtggacccctgcctgggggacctggtctcaattctgaagcttccccaatggcttaaaggactgctggccttcctggtgaagcctctgctgccaaggctgtcagctttcctcagcaacatgaagtctcggtgtaccgcaaaaccgtgattgcccagtggagggcgctggacctggatgtggtgctgacccccatgctggcccctgctctggacttgaatgccccaggcagggccacaggggtggtgcctgtcaccacggtgactgctgaggacgaggcccagatggaacattacaggggctactttggggatatctgggacaagatgctgcagaagggcatgaagaagagtgtggggctgccggtggccgtgcagtgtgtggctctgccctggcaagaagagttgtgtctgcggttcatgcgggaggtggagcgactgatgacccctgaaaagcagtcatcctgatggctctggctccagaggacctgagactcacactctctgcagcccagcctagtcagggcacagctgccctgctgccacagcaaggaaatgtcctgcatggggcagaggcttccgtgtcctctcccccaaccccctgcaagaagcgccgactccctgagtctggacctccatccctgctctggtcccctctcttcgtcctgatccctccacccccatgtggcagcccatgggtatgacataggccaaggcccaactaacagtcaagaaacaaaaaaaaaaaaaaaaaaaaaaaaaaaaaaaaaaaaaaaaaaaaaaaaaaaaaaaaaaaaaaaaaaaaaaaaaaaaaaagagaggggcgcgcgcgcgcgtcctcatcagtatcgtctctctccctgcgtggggcggaccctactagtcccctcctcgccgccccgcgctcttttctgtttctatcagcgggcgctccgccctctctgctagtgggcgtcgttctttatttacgcgcgcgcgggacgacacgcgcggcgacgcgcgtcattcgtctttctcccacccgctcgcgatcgcggcgcgctgagtggaacaacagacagacgggaggctcacggaggggcgctcactcctcctcgctgctggtagtacaaccgcggccgccggcgcgccggccgccatcctatgcagtatcctgctgctccagtgggagagcggggcggcggtggaggaggaccagaaaatagtgctgcggtggcgggcgcagaagatcttctcttatctcccgtgcggggaggggtatagttttctctacgaggggcgcgcgctcttgcgcagggggggcgcggggatagtgggtcta

SEQ ID NO: 376499 - DNA, 1764 bp, Homo sapiens
gatttccccacctgtgcctccaggctgtacctccctaaggggaggtaccctcagggaggcctcatcagggagatgttgccctcagttcttagagctctgagctgggtttgctggagagggataccctgagtcctgccttggggagctcccgtggatgtgggttgcagcccaggcatcccaaaggatcagcagaaacaaacggcatgtttggaaggagggagctgagtctggtgaggaggaggtggacaggatccctgcatagagaatgggattgctgtgggccgggcgagcaagctgggaaggatgtggggatgggagtgcctggaccgagcattttgtttcccagcaaaggtgatttcgtggacccctgcctgggggacctggtctcaattctgaagcttccccaatggcttaaaggactgctggccttcctggtgaagcctctgctgccaaggctgtcagctttcctcagcaacatgaagtctcgttcggctggaaaactctgggaactgcagcacgagatcgaggtgtaccgcaaaaccgtgattgcccagtggagggcgctggacctggatgtggtgctgacccccatgctggcccctgctctggacttgaatgccccaggcagggccacaggggccgtcagctacactatgctgtacaactgcctggacttccctgcaggggtggtgcctgtcaccacggtgactgctgaggacgaggcccagatggaacattacaggggctactttggggatatctgggacaagatgctgcagaagggcatgaagaagagtgtggggctgccggtggccgtgcagtgtgtggctctgccctggcaagaagagttgtgtctgcggttcatgcgggaggtggagcgactgatgacccctgaaaagcagtcatcctgatggctctggctccagaggacctgagactcacactctctgcagcccagcctagtcagggcacagctgccctgctgccacagcaaggaaatgtcctgcatggggcagaggcttccgtgtcctctcccccaaccccctgcaagaagcgccgactccctgagtctggacctccatccctgctctggtcccctctcttcgtcctgatccctccacccccatgtggcagcccatgggtatgacataggccaaggcccaactaacagtcaagaaacaaaaaaaaaaaaaaaaaaaaaaaaaaaaaaaaaaaaaaaaaaaaaaaaaaaaaaaaaaaaaaaaaaaaaaaaaaaaaaagagaggggcgcgcgcgcgcgtcctcatcagtatcgtctctctccctgcgtggggcggaccctactagtcccctcctcgccgccccgcgctcttttctgtttctatcagcgggcgctccgccctctctgctagtgggcgtcgttctttatttacgcgcgcgcgggacgacacgcgcggcgacgcgcgtcattcgtctttctcccacccgctcgcgatcgcggcgcgctgagtggaacaacagacagacgggaggctcacggaggggcgctcactcctcctcgctgctggtagtacaaccgcggccgccggcgcgccggccgccatcctatgcagtatcctgctgctccagtgggagagcggggcggcggtggaggaggaccagaaaatagtgctgcggtggcgggcgcagaagatcttctcttatctcccgtgcggggaggggtatagttttctctacgaggggcgcgcgctcttgcgcagggggggcgcggggatagtgggtcta

SEQ ID NO: 376500 - DNA, 1302 bp, Homo sapiens
tggtgaccacactccttctgcccagttcggctggaaaactctgggaactgcagcacgagatcgaggtgtaccgcaaaaccgtgattgcccagtggagggcgctggacctggatgtggtgctgacccccatgctggcccctgctctggacttgaatgccccaggcagggccacaggggccgtcagctacactatgctgtacaactgcctggacttccctgcaggggtggtgcctgtcaccacggtgactgctgaggacgaggcccagatggaacattacaggggctactttggggatatctgggacaagatgctgcagaagggcatgaagaagagtgtggggctgccggtggccgtgcagtgtgtggctctgccctggcaagaagagttgtgtctgcggttcatgcgggaggtggagcgactgatgacccctgaaaagcagtcatcctgatggctctggctccagaggacctgagactcacactctctgcagcccagcctagtcagggcacagctgccctgctgccacagcaaggaaatgtcctgcatggggcagaggcttccgtgtcctctcccccaaccccctgcaagaagcgccgactccctgagtctggacctccatccctgctctggtcccctctcttcgtcctgatccctccacccccatgtggcagcccatgggtatgacataggccaaggcccaactaacagtcaagaaacaaaaaaaaaaaaaaaaaaaaaaaaaaaaaaaaaaaaaaaaaaaaaaaaaaaaaaaaaaaaaaaaaaaaaaaaaaaaaaagagaggggcgcgcgcgcgcgtcctcatcagtatcgtctctctccctgcgtggggcggaccctactagtcccctcctcgccgccccgcgctcttttctgtttctatcagcgggcgctccgccctctctgctagtgggcgtcgttctttatttacgcgcgcgcgggacgacacgcgcggcgacgcgcgtcattcgtctttctcccacccgctcgcgatcgcggcgcgctgagtggaacaacagacagacgggaggctcacggaggggcgctcactcctcctcgctgctggtagtacaaccgcggccgccggcgcgccggccgccatcctatgcagtatcctgctgctccagtgggagagcggggcggcggtggaggaggaccagaaaatagtgctgcggtggcgggcgcagaagatcttctcttatctcccgtgcggggaggggtatagttttctctacgaggggcgcgcgctcttgcgcagggggggcgcggggatagtgggtcta

SEQ ID NO: 376501 - DNA, 1601 bp, Homo sapiens
tgatccagtccgggttttgcggcggagcgggcgggctgcgcgtgcggcggcttcaactgtcgcggtaggcagcagcaggctgaagggatcatggtgcagtacgagctgtgggccgcgctgcctggcgcctccggggtcgccctggcctgctgcttcgtggcggcggccgtggccctgcgctggtccgggcgccggacggcgcggggcgcggtggtccgggcgcgacagaggcagcgagcgggcctggagaacatggacagggcggcgcagcgcttccggctccagaacccagacctggactcagaggcgctgctagccctgcccctgcctcagctggtgcagaagttacacagtagagagctggcccctgaggccgtgctcttcacctatgtgggaaaggcctgggaagtgaacaaagggaccaactgtgtgacctcctatctggctgactgtgagactcagctgtctcaggccccaaggcagggcctgctctatggcgtccctgtgagcctcaaggagtgcttcacctacaagggccaggactccacgctgggcttgagcctgaatgaaggggtgccggcggagtgcgacagcgtagtggtgcatgtgctgaagctgcagggtgccgtgcccttcgtgcacaccaatgttccacagtccatgttcagctatgactgcagtaaccccctctttggccagaccgtgaacccatggaagtcctccaaaagcccagggggctcctcagggggtgaaggggccctcatcgggtctggaggctcccccctgggcttaggcactgatatcggaggcagcatccgcttcccctcctccttctgcggcatctgcggcctcaagcccacagggaaccgcctcagcaggtaaggtgggtggagggcgcttctgggcccctcgctgtgtgaccttggcctagcttccaacctctctgggctccaggcggggattcggtctccggggttttgctgggaggaagcattacagtaccactggccgggcgtgggtcctagtttccaaagcggtgagtgttcagagctgctctgtgggtgtggggatggcggcgggtggccatttcctgtttccagcatcttatgtttcttatccagcaagagtggcctgaagggctgtgtctatggacaggaggcagtgcgtctctccgtgggccccatggcccgggacgtggagagcctggcactgtgcctgcgagccctgctgtgcgaggacatgttccgcttggaccccactgtgcctcccttgcccttcagagaagaggtctacaccagctctcagcccctgcgtgtggggtactatgagactgacaactataccatgccctccccggccatgaggcgggccgtgctggagaccaaacagagccttgaggctgcggggcacacgctggttcccttcttgccaagcaacataccccatgctctggagaccctgtcaacaggtgggctcttcagtgatggtggccacaccttcctacagaacttgtgagtgatagtgggctttggggtcttggtgggatcagacaagtaggcagacctgggggagcagcagggtgtggtgatgcctggatgggc

SEQ ID NO: 376502 - DNA, 654 bp, Homo sapiens
agctgttcagaggatcccaaagattttgagcatcaccctcagactgacactgctgaggagccgggggcggttagctgcaggtgtgcctggctgggtactgagtggaaagccttgggccagaatcttcatagaagtctagagttggggagagttggagggtatgttagtgaagggtgtatacacctggaggctccccaggccctccactctcgctctgctcttcggttgaggcagatggcactgctggctgtggagggcctgattggtaccaccttccccggcgttatgatggagcagggacgacaggctctggcttggggacccaaagttggcatgcagctaattatttaacagcatccagtccttttggcccctaggtaccggaattatatatgaataataagcacatacgatggaattactcaaatggagaactgaccaggctactaacaatagagtccagattggaaaagaagcactgtggaataacttgtgagaggattctgtgctaaattagaactttttcaaaggtggcctgaaaagaggggacttcagtttaattccagagatggtaattctggggacgtgttttacttggagctggacttcttgtgacgtggtgatgctcaaagatcttggggtacgagctcgaat

SEQ ID NO: 376503 - DNA, 174 bp, Homo sapiens
taaaaatacaaaattagcagggcgcggtggcaggcgcgctgccactgtggagcagttcgttttgaagtttgggcctcagcagacttgcatatatttgactgcaagtgagtatttttttttccctaaattggcttaaaagaatttcagagttaaaatgcaatatttcaaaataat

SEQ ID NO: 376504 - DNA, 1758 bp, Homo sapiens
gaggagctctgcggccgccaagctgcgcgggcagaagcggtccggggcctccgcggcccccgcggcctccgcggccgctgccttggcacccagcgccacccgcacacggcgctccgctagccaggccgggagcaagagccaggcggtggagaagccgccgtcggagaagccgcggctgaggcgctcgtcgccgcgggcccaggaggagggcccgggggagccgccgccgcctgagctggcgttgctcccgccaccgccgccgccgccgccgactcccgcgaccccgacgtcctcggcgtccaacctggacctgggcgagcagcgggagcgctgggagacgttccagaagcggcagaagcttacctccgagggtgccgccaagctcctgctagacacctttgaataccagggcctggtgaagcacacaggaggctgccactgtggagcagttcgttttgaagtttgggcctcagcagacttgcatatatttgactgcaagtaccggaattatatatgaataataagcacatacgatggaattactcaaatggagaactgaccaggctactaacaatagagtccagattggaaaagaagcactgtggaataacttgtgagaggattctgtgctaaattagaactttttcaaaggtggcctgaaaagaggggacttcagtttaattccagagatggtaattctggggacgtgttttacttggagctggacttcttgtgacgtggtgatgaagaaagagggaaacctaaacttccttgtccatttttggtgtggatgtctcagagacatcaggttgtagcagtgtctgaaatttgtttcctaagtgtctctgaagtccagcgcttctcttcactgtaaagaactgaggggtgggcagtacagacctgtctgttggtcctgtgttctgagcattgcagaacctcgactgctgacttgggacccccctgggctctgctgtacctgcaaaccagaggcactgctatccaggcctttgccccagctcctcggccctggatggtgctgaaaggggcatcatctgtggggtcggctggctctcatggctgggccgctcaggcatagaggatgcaggtggctgctcacaatctggaatttgctctgtctttctgtagttgcagcatttgcaagaagaagcagaatagacacttcattgttccagcttctcgcttcaagctcctgaagggagctgagcacataacgacttacacgttcaatactcacaaagcccagcataccttctgtaagagatgtggcgttcagagcttctatactccacgatcaaaccccggaggcttcggaattgccccccactgcctggatgagggcactgtgcggagtatggtcactgaggaattcaatggcagcgattgggagaaggccatgaaagagcacaagaccatcaagaacatgtctaaagagtgagcttctgcctctcctgccctgaaaaggaggaatgattggggccagcaactttgctctccctgccgtgcctcggtggtgctcctgaatgtggctgacctgggctgctggttccgttgactagggtcatcttgatctctgcagtttgctccagctaccagtttctttaggcagctctttgtcctccctctgcccagattttgatgtagtctaattgacatccttctcttcccaacttttgtgtgatcttttaggaaaaaaaataaatatttttaacattaaagcagtcactttggtttatcaaa

SEQ ID NO: 376505 - DNA, 1304 bp, Homo sapiens
gaggagctctgcggccgccaagctgcgcgggcagaagcggtccggggcctccgcggcccccgcggcctccgcggccgctgccttggcacccagcgccacccgcacacggcgctccgctagccaggccgggagcaagagccaggcggtggagaagccgccgtcggagaagccgcggctgaggcgctcgtcgccgcgggcccaggaggagggcccgggggagccgccgccgcctgagctggcgttgctcccgccaccgccgccgccgccgccgactcccgcgaccccgacgtcctcggcgtccaacctggacctgggcgagcagcgggagcgctgggagacgttccagaagcggcagaagcttacctccgagggtgccgccaagctcctgctagacacctttgaataccagggcctggtgaagcacacaggaggctgccactgtggagcagttcgttttgaagtttgggcctcagcagacttgcatatatttgactgcaagtaccggaattatatatgaataataagcacatacgatggaattactcaaatggagaactgaccaggctactaacaatagagtccagattggaaaagaagcactgtggaataacttgtgagaggattctgtgctaaattagaactttttcaaaggtggcctgaaaagaggggacttcagtttaattccagagatgttgcagcatttgcaagaagaagcagaatagacacttcattgttccagcttctcgcttcaagctcctgaagggagctgagcacataacgacttacacgttcaatactcacaaagcccagcataccttctgtaagagatgtggcgttcagagcttctatactccacgatcaaaccccggaggcttcggaattgccccccactgcctggatgagggcactgtgcggagtatggtcactgaggaattcaatggcagcgattgggagaaggccatgaaagagcacaagaccatcaagaacatgtctaaagagtgagcttctgcctctcctgccctgaaaaggaggaatgattggggccagcaactttgctctccctgccgtgcctcggtggtgctcctgaatgtggctgacctgggctgctggttccgttgactagggtcatcttgatctctgcagtttgctccagctaccagtttctttaggcagctctttgtcctccctctgcccagattttgatgtagtctaattgacatccttctcttcccaacttttgtgtgatcttttaggaaaaaaaataaatatttttaacattaaagcagtcactttggtttatcaaa

SEQ ID NO: 376506 - DNA, 1598 bp, Homo sapiens
gaggagctctgcggccgccaagctgcgcgggcagaagcggtccggggcctccgcggcccccgcggcctccgcggccgctgccttggcacccagcgccacccgccgccgccgactcccgcgaccccgacgtcctcggcgtccaacctggacctgggcgagcagcgggagcgctgggagacgttccagaagcggcagaagcttacctccgagggtgccgccaagctcctgctagacacctttgaataccagggcctggtgaagcacacaggaggctgccactgtggagcagttcgttttgaagtttgggcctcagcagacttgcatatatttgactgcaagtaccggaattatatatgaataataagcacatacgatggaattactcaaatggagaactgaccaggctactaacaatagagtccagattggaaaagaagcactgtggaataacttgtgagaggattctgtgctaaattagaactttttcaaaggtggcctgaaaagaggggacttcagtttaattccagagatggtaattctggggacgtgttttacttggagctggacttcttgtgacgtggtgatgaagaaagagggaaacctaaacttccttgtccatttttggtgtggatgtctcagagacatcaggttgtagcagtgtctgaaatttgtttcctaagtgtctctgaagtccagcgcttctcttcactgtaaagaactgaggggtgggcagtacagacctgtctgttggtcctgtgttctgagcattgcagaacctcgactgctgacttgggacccccctgggctctgctgtacctgcaaaccagaggcactgctatccaggcctttgccccagctcctcggccctggatggtgctgaaaggggcatcatctgtggggtcggctggctctcatggctgggccgctcaggcatagaggatgcaggtggctgctcacaatctggaatttgctctgtctttctgtagttgcagcatttgcaagaagaagcagaatagacacttcattgttccagcttctcgcttcaagctcctgaagggagctgagcacataacgacttacacgttcaatactcacaaagcccagcataccttctgtaagagatgtggcgttcagagcttctatactccacgatcaaaccccggaggcttcggaattgccccccactgcctggatgagggcactgtgcggagtatggtcactgaggaattcaatggcagcgattgggagaaggccatgaaagagcacaagaccatcaagaacatgtctaaagagtgagcttctgcctctcctgccctgaaaaggaggaatgattggggccagcaactttgctctccctgccgtgcctcggtggtgctcctgaatgtggctgacctgggctgctggttccgttgactagggtcatcttgatctctgcagtttgctccagctaccagtttctttaggcagctctttgtcctccctctgcccagattttgatgtagtctaattgacatccttctcttcccaacttttgtgtgatcttttaggaaaaaaaataaatatttttaacattaaagcagtcactttggtttatcaaa

SEQ ID NO: 376507 - DNA, 1712 bp, Homo sapiens
gaggagctctgcggccgccaagctgcgcgggcagaagcggtccggggcctccgcggcccccgcggcctccgcggccgctgccttggcacccagcgccacccgcacacggcgctccgctagccaggccgggagcaagagccaggcggtggagaagccgccgtcggagaagccgcggctgaggcgctcgtcgccgcgggcccaggaggagggcccgggggagccgccgccgcctgagctggcgttgctcccgccaccgccgccgccgccgccgactcccgcgaccccgacgtcctcggcgtccaacctggacctgggcgagcagcgggagcgctgggagacgttccagaagcggcagaagcttacctccgagggtgccgccaagctcctgctagacacctttgaataccagggcctggtgaagcacacaggaggctgccactgtggagcagttcgttttgaagtttgggcctcagcagacttgcatatatttgactgcaagtaccggaattatatatgaataataagcacatacgatggaattactcaaatggagaactgaccaggctactaacaatagagtccagattggaaaagaagcactgtggaataacttgtgagaggattctgtgctaaattagaactttttcaaaggtggcctgaaaagaggggacttcagtttaattccagagatggtaattctggggacgtgttttacttggagctggacttcttgtgacgtggtgatgaagaaagagggaaacctaaacttccttgtccatttttggtgtggatgtctcagagacatcaggttgtagcagtgtctgaaatttgtttcctaagtgtctctgaagtccagcgcttctcttcactgtaaagaactgaggggtgggcagtacagacctgtctgttggtcctgtgttctgagcattgcagaacctcgactgctgacttgggacccccctgggctctgctgtacctgcaaaccagaggcactgctatccaggcctttgccccagctcctcggccctggatggtgctgaaaggggcatcatctgtggggtcggctggctctcatggctgggccgctcaggcatagaggatgcaggtggctgctcacaatctggaatttgctctgtctttctgtagttgcagcatttgcaagaagaagcagaatagacacttcattgttccagcttctcgcttcaagctcctgaaggtcagtgcttaagagcagggtcaaggagtgcagaacccattggtgagatttacaggaccccccacccaaccgttagcatgccgtctgtagcatgggaggggcctggagcatagcagggcctctcacgggctttggtttcaggttgacatttaaaaggtgggcccggcacagtggctcacgcctgtaatcccagcactttgggaggccaagatggatggatcacctgaagtcaggagttgaggaccagcctggccaacatggtgaaaccctatctctactaaaaatacaaaaattagctgggcgttgtagtgcatgcctgtaatcccagctacttgggaggccaaggcaggagaatcacttgaacctgggaggtggaggttgcagtgagccgagatcacaccattgcactccagcctgggtgacaagagtgaaactccatctcaaaaaaaatgaaaataaaaaataaaaggttgtgttattttttacctttattttt

SEQ ID NO: 376508 - DNA, 313 bp, Homo sapiens
tctaatcttctgtctttctttcagcaacaaaaagagagcaggaggcagctattcagaaattattatctttctgatttttgtttcatttagtgaataccagggcctggtgaagcacacaggaggctgccactgtggagcagttcgttttgaagtttgggcctcagcagacttgcatatatttgactgcaagtgagtatttttttttccctaaattggcttaaaagaatttcagagttaaaatgcaatatttcaaaataatctggggagttggggtacagaggaaacattggccttgggctggtaactgttgaag

SEQ ID NO: 376509 - DNA, 1110 bp, Homo sapiens
gaggagctctgcggccgccaagctgcgcgggcagaagcggtccggggcctccgcggcccccgcggcctccgcggccgctgccttggcacccagcgccacccgcacacggcgctccgctagccaggccgggagcaagagccaggcggtggagaagccgccgtcggagaagccgcggctgaggcgctcgtcgccgcgggcccaggaggagggcccgggggagccgccgccgcctgagctggcgttgctcccgccaccgccgccgccgccgccgactcccgcgaccccgacgtcctcggcgtccaacctggacctgggcgagcagcgggagcgctgggagacgttccagaagcggcagaagcttacctccgagggtgccgccaagctcctgctagacacctttgaataccagggcctggtgaagcacacaggaggctgccactgtggagcagttcgttttgaagtttgggcctcagcagacttgcatatatttgactgcaattgcagcatttgcaagaagaagcagaatagacacttcattgttccagcttctcgcttcaagctcctgaagggagctgagcacataacgacttacacgttcaatactcacaaagcccagcataccttctgtaagagatgtggcgttcagagcttctatactccacgatcaaaccccggaggcttcggaattgccccccactgcctggatgagggcactgtgcggagtatggtcactgaggaattcaatggcagcgattgggagaaggccatgaaagagcacaagaccatcaagaacatgtctaaagagtgagcttctgcctctcctgccctgaaaaggaggaatgattggggccagcaactttgctctccctgccgtgcctcggtggtgctcctgaatgtggctgacctgggctgctggttccgttgactagggtcatcttgatctctgcagtttgctccagctaccagtttctttaggcagctctttgtcctccctctgcccagattttgatgtagtctaattgacatccttctcttcccaacttttgtgtgatcttttaggaaaaaaaataaatatttttaacattaaagcagtcactttggtttatcaaa

SEQ ID NO: 376510 - DNA, 1773 bp, Homo sapiens
cccgggtgtatatcggacgaggagctgcgcgggcagattgctggtcctggggcggtccggggcctccgcggcccccgcggcctccgcggccgctgccttggcacccagcgccacccgcacacggcgctccgctagccaggccgggagcaagagccaggcggtggagaagccgccgtcggagaagccgcggctgaggcgctcgtcgccgcgggcccaggaggagggcccgggggagccgccgccgcctgagctggcgttgctcccgccaccgccgccgccgccgccgactcccgcgaccccgacgtcctcggcgtccaacctggacctgggcgagcagcgggagcgctgggagacgttccagaagcggcagaagcttacctccgagggtgccgccaagctcctgctagacacctttgaataccagggcctggtgaagcacacaggaggctgccactgtggagcagttcgttttgaagtttgggcctcagcagacttgcatatatttgactgcaagtaccggaattatatatgaataataagcacatacgatggaattactcaaatggagaactgaccaggctactaacaatagagtccagattggaaaagaagcactgtggaataacttgtgagaggattctgtgctaaattagaactttttcaaaggtggcctgaaaagaggggacttcagtttaattccagagatggtaattctggggacgtgttttacttggagctggacttcttgtgacgtggtgatgaagaaagagggaaacctaaacttccttgtccatttttggtgtggatgtctcagagacatcaggttgtagcagtgtctgaaatttgtttcctaagtgtctctgaagtccagcgcttctcttcactgtaaagaactgaggggtgggcagtacagacctgtctgttggtcctgtgttctgagcattgcagaacctcgactgctgacttgggacccccctgggctctgctgtacctgcaaaccagaggcactgctatccaggcctttgccccagctcctcggccctggatggtgctgaaaggggcatcatctgtggggtcggctggctctcatggctgggccgctcaggcatagaggatgcaggtggctgctcacaatctggaatttgctctgtctttctgtagttgcagcatttgcaagaagaagcagaatagacacttcattgttccagcttctcgcttcaagctcctgaagggagctgagcacataacgacttacacgttcaatactcacaaagcccagcataccttctgtaagagatgtggcgttcagagcttctatactccacgatcaaaccccggaggcttcggaattgccccccactgcctggatgagggcactgtgcggagtatggtcactgaggaattcaatggcagcgattgggagaaggccatgaaagagcacaagaccatcaagaacatgtctaaagagtgagcttctgcctctcctgccctgaaaaggaggaatgattggggccagcaactttgctctccctgccgtgcctcggtggtgctcctgaatgtggctgacctgggctgctggttccgttgactagggtcatcttgatctctgcagtttgctccagctaccagtttctttaggcagctctttgtcctccctctgcccagattttgatgtagtctaattgacatccttctcttcccaacttttgtgtgatcttttaggaaaaaaaataaatatttttaacattaaagcagtcactttggtttatcaaa

SEQ ID NO: 376511 - DNA, 1634 bp, Homo sapiens
gaggagctctgcggccgccaagctgcgcgggcagaagcggtccggggcctccgcggcccccgcggcctccgcggccgctgccttggcacccagcgccacccgcacacggcgctccgctagccaggccgggagcaagagccaggcggtggagaagccgccgtcggagaagccgcggctgaggcgctcgtcgccgcgggcccaggaggagggcccgggggagccgccgccgcctgagctggcgttgctcccgccaccgccgccgccgccgccgactcccgcgaccccgacgtcctcggcgtccaacctggacctgggcgagcagcgggagcgctgggagacgttccagaagcggcagaagcttacctccgagggtgccgccaagctcctgctagacacctttgaataccagggcctggtgaagcacacaggaggctgccactgtggagcagttcgttttgaagtttgggcctcagcagacttgcatatatttgactgcaagtaccggaattatatatgaataataagcacatacgatggaattactcaaatggagaactgaccaggctactaacaatagagtccagattggaaaagaagcactgtggaataacttgtgagaggattctgtgctaaattagaactttttcaaaggtggcctgaaaagaggggacttcagtttaattccagagatggtaattctggggacgtgttttacttggagctggacttcttgtgacgtggtgatgaagaaagagggaaacctaaacttccttgtccatttttggtgtggatgtctcagagacatcaggttgtagcagtgtctgaaatttgtttcctaagtgtctctgaagtccagcgcttctcttcactgtaaagaactgaggggtgggcagtacagacctgtctgttggtcctgtgttctgagcattgcagaacctcgactgctgacttgggacccccctgggctctgctgtacctgcaaaccagaggcactgctatccaggcctttgccccagctcctcggccctggatggtgctgaaaggggcatcatctgtggggtcggctggctctcatggctgggccgctcaggcatagaggatgcaggtggctgctcacaatctggaatttgctctgtctttctgtagttgcagcatttgcaagaagaagcagaatagacacttcattgttccagcttctcgcttcaagctcctgaagggagctgagcacataacgacttacacgttcaatactcacaaagcccagcataccttctgtaagagatgtggcgttcagagcttctatactccacgatcaaaccccggaggcttcggaattgccccccactgcctggatgagggcactgtgcggagtatggtcactgaggaattcaatggcagcgattgggagaagtcctgaatgtggctgacctgggctgctggttccgttgactagggtcatcttgatctctgcagtttgctccagctaccagtttctttaggcagctctttgtcctccctctgcccagattttgatgtagtctaattgacatccttctcttcccaacttttgtgtgatcttttaggaaaaaaaataaatatttttaacattaaagcagtcactttggtttatcaaa

SEQ ID NO: 376512 - DNA, 1412 bp, Homo sapiens
cgactgccgccccgagtgtccgcagcgctcgtgctgcagctccgcacctgcggccagtgcctactgccctctcttgccgcccgcacctgcagccccgcacctgccgcttgcacctgcagccccgcgctctacccggttcaagcatggctgaccaggcgcccttcgacacggacgtcaacaccctgacccgcttcgtcatggaggagggcaggaaggcccgcggcacgggcgagttgacccagctgctcaactcgctctgcacagcagtcaaagccatctcttcggcggtgcgcaaggcgggcatcgcgcacctctatggcattgctggttctaccaacgtgacaggtgatcaagttaagaagctggacgtcctctccaacgacctggttatgaacatgttaaagtcatcctttgccacgtgtgttctcgtgtcagaagaagataaacacgccatcatagtggaaccggagaaaaggggtaaatatgtggtctgttttgatccccttgatggatcttccaacatcgattgccttgtgtccgttggaaccatttttggcatctatagaaagaaatcaactgatgagccttctgagaaggatgctctgcaaccaggccggaacctggtggcagccggctacgcactgtatggcagtgccaccatgctggtccttgccatggactgtggggtcaactgcttcatgctggacccggccatcggggagttcattttggtggacaaggatgtgaagataaaaaagaaaggtaaaatctacagccttaacgagggctacgccaaggactttgaccctgccgtcactgagtacatccagaggaagaagttccccccagataattcagctccttatggggcccggtatgtgggctccatggtggctgatgttcatcgcactctggtctacggagggatatttctgtaccccgctaacaagaagagccccaatggaaagctgagactgctgtacgaatgcaaccccatggcctacgtcatggagaaggctgggggaatggccaccactgggaaggaggccgtgttagacgtcattcccacagacattcaccagagggcgccggtgatcttggggtcccccgacgacgtgctcgagttcctgaaggtgtatgagaagcactctgcccagtgagcacctgccctgcctgcatccggagaattgcctctacctggaccttttgtctcacacagcagtaccctgacctgctgtgcaccttacattcctagagagcagaaataaaaagcatgactatttccaccatcaaatgctgtagaatgcttggcactccctaaccaaatgctgtctccataatgccactggtgttaagatatattttgagtggatggaggagaaataaacttattcctccttaaaaaaaaaact

SEQ ID NO: 376513 - DNA, 1442 bp, Homo sapiens
gattcacccgccggcgcctggcctggcccagttgcaccacgagcgctgcggacactcggggcggcagtcggtctgtcagtcctcccgccaggtcccgcggcccgcacctgccgcccgcacctgcagctccgcacctgcggccagtgcctactgccctctcttgccgcccgcacctgcagccccgcacctgccgcttgcacctgcagccccgcgctctacccggttcaagcatggctgaccaggcgcccttcgacacggacgtcaacaccctgacccgcttcgtcatggaggagggcaggaaggcccgcggcacgggcgagttgacccagctgctcaactcgctctatggcattgctggttctaccaacgtgacaggtgatcaagttaagaagctggacgtcctctccaacgacctggttatgaacatgttaaagtcatcctttgccacgtgtgttctcgtgtcagaagaagataaacacgccatcatagtggaaccggagaaaaggggtaaatatgtggtctgttttgatccccttgatggatcttccaacatcgattgccttgtgtccgttggaaccatttttggcatctatagaaagaaatcaactgatgagccttctgagaaggatgctctgcaaccaggccggaacctggtggcagccggctacgcactgtatggcagtgccaccatgctggtccttgccatggactgtggggtcaactgcttcatgctggacccggccatcggggagttcattttggtggacaaggatgtgaagataaaaaagaaaggtaaaatctacagccttaacgagggctacgccaaggactttgaccctgccgtcactgagtacatccagaggaagaagttccccccagataattcagctccttatggggcccggtatgtgggctccatggtggctgatgttcatcgcactctggtctacggagggatatttctgtaccccgctaacaagaagagccccaatggaaagctgagactgctgtacgaatgcaaccccatggcctacgtcatggagaaggctgggggaatggccaccactgggaaggaggccgtgttagacgtcattcccacagacattcaccagagggcgccggtgatcttggggtcccccgacgacgtgctcgagttcctgaaggtgtatgagaagcactctgcccagtgagcacctgccctgcctgcatccggagaattgcctctacctggaccttttgtctcacacagcagtaccctgacctgctgtgcaccttacattcctagagagcagaaataaaaagcatgactatttccaccatcaaatgctgtagaatgcttggcactccctaaccaaatgctgtctccataatgccactggtgttaagatatattttgagtggatggaggagaaataaacttattcctccttaaaaaaaaaact

SEQ ID NO: 376514 - DNA, 1194 bp, Homo sapiens
cacatcttggaaattcaaatactcaatagctctcgaattctaggaatcttgagaagaggcctggattaaggattcagacgtgggccctcagatggctatggcattgctggttctaccaacgtgacaggtgatcaagttaagaagctggacgtcctctccaacgacctggttatgaacatgttaaagtcatcctttgccacgtgtgttctcgtgtcagaagaagataaacacgccatcatagtggaaccggagaaaaggggtaaatatgtggtctgttttgatccccttgatggatcttccaacatcgattgccttgtgtccgttggaaccatttttggcatctatagaaagaaatcaactgatgagccttctgagaaggatgctctgcaaccaggccggaacctggtggcagccggctacgcactgtatggcagtgccaccatgctggtccttgccatggactgtggggtcaactgcttcatgctggacccggccatcggggagttcattttggtggacaaggatgtgaagataaaaaagaaaggtaaaatctacagccttaacgagggctacgccaaggactttgaccctgccgtcactgagtacatccagaggaagaagttccccccagataattcagctccttatggggcccggtatgtgggctccatggtggctgatgttcatcgcactctggtctacggagggatatttctgtaccccgctaacaagaagagccccaatggaaagctgagactgctgtacgaatgcaaccccatggcctacgtcatggagaaggctgggggaatggccaccactgggaaggaggccgtgttagacgtcattcccacagacattcaccagagggcgccggtgatcttggggtcccccgacgacgtgctcgagttcctgaaggtgtatgagaagcactctgcccagtgagcacctgccctgcctgcatccggagaattgcctctacctggaccttttgtctcacacagcagtaccctgacctgctgtgcaccttacattcctagagagcagaaataaaaagcatgactatttccaccatcaaatgctgtagaatgcttggcactccctaaccaaatgctgtctccataatgccactggtgttaagatatattttgagtggatggaggagaaataaacttattcctccttaaaaaaaaaact

SEQ ID NO: 376515 - DNA, 1089 bp, Homo sapiens
tggaaattcctggagtctccttcctggcattctccgagattgccacccagccaggccagcccttcagagacgtggtcacaaccctggggcctgctcttttctggcagagtggccccaggttcttcatctgggcctcctaggctctgccaaaggggtaaatatgtggtctgttttgatccccttgatggatcttccaacatcgattgccttgtgtccgttggaaccatttttggcatctatagaaagaaatcaactgatgagccttctgagaaggatgctctgcaaccaggccggaacctggtggcagccggctacgcactgtatggcagtgccaccatgctggtccttgccatggactgtggggtcaactgcttcatgctggacccggccatcggggagttcattttggtggacaaggatgtgaagataaaaaagaaaggtaaaatctacagccttaacgagggctacgccaaggactttgaccctgccgtcactgagtacatccagaggaagaagttccccccagataattcagctccttatggggcccggtatgtgggctccatggtggctgatgttcatcgcactctggtctacggagggatatttctgtaccccgctaacaagaagagccccaatggaaagctgagactgctgtacgaatgcaaccccatggcctacgtcatggagaaggctgggggaatggccaccactgggaaggaggccgtgttagacgtcattcccacagacattcaccagagggcgccggtgatcttggggtcccccgacgacgtgctcgagttcctgaaggtgtatgagaagcactctgcccagtgagcacctgccctgcctgcatccggagaattgcctctacctggaccttttgtctcacacagcagtaccctgacctgctgtgcaccttacattcctagagagcagaaataaaaagcatgactatttccaccatcaaatgctgtagaatgcttggcactccctaaccaaatgctgtctccataatgccactggtgttaagatatattttgagtggatggaggagaaataaacttattcctccttaaaaaaaaaact

SEQ ID NO: 376516 - DNA, 1095 bp, Homo sapiens
catctcgaacgtcactgggcacaggaatcatttggggatcttgctatggcattgctggttctaccaacgtgacaggtgatcaagttaagaagctggacgtcctctccaacgacctggttatgaacatgttaaagtcatcctttgccacgtgtgttctcgtgtcagaagaagataaacacgccatcatagtggaaccggagaaaaggcgattgccttgtgtccgttggaaccatttttggcatctatagaaagaaatcaactgatgagccttctgagaaggatgctctgcaaccaggccggaacctggtggcagccggctacgcactgtatggcagtgccaccatgctggtccttgccatggactgtggggtcaactgcttcatgctggacccggccatcggggagttcattttggtggacaaggatgtgaagataaaaaagaaaggtaaaatctacagccttaacgagggctacgccaaggactttgaccctgccgtcactgagtacatccagaggaagaagttccccccagataattcagctccttatggggcccggtatgtgggctccatggtggctgatgttcatcgcactctggtctacggagggatatttctgtaccccgctaacaagaagagccccaatggaaagctgagactgctgtacgaatgcaaccccatggcctacgtcatggagaaggctgggggaatggccaccactgggaaggaggccgtgttagacgtcattcccacagacattcaccagagggcgccggtgatcttggggtcccccgacgacgtgctcgagttcctgaaggtgtatgagaagcactctgcccagtgagcacctgccctgcctgcatccggagaattgcctctacctggaccttttgtctcacacagcagtaccctgacctgctgtgcaccttacattcctagagagcagaaataaaaagcatgactatttccaccatcaaatgctgtagaatgcttggcactccctaaccaaatgctgtctccataatgccactggtgttaagatatattttgagtggatggaggagaaataaacttattcctccttaaaaaaaaaact

SEQ ID NO: 376517 - DNA, 1443 bp, Homo sapiens
gattcacccgccggcgcctggcctggcccagttgcaccacgagcgctgcggacactcggggcggcagtcggtctgtcagtcctcccgccaggtcccgcggcccgcacctgccgcccgcacctgcagctccgcacctgcggccagtgcctactgccctctcttgccgcccgcacctgcagccccgcacctgccgcttgcacctgcagccccgcgctctacccggttcaagcatggctgaccaggcgcccttcgacacggacgtcaacaccctgacccgcttcgtcatggaggagggcaggaaggcccgcggcacgggcgagttgacccagctgctcaactcgctctgcacagcagtcaaagccatctcttcggcggtgcgcaaggcgggcatcgcgcacctctatggcattgctggttctaccaacgtgacaggtgatcaagttaagaagctggacgtcctctccaacgacctggttatgaacatgttaaagtcatcctttgccacgtgtgttctcgtgtcagaagaagataaacacgccatcatagtggaaccggagaaaaggggtaaatatgtggtctgttttgatccccttgatggatcttccaacatcgattgccttgtgtccgttggaaccatttttggcatctatagaaagaaatcaactgatgagccttctgagaaggatgctctgcaaccaggccggaacctggtggcagccggctacgcactgtatggcagtgccaccatgctggtccttgccatggactgtggggtcaactgcttcatgctggacccggccatcggggagttcattttggtggacaaggatgtgaagataaaaaagaaaggtaaaatctacagccttaacgagggctacgccaaggactttgaccctgccgtcactgagtacatccagaggaagaagttccccccagataattcagctccttatggggcccggtatgtgggctccatggtggctgatgttcatcgcactctggtctacggagggatatttctgtaccccgctaacaagaagagccccaatggaaagctgagactgctgtacgaatgcaaccccatggcctacgtcatggagaaggctgggggaatggccaccactgggaaggaggccgtgttagacgtcattcccacagacattcaccagagggcgccggtgatcttggggtcccccgacgacgtgctcgagttcctgaaggtgtatgagaagcacttttgtctcacacagcagtaccctgacctgctgtgcaccttacattcctagagagcagaaataaaaagcatgactatttccaccatcaaatgctgtagaatgcttggcactccctaaccaaatgctgtctccataatgccactggtgttaagatatattttgagtggatggaggagaaataaacttattcctccttaaaaaaaaaact

SEQ ID NO: 376518 - DNA, 1499 bp, Homo sapiens
gattcacccgccggcgcctggcctggcccagttgcaccacgagcgctgcggacactcggggcggcagtcggtctgtcagtcctcccgccaggtcccgcggcccgcacctgccgcccgcacctgcagctccgcacctgcggccagtgcctactgccctctcttgccgcccgcacctgcagccccgcacctgccgcttgcacctgcagccccgcgctctacccggttcaagcatggctgaccaggcgcccttcgacacggacgtcaacaccctgacccgcttcgtcatggaggagggcaggaaggcccgcggcacgggcgagttgacccagctgctcaactcgctctgcacagcagtcaaagccatctcttcggcggtgcgcaaggcgggcatcgcgcacctctatggcattgctggttctaccaacgtgacaggtgatcaagttaagaagctggacgtcctctccaacgacctggttatgaacatgttaaagtcatcctttgccacgtgtgttctcgtgtcagaagaagataaacacgccatcatagtggaaccggagaaaaggggtaaatatgtggtctgttttgatccccttgatggatcttccaacatcgattgccttgtgtccgttggaaccatttttggcatctatagaaagaaatcaactgatgagccttctgagaaggatgctctgcaaccaggccggaacctggtggcagccggctacgcactgtatggcagtgccaccatgctggtccttgccatggactgtggggtcaactgcttcatgctggacccggccatcggggagttcattttggtggacaaggatgtgaagataaaaaagaaaggtaaaatctacagccttaacgagggctacgccaaggactttgaccctgccgtcactgagtacatccagaggaagaagttccccccagataattcagctccttatggggcccggtatgtgggctccatggtggctgatgttcatcgcactctggtctacggagggatatttctgtaccccgctaacaagaagagccccaatggaaagctgagactgctgtacgaatgcaaccccatggcctacgtcatggagaaggctgggggaatggccaccactgggaaggaggccgtgttagacgtcattcccacagacattcaccagagggcgccggtgatcttggggtcccccgacgacgtgctcgagttcctgaaggtgtatgagaagcactctgcccagtgagcacctgccctgcctgcatccggagaattgcctctacctggaccttttgtctcacacagcagtaccctgacctgctgtgcaccttacattcctagagagcagaaataaaaagcatgactatttccaccatcaaatgctgtagaatgcttggcactccctaaccaaatgctgtctccataatgccactggtgttaagatatattttgagtggatggaggagaaataaacttattcctccttaaaaaaaaaact

SEQ ID NO: 376519 - DNA, 1095 bp, Homo sapiens
cgagaggatcccgcgctacaacgccaaggtgatcaagttaagaagctggacgtcctctccaacgacctggttatgaacatgttaaagtcatcctttgccacgtgtgttctcgtgtcagaagaagataaacacgccatcatagtggaaccggagaaaaggggtaaatatgtggtctgttttgatccccttgatggatcttccaacatcgattgccttgtgtccgttggaaccatttttggcatctatagaaagaaatcaactgatgagccttctgagaaggatgctctgcaaccaggccggaacctggtggcagccggctacgcactgtatggcagtgccaccatgctggtccttgccatggactgtggggtcaactgcttcatgctggacccggccatcggggagttcattttggtggacaaggatgtgaagataaaaaagaaaggtaaaatctacagccttaacgagggctacgccaaggactttgaccctgccgtcactgagtacatccagaggaagaagttccccccagataattcagctccttatggggcccggtatgtgggctccatggtggctgatgttcatcgcactctggtctacggagggatatttctgtaccccgctaacaagaagagccccaatggaaagctgagactgctgtacgaatgcaaccccatggcctacgtcatggagaaggctgggggaatggccaccactgggaaggaggccgtgttagacgtcattcccacagacattcaccagagggcgccggtgatcttggggtcccccgacgacgtgctcgagttcctgaaggtgtatgagaagcactctgcccagtgagcacctgccctgcctgcatccggagaattgcctctacctggaccttttgtctcacacagcagtaccctgacctgctgtgcaccttacattcctagagagcagaaataaaaagcatgactatttccaccatcaaatgctgtagaatgcttggcactccctaaccaaatgctgtctccataatgccactggtgttaagatatattttgagtggatggaggagaaataaacttattcctccttaaaaaaaaaact

SEQ ID NO: 376520 - DNA, 1444 bp, Homo sapiens
gattcacccgccggcgcctggcctggcccagttgcaccacgagcgctgcggacactcggggcggcagtcggtctgtcagtcctcccgccaggtcccgcggcccgcacctgccgcccgcacctgcagctccgcacctgcggccagtgcctactgccctctcttgccgcccgcacctgcagccccgcacctgccgcttgcacctgcagccccgcgctctacccggttcaagcatggctgaccaggcgcccttcgacacggacgtcaacaccctgacccgcttcgtcatggaggagggcaggaaggcccgcggcacgggcgagttgacccagctgctcaactcgctctgcacagcagtcaaagccatctcttcggcggtgcgcaaggcgggcatcgcgcacctctatggcattgctggttctaccaacgtgacaggtgatcaagttaagaagctggacgtcctctccaacgacctggttatgaacatgttaaagtcatcctttgccacgtgtgttctcgtgtcagaagaagataaacacgccatcatagtggaaccggagaaaaggggtaaatatgtggtctgttttgatccccttgatggatcttccaacatcgattgccttgtgtccgttggaaccatttttggcatctatagaaagaaatcaactgatgagccttctgagaaggatgctctgcaaccaggccggaacctggtggcagccggctacgcactgtatggcagtgccaccatgctggtccttgccatggactgtggggtcaactgcttcatgctggacccggccatcggggagttcattttggtggacaaggatgtgaagataaaaaagaaagtgagtacatccagaggaagaagttccccccagataattcagctccttatggggcccggtatgtgggctccatggtggctgatgttcatcgcactctggtctacggagggatatttctgtaccccgctaacaagaagagccccaatggaaagctgagactgctgtacgaatgcaaccccatggcctacgtcatggagaaggctgggggaatggccaccactgggaaggaggccgtgttagacgtcattcccacagacattcaccagagggcgccggtgatcttggggtcccccgacgacgtgctcgagttcctgaaggtgtatgagaagcactctgcccagtgagcacctgccctgcctgcatccggagaattgcctctacctggaccttttgtctcacacagcagtaccctgacctgctgtgcaccttacattcctagagagcagaaataaaaagcatgactatttccaccatcaaatgctgtagaatgcttggcactccctaaccaaatgctgtctccataatgccactggtgttaagatatattttgagtggatggaggagaaataaacttattcctccttaaaaaaaaaact

SEQ ID NO: 376521 - DNA, 893 bp, Homo sapiens
ggtaacaaactttctcagcctttaaggtgttactaaatggtacagtttctgtaatgcctgcctcagccccataaccagaatcaaccataccctcgttggggcttctgtgggcaatctgacctattgtgagatgatgagaggctgtctccatttttccattttctatttattgggaacaggattctcatcacattttttagcacagccccaaatacataccttgtaggtgctcggtgaatggatgtggaatcaaagaaacttaggagacaccaagaaaactctctttcttattttctgcaatcctaattcttgctggtcttaacttgcaggataattcagctccttatggggcccggtatgtgggctccatggtggctgatgttcatcgcactctggtctacggagggatatttctgtaccccgctaacaagaagagccccaatggaaagctgagactgctgtacgaatgcaaccccatggcctacgtcatggagaaggctgggggaatggccaccactgggaaggaggccgtgttagacgtcattcccacagacattcaccagagggcgccggtgatcttggggtcccccgacgacgtgctcgagttcctgaaggtgtatgagaagcactctgcccagtgagcacctgccctgcctgcatccggagaattgcctctacctggaccttttgtctcacacagcagtaccctgacctgctgtgcaccttacattcctagagagcagaaataaaaagcatgactatttccaccatcaaatgctgtagaatgcttggcactccctaaccaaatgctgtctccataatgccactggtgttaagatatattttgagtggatggaggagaaataaacttattcctccttaaaaaaaaaact

SEQ ID NO: 376522 - DNA, 1679 bp, Homo sapiens
caaattattaaaaccacaatgagataccccttcacacatgccagaatggtgatgataaaaagacagacaataacagacattagaaaggatgtggagaaattgggtccttcataaaccactggtggaagtggaaaagagtgcagccaccttggaaaagaatttggcagttatcacatgttaaatacagcattaccctatggcccagcaaattccactcctaggtgtatacccaagaagaatgaagacataggtctgcacaataatttgtacatccatgtccgtagcagcattactcataatagccaaaaagtggaaacaacttaaatgcccaccaactgatgaatgcataagcaagatctggtatatccatacagatctattattgggtagtaacaagaatggggtagtaacaagaatgaagtactgacacatgatacaacatggatgaacttcaaaagtaaaggacgccatgcaccaagtgtcattcttggaaacgtgggagatttaggaaatgacattgaagaggaagaattctgttgaaatagtgattctcaacgtggggtccttggacagcaaggatgaggaaaaaacacagtcatccaaggagccagaagttatatgctgacaaaatgccaccgactactttagtggaagctgttgttgggatagggaatctgcaccctctagagaagcagggacttcagctgctgaggaagggctgtcagagttatccatgttattttttttcatttttgtgagtacggtgcctcctaaacaatcacatgaggatttgagactgttagaactcagtgttgttatccacacaaacggaaacattcattatttttaaaaaatgattgaaaatatcagatgaagtaaaaaattgacattaactgtattatagaaatgggaaagtatatccttttgtaatataagatgtattagaagcaaagaagggaaatgggcttcaaacaaaaataaataaatgtaaagatcagtttaattctgaagttaagtggcattttttcccctttctttccaaaataccgagctaaggttttcttgattgtgtttgactctctgcatctcaggagtgatggggattggaattcctgtccccaggttttctttgtatagcacctgtatgatgagaaagcatccagaacaaaaaaagcaatcaatcagtcattttccccctgctttggagcagttgggagtgggaagggaggaagagagtaagttagaggaagagaaatacagaagcttttagactcaacctgtttgtttgagcctaaagacatcttcaaaagcaaaggaatgcaggaaagagcagcaaaaactaagaaataggaaaagaaaggttgttattttcattgtttgaactaatctctgcagcactgagcaaccgtgaaagagcaattagtcttttcccaccttgttacaaggagggaaaaaagtagaaacagacaagaaaccaaggaagttacttttgatttgaaaatgctgttaatcacatagggatatttgggttttacaaacattgtgtatatggagacacatacacacaactcttcttttgttcactttcaaaagaagtcagagtatttaatttttagtttgggtgaacacattgagaacaacgatgtttaaggcaaatggagagcaatgataaggtgcta

SEQ ID NO: 376523 - DNA, 531 bp, Homo sapiens
gtaccgagctaatattttcttgattgtgtttgactctttccatctcgggagtgacaggtaaaggggttcccttgcccatgttttctttgtataacacctgtgcgataagaaagcatccagaaaaacaaccatgagtaacatttcatttcttgggactttttaaggatgaggaaaaaacacagtcatccaaggagccagaagttatatgctgacaaaatgccaccgactactttagtggaagctgttgttgggatagggaatctgcaccctctagagaagcagggacttcagctgctgaggaagggctgtcagagttatccatgttattttttttcatttttgtgagtacggtgcctcctaaacaatcacatgaggatttgagactgttagaactcagtgttgttatccacacaaacggaaacattcattatttttaaaaaatgattgaaaatatcagatgaagtaaaaaattgacattaactgtattatagaaatgggaatggtgttaggctagaagtagcccaaaggaaa

SEQ ID NO: 376524 - DNA, 885 bp, Homo sapiens
atataagatgtattagaagcaaagaagggaaatgggcttcatacaaaaataaataaatgtaaagatcagtttaattatgaagtaaaaaattgacattaactgtattatagaaatgggaaagtatatccttttgtaatataagatgtattagaagcaaagaagggaaatgggcttcaaacaaaaataaataaatgtaaagatcagtttaattctgaagttaagtggcattttttcccctttctttccaaaataccgagctaaggttttcttgattgtgtttgactctctgcatctcaggagtgatggggattggaattcctgtccccaggttttctttgtatagcacctgtatgatgagaaagcatccagaacaaaaaaagcaatcaatcagtcattttccccctgctttggagcagttgggagtgggaagggaggaagagagtaagttagaggaagagaaatacagaagcttttagactcaacctgtttgtttgagcctaaagacatcttcaaaagcaaaggaatgcaggaaagagcagcaaaaactaagaaataggaaaagaaaggttgttattttcattgtttgaactaatctctgcagcactgagcaaccgtgaaagagcaattagtcttttcccaccttgttacaaggagggaaaaaagtagaaacagacaagaaaccaaggaagttacttttgatttgaaaatgctgttaatcacatagggatatttgggttttacaaacattgtgtatatggagacacatacacacaactcttcttttgttcactttcaaaagaagtcagagtatttaatttttagtttgggtgaacacattgagaacaacgatgtttaaggcaaatggagagcaatgataaggtgcta

SEQ ID NO: 376525 - DNA, 533 bp, Homo sapiens
ttcgttttttaggtatccagtataattgattcattagaaatactgtttaacaaaggagagacgcattctgctgttgttgattttgaagcattaaatgttatcgtaaggctaattgaacaagccccaattcaaatgggagaagaggcagtgaggtgggcaaaactggtcatacctttagtggttcattcagcacaaaaggtacatttgcggggagcaactgctctggagatgggaatgccattattgcttcagaaacagcaagaaatagcatctattacggagcagcttatgactactgtgagtgttcttttatgtaagaattttctggatactgcatcggaaggttctgcactaagcttaaaattcagtctggtggccaggtacggtggctctcacctgtagtcccaaatgttgggatgacaggcgtgagccaccacacccagcccctaaaacctgggattttacttgcttaaaatgcagaagacttcgtggtaatgttcagtatgacacagtaactcgagtgtctcataaat

SEQ ID NO: 376526 - DNA, 9174 bp, Homo sapiens
accagaagcattaaatgttatcgtaaggctaattgaacaagccccaattcaaatgggagaagaggcagtgaggtgggcaaaactggtcatacctttagtggttcattcagcacaaaaggtacatttgcggggagcaactgctctggagatgggaatgccattattgcttcagaaacagcaagaaatagcatctattacggagcagcttatgactactaaattaatctcagaacttcagaagctatttatgagtaaaaatgagacttacgtgttaaaattatggcctttgtttgtcaaactacttggaaggaccttgcatcgaagtgggagtttcatcaattctctcttgcaactagaagaacttggatttcgtagtggagcacccatgattaaaaagatagcttttattgcttggaagagtttaatagataattttgctttaaatccagatatactatgtagtgcaaaaagactcaagttgttaatgcagcctttgagttccatccatgtgagaacagaaactctagcattaacaaaactagaagtctggtggtatttactgatgagacttggacctcatcttcctgctaattttgaacaggtttgtgtgcctctgattcaaagtacaataagcattgattctaatgcctcacctcagggcaattcgtgtcatgtagctacatctccaggtttaaatcctatgactcctgtacacaaaggtgcttcctccccgtacggagccccgggaactccccgaatgaacctgagttcgaatttaggtggaatggccacaatcccatccattcaacttttgggacttgaaatgttgcttcatttcttgtgggtccagaagccttgagttttgctaagcaaataaacttgtgctgagcttagagccattggaacatccgttaatcagcagcccttcctttttttccaaacatgcaaatacacttatcactgctgttcatgatagctttgttgcagttggaaaagatgcccccgatgtggttgtcagtgctatctggaaggagctaattagcttggtgaagtcagttactgaatcaggtaacaaaaaagagaaaccaggttctgaagttttgactctcttattaaagtctttggaaagcatagtaaagtctgaagtatttcctgtatcaaaaacgctggtcctcatggaaattacaattaaaggacttcctcagaaagtattaggttcaccagcatatcaggttgctaatatggatattcttaatggaactccagctttgttcttaattcaattaattttcaacaatttcttggaatgtggtgtatcagatgaaaggttctttctcagtttggaatcacttgtaggctgtgttctttctggtccaacttcaccactagctttcagtgactcagttttaaatgttattaatcaaaatgcaaagcagttggaaaataaggagcatctctggaaaatgtggagtgttatagtcaccccattaactgaattgattaatcagaccaatgaagtaaatcaaggtgatgccttagaacataattttagtgccatctatggtgcattgactttaccagtaaaccacattttttcagaacagagatttccagtggccaccatgaagactttgcttagaacttggtcagaattatatagagcatttgctcgttgtgctgctttggtggcaacagcagaagagaacttgtgctgtgaggaactttcttccaagataatgtccagtttggaagatgaaggcttttctaatttgttgttcgtggatagaattatttatattattactgtaatggttgattgcattgacttctcaccatataatattaaatatcagcccaaagttaaatcaccacagagaccttcagattggtccaaaaagaagaatgagcccctagggaaattgacttctttatttaaacttattgtgaaagtgatctattctttccacacactgagcttcaaggaagcacattctgataccctcttcactattggcaactcaatcaccggcattatttccagtgtacttgggcatatttctttgccttctatgatccgaaaaatatttgcaactttaacaagacctctggcattattttatgaaaactcaaagcttgatgaagttcctaaagtatatagttgtctgaacaacaagttagaaaagctactgggagaaattattgcttgtctgcaattcagctacaccggaacttatgatagtgaacttcttgaacaactctccccactattatgcataatatttctgcacaagaataaacagattcgaaaacagagtgctcagttctggaatgccacttttgccaaagtgatgatgttggtttatcctgaagagttaaaaccagtactaacacaagccaaacaaaaatttctgctcctgttgcctggtttggaaactgttgaaatgatggaggaatccagtggaccatattctgatggaacagaaaattcacaactaaatgtgaagataagtggcatggagagaaaatcaaatggaaaaagagattcatttttggcacaaacaaagaataaaaaagaaaatatgaaaccagcagccaaactgaaacttgaatcttcgtctttaaaagtaaagggtgaaattcttttggaagaggaaaagtctactgactttgtgtttatacctccagaaggaaaagatgcaaaggaaagaatattaactgatcatcaaaaagaagttctcaaaacaaagcggtgtgatattcctgccatgtataataatctggatgtttcccaagataccttatttactcagtatagtcaggaagagcctatggaaattcctactttaaccagaaaaccaaaggaggattctaagatgatgattacggaggagcaaatggacagtgacattgtcattcctcaagatgtcacggaagactgtggtatggctgaacatcttgaaaagtcctccctttcgaataatgagtgtggttctcttgacaaaaccagtccagaaatgtcaaacagtaataatgatgaaagaaaaaaagctttaatttcatcaaggaaaacatcaactgaatgtgcatctagtacagaaaattctttcgttgtcagcagtagttcagtttctaataccactgttgctggaactcccccataccctacaagtcggaggcaaacctttattactttggagaagtttgatggttcagaaaatagaccttttagtccatcccccttgaataatatttcatcaactgttacagtgaaaaataaccaggaaaccatgattaaaacagattttctaccaaaagcaaagcaaagagaagggactttttcaaaatctgattctgaaaaaatagtgaatggaactaagagatcaagccggagagctggtaaagctgaacaaacagggaataaaaggtctaagcccttaatgagatctgagccggagaaaaatactgaggaatctgttgaaggcattgtagtcttagaaaataacccacctggtttgcttaatcaaacagaatgtgtgtcagataatcaggttcatctttctgaatctacaatggagcatgacaatacaaagcttaaagcagcaacagtggaaaatgctgtattattggaaactaatactgtagaggagaaaaatgtagaaattaatttggaatccaaagagaatacacccccagtagtaatatcagcagatcaaatggtaaatgaggatagtcaggttcagataactccaaatcagaaaacccttagacggtcttcaaggcgacgttcagaagtagtagagtctaccactgaaagccaagataaggaaaatagtcatcaaaaaaaggaacgacgtaaggaagaagaaaaacctcttcagaagagtccattgcatataaaagatgatgtgttacctaaacaaaaactgattgctgaacaaactctacaggagaatttaattgagaaaggaagtaatttacatgagaagactcttggggaaactagtgctaatgcagaaactgaacaaaataaaaaaaaggcagaccctgagaacattaagtctgagggggatggtacccaggacattgtagataagtcctctgagaaactagtcagaggccgaacacggtatcaaactagaagagcatctcagggtttgctttccagcattgaaaactcagaatctgatagttcggaggcaaaagaagaaggttctaggaagaagagatctggaaaatggaaaaacaaaagcaatgaaagtgttgacattcaagatcaagaagagaaagtggtgaaacaggaatgtataaaagctgaaaatcagtcacatgattataaagcaacttctgaagaagatgtaagcataaaatctccgatttgcgaaaaacaagatgaaagtaatactgtaatatgtcaggattctacagtaacttcagatttgttgcaagttcctgatgatttaccaaatgtgtgtgaggaaaaaaatgaaactagcaaatatgcagaatattcctttacaagtctacctgtgccagaatcaaatctaaggactagaaatgccattaagagattacataagcgagactcttttgataattgtagtttgggagaatcctcaaaaatagggatatcagatatttcttcgctttcagaaaaaacttttcaaacacttgaatgccaacacaagagaagtaggagggtgaggagatctaaaggttgtgattgctgtggggaaaaatcacaacctcaggaaaagtcactcattgggttaaagaatacagaaaataatgacgtagagattagtgaaacaaaaaaggcagatgtgcaagcacctgtaagcccatcagaaacttctcaagctaatccatattctgaaggacaatttttagatgaacatcatagtgtgaattttcatttgggtctcaaagaggataatgatactattaatgattcattaattgtttctgaaaccaaatcaaaagaaaacactatgcaagaatctcttccttctggaatagtaaactttagagaggaaatttgtgatatggattctagtgaagcaatgtctcttgaaagccaggagtcacctaatgaaaattttaaaactgttggcccgtgtttaggagactcgaaaaatgtttcacaggaatctttggagacaaaagaagaaaaaccagaagaaaccccaaaaatggaactgagtctagagaatgttactgttgaaggaaatgcatgtaaagtaacagaatccaatctagagaaagcaaaaactatggaattgaatgtaggaaatgaagctagctttcatggacaagagagaaccaaaactggtatttctgaagaagcagcaatagaagaaaataaaagaaatgatgactctgaagcagacacagctaaactgaatgccaaagaagtagcaactgaggaatttaattcagatattagtctttctgataatactacacctgtaaaattgaatgctcaaactgagatttctgaacaaacagcagctggggaactagatggaggaaatgatgtatctgatctacactcatctgaagaaacgaataccaaaatgaaaaattatgaagaaatgatgatcggcgaggcaatggctgaaactggccatgatggtgaaacagagaatgagggcataactaccaaaacctcaaagcctgatgaagctgaaacaaacatgttgactgcagaaatggacaactttgtttgtgacacagttgaaatgagcactgaagaaggaatcattgacgctaataaaactgaaacaaatactgagtatagtaaatctgaagaaaaattagataacaatcaaatggtaatggaaagtgatattttacaggaagatcaccatacttcacagaaagtggaggaaccatcacagtgtctggcatctggaacagctatctctgagctaataatagaagacaataatgcatctcctcaaaaactaagggaacttgatccttcacttgtgtcagcaaatgacagtcctagtggcatgcagacacgctgtgtctggtctcctttggcttctccgtctacgagcattttaaagagaggactaaaaagatcccaagaagatgaaatctcatcacctgttaataaggttcgccgtgtctcctttgcagatccaatataccaagcaggattggcagatgacattgatagacggtgctctattgttaggtcccattcttccaatagttctcccataggaaaaagtgttaaaacttctcctactacacaatctaagcataataccacttcagccaaaggatttctgtccccaggatcacgtagccctaaatttaagagctcaaagaagtgtttaatttcagaaatggccaaagaatccataccatgcccaacagaaagtgtttacccaccattggtgaactgtgtggcaccagttgacatcattttacctcagattacatcaaacatgtgggcaagaggcctgggacaactcattagagctaagaatataaaaactattggtgatttgagtactcttacagcatctgaaataaaaactcttcctatccgttctccaaaagtgtccaatgtaaaaaaggctctcagaatatatcatgagcagcaggtgaagactcgtggactagaagagattccagtttttgatatttctgaaaaaacagtaaatggaatagaaaataaatctttgtcacctgatgaagaaagacttgtctcagatataattgatcctgttgctttagaaattccattatccaaaaaccttgtggcacagattagtgctcttgctcttcagctggattcagaagatcttcataattattcaggaagccaactatttgaaatgcacgagaaactaagttgtatggcaaactctgtaataaaaaatctacagtcacgttggagatcaccatcccatgaaaattctatttagtattttcagagaaaattgaaggtttttttaaacatcactggatttcttgattgaggaaacaagttctgaaataatagcacaatttcaaagaagagactctttgcaaagttgataacatttcaaaccctgaaggacagtgacttattatccttcctttctccaaagaacagttaaaaccaaatgtgttatggtaagctgtaaataccgttggaataaaagataaccgttcatcttacctaaaaaattgaagacaatattttccattgttgatgtcacaagtaagaaaaaaactctaacttttgtactctacttgtagcagagggaatatttttggccacagtgtgccaatttataattgtagataaagctgaatttactgggcagcaagcttatatgctgatagaagttgatgcactgagaagtgatgagttgaagagaatggaaaaggcagattgagctggaattttaatgcatagtacatttagtagagagacaagctgtcctatatactcctgtatacttcagaaatagctgatagcctatagtctctgagagctattctgtacatagcacagtattataattgatgttcataaataccctgagagattatgttaaaatacattattaatactcccacaaaagcagtaagttaataagtatttccaacaaaaggcagctttgtttcttaaacggataaacaacatataactaggaagatcatcttcaaaataaagtgtcatggaactgaaaatagagtatagtctaacaattattttgatacactattgaatagctaacaagtgtctaaagaattttttatttttatagaataggaagtttctaaaagaaaacaattaagagcaaaattggttttgagtatagaaactgaaggatggcagtcttaactcctaagttttttacagagcacagattggtaaactagcatgccacctgttttttgtactatctgtgagctgagactggtttttacattttttaatggtgaaaaaagtcaaaagaaggaggacattttgtgacacatgaaaacatattaaattaaaatttcagtatccagaaataaagttttattggaacagctgtgcttattgtctttagctgctttcctggtacagtggctgagtttagtagtatagcagagtctgtatggcttccaacagtcaaaatactgcctggccttttaaagagtttgtcaatcccttttatggaggaaggttttgctcatgcatggcatgttagtcaatttagttatttgcttctagctggcagaatgtggtcttgattacttaatttctgttacccctgtgttttccagaatggcttctcctgattttacttacgtgttttactattgctcaaattacagatactaggaaacactactactttataagtacacttctttttcctacttaaactctcaaactacagttacgtatttgccatgatgttaagggaccttgatggtctgtgaattatcagttgctttctgcactacctcctgtagatagacctgactgatagcacttacaaaaagactgatagatgccaaatcagtcatttattaaccctctaatattgttgtcccgatcatttggtaaacgctaagagagcttagttttacattcacaaagtatttgtatttgataagtcttaaaaatgatttaagttgaagcctaacagaagtacttgttcattcctcagttacctgcaaataatggaaataatggtgcagtcagttttatttgattgtgtaatgctttatactaggggtctcaaacccctgggtggcattagattcttacaggagcgtgaaccctattgtgaactgcacatgcaagagatctaggttgtgcgctcattatgagaatctaatacccgatgatctgaggtggaacagtctcatcctgaaaccatctaccccaacacctgtgtctgtggaaattgtctccacgaaaccggtccctgttgaaaaaaggttaggggaccactgctttatacagtgtttgaagtaggcacacttacagttactatttctggttctttatgactgttgaggggggcagaattctatgtttgattcacagtaaaacttttcatgaatcattgagggttaactgttatcacttgccaatggaaactggatattgaaacatttttttaagaaatgcacttttacctgaaataaaactataaaaactaaaaaaaaata

SEQ ID NO: 376527 - DNA, 9096 bp, Homo sapiens
accagaagcattaaatgttatcgtaaggctaattgaacaagccccaattcaaatgggagaagaggcagtgaggtgggcaaaactggtcatacctttagtggttcattcagcacaaaaggtacatttgcggggagcaactgctctggagatgggaatgccattattgcttcagaaacagcaagaaatagcatctattacggagcagcttatgactactaaattaatctcagaacttcagaagctatttatgagtaaaaatgagacttacgtgttaaaattatggcctttgtttgtcaaactacttggaaggaccttgcatcgaagtgggagtttcatcaattctctcttgcaactagaagaacttggatttcgtagtggagcacccatgattaaaaagatagcttttattgcttggaagagtttaatagataattttgctttaaatccagatatactatgtagtgcaaaaagactcaagttgttaatgcagcctttgagttccatccatgtgagaacagaaactctagcattaacaaaactagaagtctggtggtatttactgatgagacttggacctcatcttcctgctaattttgaacaggtttgtgtgcctctgattcaaagtacaataagcattgattctaatgcctcacctcagggcaattcgtgtcatgtagctacatctccaggtttaaatcctatgactcctgtacacaaaggtgcttcctccccgtacggagccccgggaactccccgaatgaacctgagttcgaatttaggtggaatggccacaatcccatccattcaacttttgggacttgaaatgttgcttcatttcttgtgggtccagaagccttgagttttgctaagcaaataaacttgtgctgagcttagagccattggaacatccgttaatcagcagcccttcctttttttccaaacatgcaaatacacttatcactgctgttcatgatagctttgttgcagttggaaaagatgcccccgatgtggttgtcagtgctatctggaaggagctaattagcttggtgaagtcagttactgaatcaggtaacaaaaaagagaaaccaggttctgaagttttgactctcttattaaagtctttggaaagcatagtaaagtctgaagtatttcctgtatcaaaaacgctggtcctcatggaaattacaattaaaggacttcctcagaaagtattaggttcaccagcatatcaggttgctaatatggatattcttaatggaactccagctttgttcttaattcaattaattttcaacaatttcttggaatgtggtgtatcagatgaaaggttctttctcagtttggaatcacttgtaggctgtgttctttctggtccaacttcaccactagctttcagtgactcagttttaaatgttattaatcaaaatgcaaagcagttggaaaataaggagcatctctggaaaatgtggagtgttatagtcaccccattaactgaattgattaatcagaccaatgaagtaaatcaaggtgatgccttagaacataattttagtgccatctatggtgcattgactttaccagtaaaccacattttttcagaacagagatttccagtggccaccatgaagactttgcttagaacttggtcagaattatatagagcatttgctcgttgtgctgctttggtggcaacagcagaagagaacttgtgctgtgaggaactttcttccaagataatgtccagtttggaagatgaaggcttttctaatttgttgttcgtggatagaattatttatattattactgtaatggttgattgcattgacttctcaccatataatattaaatatcagcccaaagttaaatcaccacagagaccttcagattggtccaaaaagaagaatgagcccctagggaaattgacttctttatttaaacttattgtgaaagtgatctattctttccacacactgagcttcaaggaagcacattctgataccctcttcactattggcaactcaatcaccggcattatttccagtgtacttgggcatatttctttgccttctatgatccgaaaaatatttgcaactttaacaagacctctggcattattttatgaaaactcaaagcttgatgaagttcctaaagtatatagttgtctgaacaacaagttagaaaagctactgggagaaattattgcttgtctgcaattcagctacaccggaacttatgatagtgaacttcttgaacaactctccccactattatgcataatatttctgcacaagaataaacagattcgaaaacagagtgctcagttctggaatgccacttttgccaaagtgatgatgttggtttatcctgaagagttaaaaccagtactaacacaagccaaacaaaaatttctgctcctgttgcctggtttggaaactgttgaaatgatggaggaatccagtggaccatattctgatggaacagaaaattcacaactaaatgtgaagataagtggcatggagagaaaatcaaatggaaaaagagattcatttttggcacaaacaaagaataaaaaagaaaatatgaaaccagcagccaaactgaaacttgaatcttcgtctttaaaagtaaagggtgaaattcttttggaagaggaaaagtctactgactttgtgtttatacctccagaaggaaaagatgcaaaggaaagaatattaactgatcatcaaaaagaagttctcaaaacaaagcggtgtgatattcctgccatgtataataatctggatgtttcccaagataccttatttactcagtatagtcaggaagagcctatggaaattcctactttaaccagaaaaccaaaggaggattctaagatgatgattacggaggagcaaatggacagtgacattgtcattcctcaagatgtcacggaagactgtggtatggctgaacatcttgaaaagtcctccctttcgaataatgagtgtggttctcttgacaaaaccagtccagaaatgtcaaacagtaataatgatgaaagaaaaaaagctttaatttcatcaaggaaaacatcaactgaatgtgcatctagtacagaaaattctttcgttgtcagcagtagttcagtttctaataccactgttgctggaactcccccataccctacaagtcggaggcaaacctttattactttggagaagtttgatggttcagaaaatagaccttttagtccatcccccttgaataatatttcatcaactgttacagtgaaaaataaccaggaaaccatgattaaaacagattttctaccaaaagcaaagcaaagagaagggactttttcaaaatctgattctgaaaaaatagtgaatggaactaagagatcaagccggagagctggtaaagctgaacaaacagggaataaaaggtctaagcccttaatgagatctgagccggagaaaaatactgaggaatctgttgaaggcattgtagtcttagaaaataacccacctggtttgcttaatcaaacagaatgtgtgtcagataatcaggttcatctttctgaatctacaatggagcatgacaatacaaagcttaaagcagcaacagtggaaaatgctgtattattggaaactaatactgtagaggagaaaaatgtagaaattaatttggaatccaaagagaatacacccccagtagtaatatcagcagatcaaatggtaaatgaggatagtcaggttcagataactccaaatcagaaaacccttagacggtcttcaaggcgacgttcagaagtagtagagtctaccactgaaagccaagataaggaaaatagtcatcaaaaaaaggaacgacgtaaggaagaagaaaaacctcttcagaagagtccattgcatataaaagatgatgtgttacctaaacaaaaactgattgctgaacaaactctacaggagaatttaattgagaaaggaagtaatttacatgagaagactcttggggaaactagtgctaatgcagaaactgaacaaaataaaaaaaaggcagaccctgagaacattaagtctgagggggatggtacccaggacattgtagataagtcctctgagaaactagtcagaggccgaacacggtatcaaactagaagagcatctcagggtttgctttccagcattgaaaactcagaatctgatagttcggaggcaaaagaagaaggttctaggaagaagagatctggaaaatggaaaaacaaaagcaatgaaagtgttgacattcaagatcaagaagagaaagtggtgaaacaggaatgtataaaagctgaaaatcagtcacatgattataaagcaacttctgaagaagatgtaagcataaaatctccgatttgcgaaaaacaagatgaaagtaatactgtaatatgtcaggattctacagtaacttcagatttgttgcaagttcctgatgatttaccaaatgtgtgtgaggaaaaaaatgaaactagcaaatatgcagaatattcctttacaagtctacctgtgccagaatcaaatctaaggactagaaatgccattaagagattacataagcgagactcttttgataattgtagtttgggagaatcctcaaaaatagggatatcagatatttcttcgctttcagaaaaaacttttcaaacacttgaatgccaacacaagagaagtaggagggtgaggagatctaaaggttgtgattgctgtggggaaaaatcacaacctcaggaaaagtcactcattgggttaaagaatacagaaaataatgacgtagagattagtgaaacaaaaaaggcagatgtgcaagcacctgtaagcccatcagaaacttctcaagctaatccatattctgaaggacaatttttagatgaacatcatagtgtgaattttcatttgggtctcaaagaggataatgatactattaatgattcattaattgtttctgaaaccaaatcaaaagaaaacactatgcaagaatctcttccttctggaatagtaaactttagagaggaaatttgtgatatggattctagtgaagcaatgtctcttgaaagccaggagtcacctaatgaaaattttaaaactgttggcccgtgtttaggagactcgaaaaatgtttcacaggaatctttggagacaaaagaagaaaaaccagaagaaaccccaaaaatggaactgagtctagagaatgttactgttgaaggaaatgcatgtaaagtaacagaatccaatctagagaaagcaaaaactatggaattgaatgtaggaaatgaagctagctttcatggacaagagagaaccaaaactggtatttctgaagaagcagcaatagaagaaaataaaagaaatgatgactctgaagcagacacagctaaactgaatgccaaagaagtagcaactgaggaatttaattcagatattagtctttctgataatactacacctgtaaaattgaatgctcaaactgagatttctgaacaaacagcagctggggaactagatggaggaaatgatgtatctgatctacactcatctgaagaaacgaataccaaaatgaaaaattatgaagaaatgatgatcggcgaggcaatggctgaaactggccatgatggtgaaacagagaatgagggcataactaccaaaacctcaaagcctgatgaagctgaaacaaacatgttgactgcagaaatggacaactttgtttgtgacacagttgaaatgagcactgaagaaggaatcattgacgctaataaaactgaaacaaatactgagtatagtaaatctgaagaaaaattagataacaatcaaatggtaatggaaagtgatattttacaggaagatcaccatacttcacagaaagtggaggaaccatcacagtgtctggcatctggaacagctatctctgagctaataatagaagacaataatgcatctcctcaaaaactaagggaacttgatccttcacttgtgtcagcaaatgacagtcctagtggcatgcagacacgctgtgtctggtctcctttggcttctccgtctacgagcattttaaagagaggactaaaaagatcccaagaagatgaaatctcatcacctgttaataaggttcgccgtgtctcctttgcagatccaatataccaagcaggattggcagatgacattgatagacggtgctctattgttaggtcccattcttccaatagttctcccataggaaaaagtgttaaaacttctcctactacacaatctaagatttcagaaatggccaaagaatccataccatgcccaacagaaagtgtttacccaccattggtgaactgtgtggcaccagttgacatcattttacctcagattacatcaaacatgtgggcaagaggcctgggacaactcattagagctaagaatataaaaactattggtgatttgagtactcttacagcatctgaaataaaaactcttcctatccgttctccaaaagtgtccaatgtaaaaaaggctctcagaatatatcatgagcagcaggtgaagactcgtggactagaagagattccagtttttgatatttctgaaaaaacagtaaatggaatagaaaataaatctttgtcacctgatgaagaaagacttgtctcagatataattgatcctgttgctttagaaattccattatccaaaaaccttgtggcacagattagtgctcttgctcttcagctggattcagaagatcttcataattattcaggaagccaactatttgaaatgcacgagaaactaagttgtatggcaaactctgtaataaaaaatctacagtcacgttggagatcaccatcccatgaaaattctatttagtattttcagagaaaattgaaggtttttttaaacatcactggatttcttgattgaggaaacaagttctgaaataatagcacaatttcaaagaagagactctttgcaaagttgataacatttcaaaccctgaaggacagtgacttattatccttcctttctccaaagaacagttaaaaccaaatgtgttatggtaagctgtaaataccgttggaataaaagataaccgttcatcttacctaaaaaattgaagacaatattttccattgttgatgtcacaagtaagaaaaaaactctaacttttgtactctacttgtagcagagggaatatttttggccacagtgtgccaatttataattgtagataaagctgaatttactgggcagcaagcttatatgctgatagaagttgatgcactgagaagtgatgagttgaagagaatggaaaaggcagattgagctggaattttaatgcatagtacatttagtagagagacaagctgtcctatatactcctgtatacttcagaaatagctgatagcctatagtctctgagagctattctgtacatagcacagtattataattgatgttcataaataccctgagagattatgttaaaatacattattaatactcccacaaaagcagtaagttaataagtatttccaacaaaaggcagctttgtttcttaaacggataaacaacatataactaggaagatcatcttcaaaataaagtgtcatggaactgaaaatagagtatagtctaacaattattttgatacactattgaatagctaacaagtgtctaaagaattttttatttttatagaataggaagtttctaaaagaaaacaattaagagcaaaattggttttgagtatagaaactgaaggatggcagtcttaactcctaagttttttacagagcacagattggtaaactagcatgccacctgttttttgtactatctgtgagctgagactggtttttacattttttaatggtgaaaaaagtcaaaagaaggaggacattttgtgacacatgaaaacatattaaattaaaatttcagtatccagaaataaagttttattggaacagctgtgcttattgtctttagctgctttcctggtacagtggctgagtttagtagtatagcagagtctgtatggcttccaacagtcaaaatactgcctggccttttaaagagtttgtcaatcccttttatggaggaaggttttgctcatgcatggcatgttagtcaatttagttatttgcttctagctggcagaatgtggtcttgattacttaatttctgttacccctgtgttttccagaatggcttctcctgattttacttacgtgttttactattgctcaaattacagatactaggaaacactactactttataagtacacttctttttcctacttaaactctcaaactacagttacgtatttgccatgatgttaagggaccttgatggtctgtgaattatcagttgctttctgcactacctcctgtagatagacctgactgatagcacttacaaaaagactgatagatgccaaatcagtcatttattaaccctctaatattgttgtcccgatcatttggtaaacgctaagagagcttagttttacattcacaaagtatttgtatttgataagtcttaaaaatgatttaagttgaagcctaacagaagtacttgttcattcctcagttacctgcaaataatggaaataatggtgcagtcagttttatttgattgtgtaatgctttatactaggggtctcaaacccctgggtggcattagattcttacaggagcgtgaaccctattgtgaactgcacatgcaagagatctaggttgtgcgctcattatgagaatctaatacccgatgatctgaggtggaacagtctcatcctgaaaccatctaccccaacacctgtgtctgtggaaattgtctccacgaaaccggtccctgttgaaaaaaggttaggggaccactgctttatacagtgtttgaagtaggcacacttacagttactatttctggttctttatgactgttgaggggggcagaattctatgtttgattcacagtaaaacttttcatgaatcattgagggttaactgttatcacttgccaatggaaactggatattgaaacatttttttaagaaatgcacttttacctgaaataaaactataaaaactaaaaaaaaata

SEQ ID NO: 376528 - DNA, 8707 bp, Homo sapiens
accagaagcattaaatgttatcgtaaggctaattgaacaagccccaattcaaatgggagaagaggcagtgaggtgggcaaaactggtcatacctttagtggttcattcagcacaaaaggtacatttgcggggagcaactgctctggagatgggaatgccattattgcttcagaaacagcaagaaatagcatctattacggagcagcttatgactactaaattaatctcagaacttcagaagctatttatgagtaaaaatgagacttacgtgttaaaattatggcctttgtttgtcaaactacttggaaggaccttgcatcgaagtgggagtttcatcaattctctcttgcaactagaagaacttggatttcgtagtggagcacccatgattaaaaagatagcttttattgcttggaagagtttaatagataattttgctttaaatccagatatactatgtagtgcaaaaagactcaagttgttaatgcagcctttgagttccatccatgtgagaacagaaactctagcattaacaaaactagaagtctggtggtatttactgatgagacttggacctcatcttcctgctaattttgaacaggtttgtgtgcctctgattcaaagtacaataagcattgattctaatgcctcacctcagggcaattcgtgtcatgtagctacatctccaggtttaaatcctatgactcctgtacacaaaggtgcttcctccccgtacggagccccgggaactccccgaatgaacctgagttcgaatttaggtggaatggccacaatcccatccattcaacttttgggacttgaaatgttgcttcatttcttgtgggtccagaagccttgagttttgctaagcaaataaacttgtgctgagcttagagccattggaacatccgttaatcagcagcccttcctttttttccaaacatgcaaatacacttatcactgctgttcatgatagctttgttgcagttggaaaagatgcccccgatgtggttgtcagtgctatctggaaggagctaattagcttggtgaagtcagttactgaatcaggtaacaaaaaagagaaaccaggttctgaagttttgactctcttattaaagtctttggaaagcatagtaaagtctgaagtatttcctgtatcaaaaacgctggtcctcatggaaattacaattaaaggacttcctcagaaagtattaggttcaccagcatatcaggttgctaatatggatattcttaatggaactccagctttgttcttaattcaattaattttcaacaatttcttggaatgtggtgtatcagatgaaaggttctttctcagtttggaatcacttgtaggctgtgttctttctggtccaacttcaccactagctttcagtgactcagttttaaatgttattaatcaaaatgcaaagcagttggaaaataaggagcatctctggaaaatgtggagtgttatagtcaccccattaactgaattgattaatcagaccaatgaagtaaatcaaggtgatgccttagaacataattttagtgccatctatggtgcattgactttaccagtaaaccacattttttcagaacagagatttccagtggccaccatgaagactttgcttagaacttggtcagaattatatagagcatttgctcgttgtgctgctttggtggcaacagcagaagagaacttgtgctgtgaggaactttcttccaagataatgtccagtttggaagatgaaggcttttctaatttgttgttcgtggatagaattatttatattattactgtaatggttgattgcattgacttctcaccatataatattaaatatcagcccaaagttaaatcaccacagagaccttcagattggtccaaaaagaagaatgagcccctagggaaattgacttctttatttaaacttattgtgaaagtgatctattctttccacacactgagcttcaaggaagcacattctgataccctcttcactattggcaactcaatcaccggcattatttccagtgtacttgggcatatttctttgccttctatgatccgaaaaatatttgcaactttaacaagacctctggcattattttatgaaaactcaaagcttgatgaagttcctaaagtatatagttgtctgaacaacaagttagaaaagctactgggagaaattattgcttgtctgcaattcagctacaccggaacttatgatagtgaacttcttgaacaactctccccactattatgcataatatttctgcacaagaataaacagattcgaaaacagagtgctcagttctggaatgccacttttgccaaagtgatgatgttggtttatcctgaagagttaaaaccagtactaacacaagccaaacaaaaatttctgctcctgttgcctggtttggaaactgttgaaatgatggaggaatccagtggaccatattctgatggaacagaaaattcacaactaaatgtgaagataagtggcatggagagaaaatcaaatggaaaaagagattcatttttggcacaaacaaagaataaaaaagaaaatatgaaaccagcagccaaactgaaacttgaatcttcgtctttaaaagtaaagggtgaaattcttttggaagaggaaaagtctactgactttgtgtttatacctccagaaggaaaagatgcaaaggaaagaatattaactgatcatcaaaaagaagttctcaaaacaaagcggtgtgatattcctgccatgtataataatctggatgtttcccaagataccttatttactcagtatagtcaggaagagcctatggaaattcctactttaaccagaaaaccaaaggaggattctaagatgatgattacggaggagcaaatggacagtgacattgtcattcctcaagatgtcacggaagactgtggtatggctgaacatcttgaaaagtcctccctttcgaataatgagtgtggttctcttgacaaaaccagtccagaaatgtcaaacagtaataatgatgaaagaaaaaaagctttaatttcatcaaggaaaacatcaactgaatgtgcatctagtacagaaaattctttcgttgtcagcagtagttcagtttctaataccactgttgctggaactcccccataccctacaagtcggaggcaaacctttattactttggagaagtttgatggttcagaaaatagaccttttagtccatcccccttgaataatatttcatcaactgttacagtgaaaaataaccaggaaaccatgattaaaacagattttctaccaaaagcaaagcaaagagaagggactttttcaaaatctgattctgaaaaaatagtgaatggaactaagagatcaagccggagagctggtaaagctgaacaaacagggaataaaaggtctaagcccttaatgagatctgagccggagaaaaatactgaggaatctgttgaaggcattgtagtcttagaaaataacccacctggtttgcttaatcaaacagaatgtgtgtcagataatcaggttcatctttctgaatctacaatggagcatgacaatacaaagcttaaagcagcaacagtggaaaatgctgtattattggaaactaatactgtagaggagaaaaatgtagaaattaatttggaatccaaagagaatacacccccagtagtaatatcagcagatcaaatggtaaatgaggatagtcaggttcagataactccaaatcagaaaacccttagacggtcttcaaggcgacgttcagaagtagtagagtctaccactgaaagccaagataaggaaaatagtcatcaaaaaaaggaacgacgtaaggaagaagaaaaacctcttcagaagagtccattgcatataaaagatgatgtgttacctaaacaaaaactgattgctgaacaaactctacaggagaatttaattgagaaaggaagtaatttacatgagaagactcttggggaaactagtgctaatgcagaaactgaacaaaataaaaaaaaggcagaccctgagaacattaagtctgagggggatggtacccaggacattgtagataagtcctctgagaaactagtcagaggccgaacacggtatcaaactagaagagcatctcagggtttgctttccagcattgaaaactcagaatctgatagttcggaggcaaaagaagaaggttctaggaagaagagatctggaaaatggaaaaacaaaagcaatgaaagtgttgacattcaagatcaagaagagaaagtggtgaaacaggaatgtataaaagctgaaaatcagtcacatgattataaagcaacttctgaagaagatgtaagcataaaatctccgatttgcgaaaaacaagatgaaagtaatactgtaatatgtcaggattctacagtaacttcagatttgttgcaagttcctgatgatttaccaaatgtgtgtgaggaaaaaaatgaaactagcaaatatgcagaatattcctttacaagtctacctgtgccagaatcaaatctaaggactagaaatgccattaagagattacataagcgagactcttttgataattgtagtttgggagaatcctcaaaaatagggatatcagatatttcttcgctttcagaaaaaacttttcaaacacttgaatgccaacacaagagaagtaggagggtgaggagatctaaaggttgtgattgctgtggggaaaaatcacaacctcaggaaaagtcactcattgggttaaagaatacagaaaataatgacgtagagattagtgaaacaaaaaaggcagatgtgcaagcacctgtaagcccatcagaaacttctcaagctaatccatattctgaaggacaatttttagatgaacatcatagtgtgaattttcatttgggtctcaaagaggataatgatactattaatgattcattaattgtttctgaaaccaaatcaaaagaaaacactatgcaagaatctcttccttctggaatagtaaactttagagaggaaatttgtgatatggattctagtgaagcaatgtctcttgaaagccaggagtcacctaatgaaaattttaaaactgttggcccgtgtttaggagactcgaaaaatgtttcacaggaatctttggagacaaaagaagaaaaaccagaagaaaccccaaaaatggaactgagtctagagaatgttactgttgaaggaaatgcatgtaaagtaacagaatccaatctagagaaagcaaaaactatggaattgaatgtaggaaatgaagctagctttcatggacaagagagaaccaaaactggtatttctgaagaagcagcaatagaagaaaataaaagaaatgatgactctgaagcagacacagctaaactgaatgccaaagaagtagcaactgaggaatttaattcagatattagtctttctgataatactacacctgtaaaattgaatgctcaaactgagatttctgaacaaacagcagctggggaactagatggaggaaatgatgtatctgatctacactcatctgaagaaacgaataccaaaatgaaaaattatgaagaaatgatgatcggcgaggcaatggctgaaactggccatgatggtgaaacagagaatgagggcataactaccaaaacctcaaagcctgatgaagctgaaacaaacatgttgactgcagaaatggacaactttgtttgtgacacagttgaaatgagcactgaagaaggaatcattgacgctaataaaactgaaacaaatactgagtatagtaaatctgaagaaaaattagataacaatcaaatggtaatggaaagtgatattttacaggaagatcaccatacttcacagaaagtggaggaaccatcacagtgtctggcatctggaacagctatctctgagctaataatagaagacaataatgcatctcctcaaaaactaagggaacttgatccttcacttgtgtcagcaaatgacagtcctagtggcatgcagacacgctgtgtctggtctcctttggcttctccgtctacgagcattttaaagagaggactaaaaagatcccaagaagatgaaatctcatcacctgttaataaggttcgccgtgtctcctttgcagatccaatataccaagcaggattggcagatgacattgatagacggtgctctattgttaggtcccattcttccaatagttctcccataggaaaaagtgttaaaacttctcctactacacaatctaagatttcagaaatggccaaagaatccataccatgcccaacagaaagtgtttacccaccattggtgaactgtgtggcaccagttgacatcattttacctcagattacatcaaacatgtgggcaagaggcctgggacaactcattagagctaagaatataaaaactattggtgatttgagtactcttacagcatctgaaataaaaactcttcctatccgttctccaaaagtgtccaatgtaaaaaaggctctcagaatatatcatgagcagcaggtgaagactcgtggactagaagagattccagtttttgatatttctgaaaaaacagtaaatggaatagaaaataaatctttgtcacctgatgaagaaagacttgtctcagatataattgatcctgttgctttagaaattccattatccaaaaaccttgtggcacagattagtgctcttgctcttcagctggattcagaagatcttcataattattcaggaagccaactatttgaaatgcacgagaaactaagttgtatggcaaactctgtaataaaaaatctacagtcacgttggagatcaccatcccatgaaaattctatttagtattttcagagaaaattgaaggtttttttaaacatcactggatttcttgattgaggaaacaagttctgaaataatagcacaatttcaaagaagagactctttgcaaagttgataacatttcaaaccctgaaggacagtgacttattatgtaagttcaattttgtaagttcattatgtaagatccttttttttttcataatatgtattcttggctgctatgcgtggtttttcaggaaatttaattatcttactgagatgtgaaagcaaaactagtaacagaacttacattttatttcatgctttcttaaacccgtgcatattctggtgaaacatgtaaaatactttaagtaaaattgaacatttttatttgaatttttgctgaactgataaaggtgtttatatttttgtttgtttgtttgtttaattcatgtttgttgggactgaggtttaggaagtttgttactggttaaaaacctcaaatgaaatgcgaaagaatttgaatttttcctgcatatgtcaactttggacagctttcaagaaaaatgagaaaagtttcaacttctggcggttaaaatattaatgcagaatttactaagattttattcatttgcattagcaaatattcatgcagcagcagttgactgaaaatttattcttatgagacgtatagtattcatttttaaatgcatgattgtacattatgtatagacgacaatgtttttaatttataaatttcattctttgttaattgcatgggtttttctgcagcttattgtgaataccttggttctgttcaatagaaacattttgtatatattaaatactgaaatatcagtatcgacggtggaagtgcttcatgggcttgctgcacatatttgtaggatactgtatctgcaaatgcaacaacaaatagttttgtacttggttaacagtcttagttaaaacatgagtttattttctaaaagtatccagaataagtaaaattatagaaataagaaaatgttacacaactttgctgttcatacccttaccttcttactacttttggtttggaggagggtatcaccactagaaagtgtgcctccttaagatttcttaaaggaaagttagtttcagtatttcacagcaagttggactacaaaatctagagttgatctgctttttaaaccttcatttaaaagcaaacttggaagaaatttgaaactgatgtttttaatatatgtctgtgttgcctaggttttctttttttaaagaggtatgtaattaaaacctttgtaaaatttgccaactaatattagtgcctgacttcccatatttgtttcatctttttaactgacagtatatctcacttcttctttgaatagaatgagtgagtgatctcagttttcacattttattcagaagctaatccctacttagcaaggcacacattctacagcaagtcatagaaagtttaatccttgtgcctccttagctctcgtatattcagggatctctataaaagttggtgtcttttttcatcatcataaattcatcataatcacagatatttttgggtctaagatattcatataccaaggatggttttgtaaagaattctgggatcattgaattaaggattgtggcttgaagtaactaaagaaaaatactaatttccttaaaaggaattataattatgatttacattttacatcattaatttcccaaattatatttaaccgtaaggaggtgcacatgagtttttagcaaacaggtatgaataagcagctatgtatatgtgtttggggcagaggggagcagattactttaacacacttcagaattaaaatcagttcgtttcatga

SEQ ID NO: 376529 - DNA, 8251 bp, Homo sapiens
accagaagcattaaatgttatcgtaaggctaattgaacaagccccaattcaaatgggagaagaggcagtgaggtgggcaaaactggtcatacctttagtggttcattcagcacaaaaggtacatttgcggggagcaactgctctggagatgggaatgccattattgcttcagaaacagcaagaaatagcatctattacggagcagcttatgactactaaattaatctcagaacttcagaagctatttatgagtaaaaatgagacttacgtgttaaaattatggcctttgtttgtcaaactacttggaaggaccttgcatcgaagtgggagtttcatcaattctctcttgcaactagaagaacttggatttcgtagtggagcacccatgattaaaaagatagcttttattgcttggaagagtttaatagataattttgctttaaatccagatatactatgtagtgcaaaaagactcaagttgttaatgcagcctttgagttccatccatgtgagaacagaaactctagcattaacaaaactagaagtctggtggtatttactgatgagacttggacctcatcttcctgctaattttgaacaggtttgtgtgcctctgattcaaagtacaataagcattgattctaatgcctcacctcagggcaattcgtgtcatgtagctacatctccaggtttaaatcctatgactcctgtacacaaaggtgcttcctccccgtacggagccccgggaactccccgaatgaacctgagttcgaatttaggtggaatggccacaatcccatccattcaacttttgggacttgaaatgttgcttcatttcttgtgggtccagaagccttgagttttgctaagcaaataaacttgtgctgagcttagagccattggaacatccgttaatcagcagcccttcctttttttccaaacatgcaaatacacttatcactgctgttcatgatagctttgttgcagttggaaaagatgcccccgatgtggttgtcagtgctatctggaaggagctaattagcttggtgaagtcagttactgaatcaggtaacaaaaaagagaaaccaggttctgaagttttgactctcttattaaagtctttggaaagcatagtaaagtctgaagtatttcctgtatcaaaaacgctggtcctcatggaaattacaattaaaggacttcctcagaaagtattaggttcaccagcatatcaggttgctaatatggatattcttaatggaactccagctttgttcttaattcaattaattttcaacaatttcttggaatgtggtgtatcagatgaaaggttctttctcagtttggaatcacttgtaggctgtgttctttctggtccaacttcaccactagctttcagtgactcagttttaaatgttattaatcaaaatgcaaagcagttggaaaataaggagcatctctggaaaatgtggagtgttatagtcaccccattaactgaattgattaatcagaccaatgaagtaaatcaaggtgatgccttagaacataattttagtgccatctatggtgcattgactttaccagtaaaccacattttttcagaacagagatttccagtggccaccatgaagactttgcttagaacttggtcagaattatatagagcatttgctcgttgtgctgctttggtggcaacagcagaagagaacttgtgctgtgaggaactttcttccaagataatgtccagtttggaagatgaaggcttttctaatttgttgttcgtggatagaattatttatattattactgtaatggttgattgcattgacttctcaccatataatattaaatatcagcccaaagttaaatcaccacagagaccttcagattggtccaaaaagaagaatgagcccctagggaaattgacttctttatttaaacttattgtgaaagtgatctattctttccacacactgagcttcaaggaagcacattctgataccctcttcactattggcaactcaatcaccggcattatttccagtgtacttgggcatatttctttgccttctatgatccgaaaaatatttgcaactttaacaagacctctggcattattttatgaaaactcaaagcttgatgaagttcctaaagtatatagttgtctgaacaacaagttagaaaagctactgggagaaattattgcttgtctgcaattcagctacaccggaacttatgatagtgaacttcttgaacaactctccccactattatgcataatatttctgcacaagaataaacagattcgaaaacagagtgctcagttctggaatgccacttttgccaaagtgatgatgttggtttatcctgaagagttaaaaccagtactaacacaagccaaacaaaaatttctgctcctgttgcctggtttggaaactgttgaaatgatggaggaatccagtggaccatattctgatggaacagaaaattcacaactaaatgtgaagataagtggcatggagagaaaatcaaatggaaaaagagattcatttttggcacaaacaaagaataaaaaagaaaatatgaaaccagcagccaaactgaaacttgaatcttcgtctttaaaagtaaagggtgaaattcttttggaagaggaaaagtctactgactttgtgtttatacctccagaaggaaaagatgcaaaggaaagaatattaactgatcatcaaaaagaagttctcaaaacaaagcggtgtgatattcctgccatgtataataatctggatgtttcccaagataccttatttactcagtatagtcaggaagagcctatggaaattcctactttaaccagaaaaccaaaggaggattctaagatgatgattacggaggagcaaatggacagtgacattgtcattcctcaagatgtcacggaagactgtggtatggctgaacatcttgaaaagtcctccctttcgaataatgagtgtggttctcttgacaaaaccagtccagaaatgtcaaacagtaataatgatgaaagaaaaaaagctttaatttcatcaaggaaaacatcaactgaatgtgcatctagtacagaaaattctttcgttgtcagcagtagttcagtttctaataccactgttgctggaactcccccataccctacaagtcggaggcaaacctttattactttggagaagtttgatggttcagaaaatagaccttttagtccatcccccttgaataatatttcatcaactgttacagtgaaaaataaccaggaaaccatgattaaaacagattttctaccaaaagcaaagcaaagagaagggactttttcaaaatctgattctgaaaaaatagtgaatggaactaagagatcaagccggagagctggtaaagctgaacaaacagggaataaaaggtctaagcccttaatgagatctgagccggagaaaaatactgaggaatctgttgaaggcattgtagtcttagaaaataacccacctggtttgcttaatcaaacagaatgtgtgtcagataatcaggttcatctttctgaatctacaatggagcatgacaatacaaagcttaaagcagcaacagtggaaaatgctgtattattggaaactaatactgtagaggagaaaaatgtagaaattaatttggaatccaaagagaatacacccccagtagtaatatcagcagatcaaatggtaaatgaggatagtcaggttcagataactccaaatcagaaaacccttagacggtcttcaaggcgacgttcagaagtagtagagtctaccactgaaagccaagataaggaaaatagtcatcaaaaaaaggaacgacgtaaggaagaagaaaaacctcttcagaagagtccattgcatataaaagatgatgtgttacctaaacaaaaactgattgctgaacaaactctacaggagaatttaattgagaaaggaagtaatttacatgagaagactcttggggaaactagtgctaatgcagaaactgaacaaaataaaaaaaaggcagaccctgagaacattaagtctgagggggatggtacccaggacattgtagataagtcctctgagaaactagtcagaggccgaacacggtatcaaactagaagagcatctcagggtttgctttccagcattgaaaactcagaatctgatagttcggaggcaaaagaagaaggttctaggaagaagagatctggaaaatggaaaaacaaaagcaatgaaagtgttgacattcaagatcaagaagagaaagtggtgaaacaggaatgtataaaagctgaaaatcagtcacatgattataaagcaacttctgaagaagatgtaagcataaaatctccgatttgcgaaaaacaagatgaaagtaatactgtaatatgtcaggattctacagtaacttcagatttgttgcaagttcctgatgatttaccaaatgtgtgtgaggaaaaaaatgaaactagcaaatatgcagaatattcctttacaagtctacctgtgccagaatcaaatctaaggactagaaatgccattaagagattacataagcgagactcttttgataattgtagtttgggagaatcctcaaaaatagggatatcagatatttcttcgctttcagaaaaaacttttcaaacacttgaatgccaacacaagagaagtaggagggtgaggagatctaaaggttgtgattgctgtggggaaaaatcacaacctcaggaaaagtcactcattgggttaaagaatacagaaaataatgacgtagagattagtgaaacaaaaaaggcagatgtgcaagcacctgtaagcccatcagaaacttctcaagctaatccatattctgaaggacaatttttagatgaacatcatagtgtgaattttcatttgggtctcaaagaggataatgatactattaatgattcattaattgtttctgaaaccaaatcaaaagaaaacactatgcaagaatctcttccttctggaatagtaaactttagagaggaaatttgtgatatggattctagtgaagcaatgtctcttgaaagccaggagtcacctaatgaaaattttaaaactgttggcccgtgtttaggagactcgaaaaatgtttcacaggaatctttggagacaaaagaagaaaaaccagaagaaaccccaaaaatggaactgagtctagagaatgttactgttgaaggaaatgcatgtaaagtaacagaatccaatctagagaaagcaaaaactatggaattgaatgtaggaaatgaagctagctttcatggacaagagagaaccaaaactggtatttctgaagaagcagcaatagaagaaaataaaagaaatgatgactctgaagcagacacagctaaactgaatgccaaagaagtagcaactgaggaatttaattcagatattagtctttctgataatactacacctgtaaaattgaatgctcaaactgagatttctgaacaaacagcagctggggaactagatggaggaaatgatgtatctgatctacactcatctgaagaaacgaataccaaaatgaaaaattatgaagaaatgatgatcggcgaggcaatggctgaaactggccatgatggtgaaacagagaatgagggcataactaccaaaacctcaaagcctgatgaagctgaaacaaacatgttgactgcagaaatggacaactttgtttgtgacacagttgaaatgagcactgaagaaggaatcattgacgctaataaaactgaaacaaatactgagtatagtaaatctgaagaaaaattagataacaatcaaatggtaatggaaagtgatattttacaggaagatcaccatacttcacagaaagtggaggaaccatcacagtgtctggcatctggaacagctatctctgagctaataatagaagacaataatgcatctcctcaaaaactaagggaacttgatccttcacttgtgtcagcaaatgacagtcctagtggcatgcagacacgctgtgtctggtctcctttggcttctccgtctacgagcattttaaagagaggactaaaaagatcccaagaagatgaaatctcatcacctgttaataaggttcgccgtgtctcctttgcagatccaatataccaagcaggattggcagatgacattgatagacggtgctctattgttaggtcccattcttccaatagttctcccataggaaaaagtgttaaaacttctcctactacacaatctaagcataataccacttcagccaaaggatttctgtccccaggatcacgtagccctaaatttaagagctcaaagaagtgtttaatttcagaaatggccaaagaatccataccatgcccaacagaaagtgtttacccaccattggtgaactgtgtggcaccagttgacatcattttacctcagattacatcaaacatgtgggcaagaggcctgggacaactcattagagctaagaatataaaaactattggtgatttgagtactcttacagcatctgaaataaaaactcttcctatccgttctccaaaagtgtccaatgtaaaaaaggctctcagaatatatcatgagcagcaggtgaagactcgtggactagaagagattccagtttttgatatttctgaaaaaacagtaaatggaatagaaaataaatctttgtcacctgatgaagaaagacttgtctcagatataattgatcctgttgctttagaaattccattatccaaaaaccttgtggcacagattagtgctcttgctcttcagctggattcagaagatcttcataattattcaggaagccaactatttgaaatgcacgagaaactaagttgtatggcaaactctgtaataaaaaatctacagtcacgttggagatcaccatcccatgaaaattctatttagtattttcagagaaaattgaaggtttttttaaacatcactggatttcttgattgaggaaacaagttctgaaataatagcacaatttcaaagaagagactctttgcaaagttgataacatttcaaaccctgaaggacagtgacttattatccttcctttctccaaagaacagttaaaaccaaatgtgttatggtaagctgtaaataccgttggaataaaagataaccgttcatcttacctaaaaaattgaagacaatattttccattgttgatgtcacaatttcttgaagatggctctttgcagcctacgtggtagtggagatatatacaaaggacttccctagtatcgttggaccaacaagcacaagcagatggcaggaagattagaacattggatattgattgccagtttttaagtgtcattcttggaaacgtgggagatttaggaaatgacattgaagaggaagaattctgttgaaatagtgattctcaacgtggggtccttggacagcaagtgatggggattggaatcccttttccaacgttttctttatacaacacctgtatgacacaagaaagcatccagaaaaaacaagagcagtcaaaacagccctttcatctaccttgtggggaacctggtataaaactacagacgtcagacagaaaagacagattcaacaagtcaacctctctgttcaggcacagatctggttttaatgatgaactctacaatgctaattctggaaatgaaaaagtacaatggaaagcattaagttatataacgctgaggaatcttgttaattctacttatagtatttcaaatctagtcaagtcactgaaaatgttcaagtataatcggaaatgtgtctttccgatagccgttcctggtgagacatcctctttatataaaacctgggcattcagaatcaggacagtgttaacacagaagaaaagaaaacccagcagttcctggagaaagactaggacacatggcttttgtgaaaacaagacactagacgatgttcccaggggttttcgccatgaaccttgccatgggtgaggaaaagatactatattttctccccaataccaccaacgaagtaacagatgagtctttcatgctgtgatttgggattaagatacaaggtgagcccagagatgaattgggcacacatttcctggggcaggatgggagttgtggagggctgcacaacagccccactgcaagcctgggatatccagaggcatcttcctcagcacccctaggtgcctgtgggctgtgccttacatttaataaaaacttacaaggctg

SEQ ID NO: 376530 - DNA, 9168 bp, Homo sapiens
accagaagcattaaatgttatcgtaaggctaattgaacaagccccaattcaaatgggagaagaggcagtgaggtgggcaaaactggtcatacctttagtggttcattcagcacaaaaggtacatttgcggggagcaactgctctggagatgggaatgccattattgcttcagaaacagcaagaaatagcatctattacggagcagcttatgactactaaattaatctcagaacttcagaagctatttatgagtaaaaatgagacttacgtgttaaaattatggcctttgtttgtcaaactacttggaaggaccttgcatcgaagtgggagtttcatcaattctctcttgcaactagaagaacttggatttcgtagtggagcacccatgattaaaaagatagcttttattgcttggaagagtttaatagataattttgctttaaatccagatatactatgtagtgcaaaaagactcaagttgttaatgcagcctttgagttccatccatgtgagaacagaaactctagcattaacaaaactagaagtctggtggtatttactgatgagacttggacctcatcttcctgctaattttgaacaggtttgtgtgcctctgattcaaagtacaataagcattgattctaatgcctcacctcagggcaattcgtgtcatgtagctacatctccaggtttaaatcctatgactcctgtacacaaaggtgcttcctccccgtacggagccccgggaactccccgaatgaacctgagttcgaatttaggtggaatggccacaatcccatccattcaacttttgggacttgaaatgttgcttcatttcttgtgggtccagaagccttgagttttgctaagcaaataaacttgtgctgagcttagagccattggaacatccgttaatcagcagcccttcctttttttccaaacatgcaaatacacttatcactgctgttcatgatagctttgttgcagttggaaaagatgcccccgatgtggttgtcagtgctatctggaaggagctaattagcttggtgaagtcagttactgaatcaggtaacaaaaaagagaaaccaggttctgaagttttgactctcttattaaagtctttggaaagcatagtaaagtctgaagtatttcctgtatcaaaaacgctggtcctcatggaaattacaattaaaggacttcctcagaaagtattaggttcaccagcatatcaggttgctaatatggatattcttaatggaactccagctttgttcttaattcaattaattttcaacaatttcttggaatgtggtgtatcagatgaaaggttctttctcagtttggaatcacttgtaggctgtgttctttctggtccaacttcaccactagctttcagtgactcagttttaaatgttattaatcaaaatgcaaagcagttggaaaataaggagcatctctggaaaatgtggagtgttatagtcaccccattaactgaattgattaatcagaccaatgaagtaaatcaaggtgatgccttagaacataattttagtgccatctatggtgcattgactttaccagtaaaccacattttttcagaacagagatttccagtggccaccatgaagactttgcttagaacttggtcagaattatatagagcatttgctcgttgtgctgctttggtggcaacagcagaagagaacttgtgctgtgaggaactttcttccaagataatgtccagtttggaagatgaaggcttttctaatttgttgttcgtggatagaattatttatattattactgtaatggttgattgcattgacttctcaccatataatattaaatatcagcccaaagttaaatcaccacagagaccttcagattggtccaaaaagaagaatgagcccctagggaaattgacttctttatttaaacttattgtgaaagtgatctattctttccacacactgagcttcaaggaagcacattctgataccctcttcactattggcaactcaatcaccggcattatttccagtgtacttgggcatatttctttgccttctatgatccgaaaaatatttgcaactttaacaagacctctggcattattttatgaaaactcaaagcttgatgaagttcctaaagtatatagttgtctgaacaacaagttagaaaagctactgggagaaattattgcttgtctgcaattcagctacaccggaacttatgatagtgaacttcttgaacaactctccccactattatgcataatatttctgcacaagaataaacagattcgaaaacagagtgctcagttctggaatgccacttttgccaaagtgatgatgttggtttatcctgaagagttaaaaccagtactaacacaagccaaacaaaaatttctgctcctgttgcctggtttggaaactgttgaaatgatggaggaatccagtggaccatattctgatggaacagaaaattcacaactaaatgtgaagataagtggcatggagagaaaatcaaatggaaaaagagattcatttttggcacaaacaaagaataaaaaagaaaatatgaaaccagcagccaaactgaaacttgaatcttcgtctttaaaagtaaagggtgaaattcttttggaagaggaaaagtctactgactttgtgtttatacctccagaaggaaaagatgcaaaggaaagaatattaactgatcatcaaaaagaagttctcaaaacaaagcggtgtgatattcctgccatgtataataatctggatgtttcccaagataccttatttactcagtatagtcaggaagagcctatggaaattcctactttaaccagaaaaccaaaggaggattctaagatgatgattacggaggagcaaatggacagtgacattgtcattcctcaagatgtcacggaagactgtggtatggctgaacatcttgaaaagtcctccctttcgaataatgagtgtggttctcttgacaaaaccagtccagaaatgtcaaacagtaataatgatgaaagaaaaaaagctttaatttcatcaaggaaaacatcaactgaatgtgcatctagtacagaaaattctttcgttgtcagcagtagttcagtttctaataccactgttgctggaactcccccataccctacaagtcggaggcaaacctttattactttggagaagtttgatggttcagaaaatagaccttttagtccatcccccttgaataatatttcatcaactgttacagtgaaaaataaccaggaaaccatgattaaaacagattttctaccaaaagcaaagcaaagagaagggactttttcaaaatctgattctgaaaaaatagtgaatggaactaagagatcaagccggagagctggtaaagctgaacaaacagggaataaaaggtctaagcccttaatgagatctgagccggagaaaaatactgaggaatctgttgaaggcattgtagtcttagaaaataacccacctggtttgcttaatcaaacagaatgtgtgtcagataatcaggttcatctttctgaatctacaatggagcatgacaatacaaagcttaaagcagcaacagtggaaaatgctgtattattggaaactaatactgtagaggagaaaaatgtagaaattaatttggaatccaaagagaatacacccccagtagtaatatcagcagatcaaatggtaaatgaggatagtcaggttcagataactccaaatcagaaaacccttagacggtcttcaaggcgacgttcagaagtagtagagtctaccactgaaagccaagataaggaaaatagtcatcaaaaaaaggaacgacgtaaggaagaagaaaaacctcttcagaagagtccattgcatataaaagatgatgtgttacctaaacaaaaactgattgctgaacaaactctacaggagaatttaattgagaaaggaagtaatttacatgagaagactcttggggaaactagtgctaatgcagaaactgaacaaaataaaaaaaaggcagaccctgagaacattaagtctgagggggatggtacccaggacattgtagataagtcctctgagaaactagtcagaggccgaacacggtatcaaactagaagagcatctcagggtttgctttccagcattgaaaactcagaatctgatagttcggaggcaaaagaagaaggttctaggaagaagagatctggaaaatggaaaaacaaaagcaatgaaagtgttgacattcaagatcaagaagagaaagtggtgaaacaggaatgtataaaagctgaaaatcagtcacatgattataaagcaacttctgaagaagatgtaagcataaaatctccgatttgcgaaaaacaagatgaaagtaatactgtaatatgtcaggattctacagtaacttcagatttgttgcaagttcctgatgatttaccaaatgtgtgtgaggaaaaaaatgaaactagcaaatatgcagaatattcctttacaagtctacctgtgccagaatcaaatctaaggactagaaatgccattaagagattacataagcgagactcttttgataattgtagtttgggagaatcctcaaaaatagggatatcagatatttcttcgctttcagaaaaaacttttcaaacacttgaatgccaacacaagagaagtaggagggtgaggagatctaaaggttgtgattgctgtggggaaaaatcacaacctcaggaaaagtcactcattgggttaaagaatacagaaaataatgacgtagagattagtgaaacaaaaaaggcagatgtgcaagcacctgtaagcccatcagaaacttctcaagctaatccatattctgaaggacaatttttagatgaacatcatagtgtgaattttcatttgggtctcaaagaggataatgatactattaatgattcattaattgtttctgaaaccaaatcaaaagaaaacactatgcaagaatctcttccttctggaatagtaaactttagagaggaaatttgtgatatggattctagtgaagcaatgtctcttgaaagccaggagtcacctaatgaaaattttaaaactgttggcccgtgtttaggagactcgaaaaatgtttcacaggaatctttggagacaaaagaagaaaaaccagaagaaaccccaaaaatggaactgagtctagagaatgttactgttgaaggaaatgcatgtaaagtaacagaatccaatctagagaaagcaaaaactatggaattgaatgtaggaaatgaagctagctttcatggacaagagagaaccaaaactggtatttctgaagaagcagcaatagaagaaaataaaagaaatgatgactctgaagcagacacagctaaactgaatgccaaagaagtagcaactgaggaatttaattcagatattagtctttctgataatactacacctgtaaaattgaatgctcaaactgagatttctgaacaaacagcagctggggaactagatggaggaaatgatgtatctgatctacactcatctgaagaaacgaataccaaaatgaaaaattatgaagaaatgatgatcggcgaggcaatggctgaaactggccatgatggtgaaacagagaatgagggcataactaccaaaacctcaaagcctgatgaagctgaaacaaacatgttgactgcagaaatggacaactttgtttgtgacacagttgaaatgagcactgaagaaggaatcattgacgctaataaaactgaaacaaatactgagtatagtaaatctgaagaaaaattagataacaatcaaatggtaatggaaagtgatattttacaggaagatcaccatacttcacagaaagtggaggaaccatcacagtgtctggcatctggaacagctatctctgagctaataatagaagacaataatgcatctcctcaaaaactaagggaacttgatccttcacttgtgtcagcaaatgacagtcctagtggcatgcagacacgctgtgtctggtctcctttggcttctccgtctacgagcattttaaagagaggactaaaaagatcccaagaagatgaaatctcatcacctgttaataaggttcgccgtgtctcctttgcagatccaatataccaagcaggattggcagatgacattgatagacggtgctctattgttaggtcccattcttccaatagttctcccataggaaaaagtgttaaaacttctcctactacacaatctaagcataataccacttcagccaaaggatttctgtccccaggatcacgtagccctaaatttaagagctcaaagaagtgtttaatttcagaaatggccaaagaatccataccatgcccaacagaaagtgtttacccaccattggtgaactgtgtggcaccagttgacatcattttacctcagattacatcaaacatgtgggcaagaggcctgggacaactcattagagctaagaatataaaaactattggtgatttgagtactcttacagcatctgaaataaaaactcttcctatccgttctccaaaagtgtccaatgtaaaaaaggctctcagaatatatcatgagcagcaggtgaagactcgtggactagaagagattccagtttttgatatttctgaaaaaacagtaaatggaatagaaaataaatctttgtcacctgatgaagaaagacttgtctcagatataattgatcctgttgctttagaaattccattatccaaaaaccttgtggcacagattagtgctcttgctcttcagctggattcagaagatcttcataattattcaggaagccaactatttgaaatgcacgagaaactaagttgtatggcaaactctgtaataaaaaatctacagtcacgttggagatcaccatcccatgaaaattctatttagtattttcagagctgaaataatagcacaatttcaaagaagagactctttgcaaagttgataacatttcaaaccctgaaggacagtgacttattatgtaagttcaattttgtaagttcattatgtaagatccttttttttttcataatatgtattcttggctgctatgcgtggtttttcaggaaatttaattatcttactgagatgtgaaagcaaaactagtaacagaacttacattttatttcatgctttcttaaacccgtgcatattctggtgaaacatgtaaaatactttaagtaaaattgaacatttttatttgaatttttgctgaactgataaaggtgtttatatttttgtttgtttgtttgtttaattcatgtttgttgggactgaggtttaggaagtttgttactggttaaaaacctcaaatgaaatgcgaaagaatttgaatttttcctgcatatgtcaactttggacagctttcaagaaaaatgagaaaagtttcaacttctggcggttaaaatattaatgcagaatttactaagattttattcatttgcattagcaaatattcatgcagcagcagttgactgaaaatttattcttatgagacgtatagtattcatttttaaatgcatgattgtacattatgtatagacgacaatgtttttaatttataaatttcattctttgttaattgcatgggtttttctgcagcttattgtgaataccttggttctgttcaatagaaacattttgtatatattaaatactgaaatatcagtatcgacggtggaagtgcttcatgggcttgctgcacatatttgtaggatactgtatctgcaaatgcaacaacaaatagttttgtacttggttaacagtcttagttaaaacatgagtttattttctaaaagtatccagaataagtaaaattatagaaataagaaaatgttacacaactttgctgttcatacccttaccttcttactacttttggtttggaggagggtatcaccactagaaagtgtgcctccttaagatttcttaaaggaaagttagtttcagtatttcacagcaagttggactacaaaatctagagttgatctgctttttaaaccttcatttaaaagcaaacttggaagaaatttgaaactgatgtttttaatatatgtctgtgttgcctaggttttctttttttaaagaggtatgtaattaaaacctttgtaaaatttgccaactaatattagtgcctgacttcccatatttgtttcatctttttaactgacagtatatctcacttcttctttgaatagaatgagtgagtgatctcagttttcacattttattcagaagctaatccctacttagcaaggcacacattctacagcaagtcatagaaagtttaatccttgtgcctccttagctctcgtatattcagggatctctataaaagttggtgtcttttttcatcatcataaattcatcataatcacagatatttttgggtctaagatattcatataccaaggatggttttgtaaagaattctgggatcattgaattaaggattgtggcttgaagtaactaaagaaaaatactaatttccttaaaaggaattataattatgatttacattttacatcattaatttcccaaattatatttaaccgtaaggaggtgcacatgagtttttagcaaacaggtatgaataagcagctatgtatatgtgtttggggcagaggggagcagattactttaacacacttcagaattaaaatcagttcgtttcatgactctgtgccttaacgtttgtgtgaactaaacttgctgattgaatgaaattcttgggaagccgaacagtaatagcagaaaatgtgaccaaatgagtatcatgtacttaaatcactgaattttatataagcacaagtattaattttaaaaacattatagtttaataaagctgcatttaaaaatatttgggagcaaagacaagcatgctaaatcttcattttgctatggctataagcatatatttttggcaacttatttgcaatattcttgccttaaagtttcctgcaaatttcccccttagtaattcccgaatagcaaaacattaatattccatgattagctctattgtgttgtctcactattaaaatggaattcgttttttcaaatcttttctaatggttaataaaacaaatgtcagatcataataacactcaaatgt

SEQ ID NO: 376531 - DNA, 8192 bp, Homo sapiens
ccaggatggtctcgatctcctgacctcgtgatccacccgcctcggcctcccaaagtgctggcattacaggagtgagccactgcgcccggccaagagcttgatttttgtgtgcagtatatggaaataattttactaacatggttgtcataccctaagtaatgccaaaagttaaatttgtcatgctaaaacaattttatttcttaaataaccaattataaaaaacaaatgttctattctttgtaactgagaagattgacttcattttctccttcagggaactccagctttgttcttaattcaattaattttcaacaatttcttggaatgtggtgtatcagatgaaaggttctttctcagtttggaatcacttgtaggctgtgttctttctggtccaacttcaccactagctttcagtgactcagttttaaatgttattaatcaaaatgcaaagcagttggaaaataaggagcatctctggaaaatgtggagtgttatagtcaccccattaactgaattgattaatcagaccaatgaagtaaatcaaggtgatgccttagaacataattttagtgccatctatggtgcattgactttaccagtaaaccacattttttcagaacagagatttccagtggccaccatgaagactttgcttagaacttggtcagaattatatagagcatttgctcgttgtgctgctttggtggcaacagcagaagagaacttgtgctgtgaggaactttcttccaagataatgtccagtttggaagatgaaggcttttctaatttgttgttcgtggatagaattatttatattattactgtaatggttgattgcattgacttctcaccatataatattaaatatcagcccaaagttaaatcaccacagagaccttcagattggtccaaaaagaagaatgagcccctagggaaattgacttctttatttaaacttattgtgaaagtgatctattctttccacacactgagcttcaaggaagcacattctgataccctcttcactattggcaactcaatcaccggcattatttccagtgtacttgggcatatttctttgccttctatgatccgaaaaatatttgcaactttaacaagacctctggcattattttatgaaaactcaaagcttgatgaagttcctaaagtatatagttgtctgaacaacaagttagaaaagctactgggagaaattattgcttgtctgcaattcagctacaccggaacttatgatagtgaacttcttgaacaactctccccactattatgcataatatttctgcacaagaataaacagattcgaaaacagagtgctcagttctggaatgccacttttgccaaagtgatgatgttggtttatcctgaagagttaaaaccagtactaacacaagccaaacaaaaatttctgctcctgttgcctggtttggaaactgttgaaatgatggaggaatccagtggaccatattctgatggaacagaaaattcacaactaaatgtgaagataagtggcatggagagaaaatcaaatggaaaaagagattcatttttggcacaaacaaagaataaaaaagaaaatatgaaaccagcagccaaactgaaacttgaatcttcgtctttaaaagtaaagggtgaaattcttttggaagaggaaaagtctactgactttgtgtttatacctccagaaggaaaagatgcaaaggaaagaatattaactgatcatcaaaaagaagttctcaaaacaaagcggtgtgatattcctgccatgtataataatctggatgtttcccaagataccttatttactcagtatagtcaggaagagcctatggaaattcctactttaaccagaaaaccaaaggaggattctaagatgatgattacggaggagcaaatggacagtgacattgtcattcctcaagatgtcacggaagactgtggtatggctgaacatcttgaaaagtcctccctttcgaataatgagtgtggttctcttgacaaaaccagtccagaaatgtcaaacagtaataatgatgaaagaaaaaaagctttaatttcatcaaggaaaacatcaactgaatgtgcatctagtacagaaaattctttcgttgtcagcagtagttcagtttctaataccactgttgctggaactcccccataccctacaagtcggaggcaaacctttattactttggagaagtttgatggttcagaaaatagaccttttagtccatcccccttgaataatatttcatcaactgttacagtgaaaaataaccaggaaaccatgattaaaacagattttctaccaaaagcaaagcaaagagaagggactttttcaaaatctgattctgaaaaaatagtgaatggaactaagagatcaagccggagagctggtaaagctgaacaaacagggaataaaaggtctaagcccttaatgagatctgagccggagaaaaatactgaggaatctgttgaaggcattgtagtcttagaaaataacccacctggtttgcttaatcaaacagaatgtgtgtcagataatcaggttcatctttctgaatctacaatggagcatgacaatacaaagcttaaagcagcaacagtggaaaatgctgtattattggaaactaatactgtagaggagaaaaatgtagaaattaatttggaatccaaagagaatacacccccagtagtaatatcagcagatcaaatggtaaatgaggatagtcaggttcagataactccaaatcagaaaacccttagacggtcttcaaggcgacgttcagaagtagtagagtctaccactgaaagccaagataaggaaaatagtcatcaaaaaaaggaacgacgtaaggaagaagaaaaacctcttcagaagagtccattgcatataaaagatgatgtgttacctaaacaaaaactgattgctgaacaaactctacaggagaatttaattgagaaaggaagtaatttacatgagaagactcttggggaaactagtgctaatgcagaaactgaacaaaataaaaaaaaggcagaccctgagaacattaagtctgagggggatggtacccaggacattgtagataagtcctctgagaaactagtcagaggccgaacacggtatcaaactagaagagcatctcagggtttgctttccagcattgaaaactcagaatctgatagttcggaggcaaaagaagaaggttctaggaagaagagatctggaaaatggaaaaacaaaagcaatgaaagtgttgacattcaagatcaagaagagaaagtggtgaaacaggaatgtataaaagctgaaaatcagtcacatgattataaagcaacttctgaagaagatgtaagcataaaatctccgatttgcgaaaaacaagatgaaagtaatactgtaatatgtcaggattctacagtaacttcagatttgttgcaagttcctgatgatttaccaaatgtgtgtgaggaaaaaaatgaaactagcaaatatgcagaatattcctttacaagtctacctgtgccagaatcaaatctaaggactagaaatgccattaagagattacataagcgagactcttttgataattgtagtttgggagaatcctcaaaaatagggatatcagatatttcttcgctttcagaaaaaacttttcaaacacttgaatgccaacacaagagaagtaggagggtgaggagatctaaaggttgtgattgctgtggggaaaaatcacaacctcaggaaaagtcactcattgggttaaagaatacagaaaataatgacgtagagattagtgaaacaaaaaaggcagatgtgcaagcacctgtaagcccatcagaaacttctcaagctaatccatattctgaaggacaatttttagatgaacatcatagtgtgaattttcatttgggtctcaaagaggataatgatactattaatgattcattaattgtttctgaaaccaaatcaaaagaaaacactatgcaagaatctcttccttctggaatagtaaactttagagaggaaatttgtgatatggattctagtgaagcaatgtctcttgaaagccaggagtcacctaatgaaaattttaaaactgttggcccgtgtttaggagactcgaaaaatgtttcacaggaatctttggagacaaaagaagaaaaaccagaagaaaccccaaaaatggaactgagtctagagaatgttactgttgaaggaaatgcatgtaaagtaacagaatccaatctagagaaagcaaaaactatggaattgaatgtaggaaatgaagctagctttcatggacaagagagaaccaaaactggtatttctgaagaagcagcaatagaagaaaataaaagaaatgatgactctgaagcagacacagctaaactgaatgccaaagaagtagcaactgaggaatttaattcagatattagtctttctgataatactacacctgtaaaattgaatgctcaaactgagatttctgaacaaacagcagctggggaactagatggaggaaatgatgtatctgatctacactcatctgaagaaacgaataccaaaatgaaaaattatgaagaaatgatgatcggcgaggcaatggctgaaactggccatgatggtgaaacagagaatgagggcataactaccaaaacctcaaagcctgatgaagctgaaacaaacatgttgactgcagaaatggacaactttgtttgtgacacagttgaaatgagcactgaagaaggaatcattgacgctaataaaactgaaacaaatactgagtatagtaaatctgaagaaaaattagataacaatcaaatggtaatggaaagtgatattttacaggaagatcaccatacttcacagaaagtggaggaaccatcacagtgtctggcatctggaacagctatctctgagctaataatagaagacaataatgcatctcctcaaaaactaagggaacttgatccttcacttgtgtcagcaaatgacagtcctagtggcatgcagacacgctgtgtctggtctcctttggcttctccgtctacgagcattttaaagagaggactaaaaagatcccaagaagatgaaatctcatcacctgttaataaggttcgccgtgtctcctttgcagatccaatataccaagcaggattggcagatgacattgatagacggtgctctattgttaggtcccattcttccaatagttctcccataggaaaaagtgttaaaacttctcctactacacaatctaagcataataccacttcagccaaaggatttctgtccccaggatcacgtagccctaaatttaagagctcaaagaagtgtttaatttcagaaatggccaaagaatccataccatgcccaacagaaagtgtttacccaccattggtgaactgtgtggcaccagttgacatcattttacctcagattacatcaaacatgtgggcaagaggcctgggacaactcattagagctaagaatataaaaactattggtgatttgagtactcttacagcatctgaaataaaaactcttcctatccgttctccaaaagtgtccaatgtaaaaaaggctctcagaatatatcatgagcagcaggtgaagactcgtggactagaagagattccagtttttgatatttctgaaaaaacagtaaatggaatagaaaataaatctttgtcacctgatgaagaaagacttgtctcagatataattgatcctgttgctttagaaattccattatccaaaaaccttgtggcacagattagtgctcttgctcttcagctggattcagaagatcttcataattattcaggaagccaactatttgaaatgcacgagaaactaagttgtatggcaaactctgtaataaaaaatctacagtcacgttggagatcaccatcccatgaaaattctatttagtattttcagagaaaattgaaggtttttttaaacatcactggatttcttgattgaggaaacaagttctgaaataatagcacaatttcaaagaagagactctttgcaaagttgataacatttcaaaccctgaaggacagtgacttattatccttcctttctccaaagaacagttaaaaccaaatgtgttatggtaagctgtaaataccgttggaataaaagataaccgttcatcttacctaaaaaattgaagacaatattttccattgttgatgtcacaagtaagaaaaaaactctaacttttgtactctacttgtagcagagggaatatttttggccacagtgtgccaatttataattgtagataaagctgaatttactgggcagcaagcttatatgctgatagaagttgatgcactgagaagtgatgagttgaagagaatggaaaaggcagattgagctggaattttaatgcatagtacatttagtagagagacaagctgtcctatatactcctgtatacttcagaaatagctgatagcctatagtctctgagagctattctgtacatagcacagtattataattgatgttcataaataccctgagagattatgttaaaatacattattaatactcccacaaaagcagtaagttaataagtatttccaacaaaaggcagctttgtttcttaaacggataaacaacatataactaggaagatcatcttcaaaataaagtgtcatggaactgaaaatagagtatagtctaacaattattttgatacactattgaatagctaacaagtgtctaaagaattttttatttttatagaataggaagtttctaaaagaaaacaattaagagcaaaattggttttgagtatagaaactgaaggatggcagtcttaactcctaagttttttacagagcacagattggtaaactagcatgccacctgttttttgtactatctgtgagctgagactggtttttacattttttaatggtgaaaaaagtcaaaagaaggaggacattttgtgacacatgaaaacatattaaattaaaatttcagtatccagaaataaagttttattggaacagctgtgcttattgtctttagctgctttcctggtacagtggctgagtttagtagtatagcagagtctgtatggcttccaacagtcaaaatactgcctggccttttaaagagtttgtcaatcccttttatggaggaaggttttgctcatgcatggcatgttagtcaatttagttatttgcttctagctggcagaatgtggtcttgattacttaatttctgttacccctgtgttttccagaatggcttctcctgattttacttacgtgttttactattgctcaaattacagatactaggaaacactactactttataagtacacttctttttcctacttaaactctcaaactacagttacgtatttgccatgatgttaagggaccttgatggtctgtgaattatcagttgctttctgcactacctcctgtagatagacctgactgatagcacttacaaaaagactgatagatgccaaatcagtcatttattaaccctctaatattgttgtcccgatcatttggtaaacgctaagagagcttagttttacattcacaaagtatttgtatttgataagtcttaaaaatgatttaagttgaagcctaacagaagtacttgttcattcctcagttacctgcaaataatggaaataatggtgcagtcagttttatttgattgtgtaatgctttatactaggggtctcaaacccctgggtggcattagattcttacaggagcgtgaaccctattgtgaactgcacatgcaagagatctaggttgtgcgctcattatgagaatctaatacccgatgatctgaggtggaacagtctcatcctgaaaccatctaccccaacacctgtgtctgtggaaattgtctccacgaaaccggtccctgttgaaaaaaggttaggggaccactgctttatacagtgtttgaagtaggcacacttacagttactatttctggttctttatgactgttgaggggggcagaattctatgtttgattcacagtaaaacttttcatgaatcattgagggttaactgttatcacttgccaatggaaactggatattgaaacatttttttaagaaatgcacttttacctgaaataaaactataaaaactaaaaaaaaata

SEQ ID NO: 376532 - DNA, 2577 bp, Homo sapiens
cggacctctggtcacttaattttctgttatattatgtggttgaaaattcctgtttcatcgtaaagtgaaatttgaaagatggagttgaataatatgattctcgaaaagtgagtttttcttggaattctgttaaggtgttagattttcctcacatatttaaataatctgtaagaactaccctgaaagcactaaggaaaatgtagccgaaagttaagtaataggttttaaaaatttatcaaaatttattgatagtttgatctgtaaaacaaattgggtttcgtgctttctgatgtccagttaataagtatattatgtgccaggctttacatattgctctttgcaagtagccgttaaagtgtaagtcattgaagtttgaagatctataaatatttaatatagtagtctaaacagttgtgagaatttactcagttctgaaatagaatgttaaattttccgatgtggtcctaatcatttttttctttacatactaagccttcctttctccaaagaacagttaaaaccaaatgtgttatggtaagctgtaaataccgttggaataaaagataaccgttcatcttacctaaaaaattgaagacaatattttccattgttgatgtcacaagtaagaaaaaaactctaacttttgtactctacttgtagcagagggaatatttttggccacagtgtgccaatttataattgtagataaagctgaatttactgggcagcaagcttatatgctgatagaagttgatgcactgagaagtgatgagttgaagagaatggaaaaggcagattgagctggaattttaatgcatagtacatttagtagagagacaagctgtcctatatactcctgtatacttcagaaatagctgatagcctatagtctctgagagctattctgtacatagcacagtattataattgatgttcataaataccctgagagattatgttaaaatacattattaatactcccacaaaagcagtaagttaataagtatttccaacaaaaggcagctttgtttcttaaacggataaacaacatataactaggaagatcatcttcaaaataaagtgtcatggaactgaaaatagagtatagtctaacaattattttgatacactattgaatagctaacaagtgtctaaagaattttttatttttatagaataggaagtttctaaaagaaaacaattaagagcaaaattggttttgagtatagaaactgaaggatggcagtcttaactcctaagttttttacagagcacagattggtaaactagcatgccacctgttttttgtactatctgtgagctgagactggtttttacattttttaatggtgaaaaaagtcaaaagaaggaggacattttgtgacacatgaaaacatattaaattaaaatttcagtatccagaaataaagttttattggaacagctgtgcttattgtctttagctgctttcctggtacagtggctgagtttagtagtatagcagagtctgtatggcttccaacagtcaaaatactgcctggccttttaaagagtttgtcaatcccttttatggaggaaggttttgctcatgcatggcatgttagtcaatttagttatttgcttctagctggcagaatgtggtcttgattacttaatttctgttacccctgtgttttccagaatggcttctcctgattttacttacgtgttttactattgctcaaattacagatactaggaaacactactactttataagtacacttctttttcctacttaaactctcaaactacagttacgtatttgccatgatgttaagggaccttgatggtctgtgaattatcagttgctttctgcactacctcctgtagatagacctgactgatagcacttacaaaaagactgatagatgccaaatcagtcatttattaaccctctaatattgttgtcccgatcatttggtaaacgctaagagagcttagttttacattcacaaagtatttgtatttgataagtcttaaaaatgatttaagttgaagcctaacagaagtacttgttcattcctcagttacctgcaaataatggaaataatggtgcagtcagttttatttgattgtgtaatgctttatactaggggtctcaaacccctgggtggcattagattcttacaggagcgtgaaccctattgtgaactgcacatgcaagagatctaggttgtgcgctcattatgagaatctaatacccgatgatctgaggtggaacagtctcatcctgaaaccatctaccccaacacctgtgtctgtggaaattgtctccacgaaaccggtccctgttgaaaaaaggttaggggaccactgctttatacagtgtttgaagtaggcacacttacagttactatttctggttctttatgactgttgaggggggcagaattctatgtttgattcacagtaaaacttttcatgaatcattgagggttaactgttatcacttgccaatggaaactggatattgaaacatttttttaagaaatgcacttttacctgaaataaaactataaaaactaaaaaaaaata

SEQ ID NO: 376533 - DNA, 1772 bp, Homo sapiens
tgggcggacgcgtgggttcatgcagcagcagttgactgaatatttgctaatgcaaatgaataaaatcttagtaaattctgcattaagattttattcatttgcattagcaaatattcatgcagcagcagttgactgaaaatttattcttatgagacgtatagtattcatttttaaatgcatgattgtacattatgtatagacgacaatgtttttaatttataaatttcattctttgttaattgcatgggtttttctgcagcttattgtgaataccttggttctgttcaatagaaacattttgtatatattaaatactgaaatatcagtatcgacggtggaagtgcttcatgggcttgctgcacatatttgtaggatactgtatctgcaaatgcaacaacaaatagttttgtacttggttaacagtcttagttaaaacatgagtttattttctaaaagtatccagaataagtaaaattatagaaataagaaaatgttacacaactttgctgttcatacccttaccttcttactacttttggtttggaggagggtatcaccactagaaagtgtgcctccttaagatttcttaaaggaaagttagtttcagtatttcacagcaagttggactacaaaatctagagttgatctgctttttaaaccttcatttaaaagcaaacttggaagaaatttgaaactgatgtttttaatatatgtctgtgttgcctaggttttctttttttaaagaggtatgtaattaaaacctttgtaaaatttgccaactaatattagtgcctgacttcccatatttgtttcatctttttaactgacagtatatctcacttcttctttgaatagaatgagtgagtgatctcagttttcacattttattcagaagctaatccctacttagcaaggcacacattctacagcaagtcatagaaagtttaatccttgtgcctccttagctctcgtatattcagggatctctataaaagttggtgtcttttttcatcatcataaattcatcataatcacagatatttttgggtctaagatattcatataccaaggatggttttgtaaagaattctgggatcattgaattaaggattgtggcttgaagtaactaaagaaaaatactaatttccttaaaaggaattataattatgatttacattttacatcattaatttcccaaattatatttaaccgtaaggaggtgcacatgagtttttagcaaacaggtatgaataagcagctatgtatatgtgtttggggcagaggggagcagattactttaacacacttcagaattaaaatcagttcgtttcatgactctgtgccttaacgtttgtgtgaactaaacttgctgattgaatgaaattcttgggaagccgaacagtaatagcagaaaatgtgaccaaatgagtatcatgtacttaaatcactgaattttatataagcacaagtattaattttaaaaacattatagtttaataaagctgcatttaaaaatatttgggagcaaagacaagcatgctaaatcttcattttgctatggctataagcatatatttttggcaacttatttgcaatattcttgccttaaagtttcctgcaaatttcccccttagtaattcccgaatagcaaaacattaatattccatgattagctctattgtgttgtctcactattaaaatggaattcgttttttcaaatcttttctaatggttaataaaacaaatgtcagatcataataacactcaaatgt

SEQ ID NO: 376534 - DNA, 1010 bp, Homo sapiens
accagaagcattaaatgttatcgtaaggctaattgaacaagccccaattcaaatgggagaagaggcagtgaggtgggcaaaactggtcatacctttagtggttcattcagcacaaaaggtacatttgcggggagcaactgctctggagatgggaatgccattattgcttcagaaacagcaagaaatagcatctattacggagcagcttatgactactaaattaatctcagaacttcagaagctatttatgagtaaaaatgagacttacgtgttaaaattatggcctttgtttgtcaaactacttggaaggaccttgcatcgaagtgggagtttcatcaattctctcttgcaactagaagaacttggatttcgtagtggagcacccatgattaaaaagatagcttttattgcttggaagagtttaatagataattttgctttaaatccagatatactatgtagtgcaaaaagactcaagttgttaatgcagcctttgagttccatccatgtgagaacagaaactctagcattaacaaaactagaagtctggtggtatttactgatgagacttggacctcatcttcctgctaattttgaacaggtttgtgtgcctctgattcaaagtacaataagcattgattctaatgcctcacctcagggcaattcgtgtcatgtagctacatctccaggtttaaatcctatgactcctgtacacaaaggtgcttcctccccgtacggagccccgggaactccccgaatgaacctgagttcgaatttaggtggaatggccacaatcccatccattcaacttttgggacttgaaatgttgcttcatttcttgtgggtccagaagccttgagttttgctaagcaaataaacttgtgctgagcttagaaaaaaaaaaaaaaatgttggggggtggccacagaaatttaaaccactcgtggggggccgtggtaggacggctcacgtccaggaccggtcgcgaggggttccacacaaaagcgggg

SEQ ID NO: 376535 - DNA, 1289 bp, Homo sapiens
ctcgccaagtaccgagctaatattttcttgattgtgtttgactcgctccatctcgggagtgacagctaaaggagttcccttgcccatgttttctttgtataacacctgtgcgatgagaaagcatccagaaaaacaaccatgagtaacatttcatttgttgagaggttttaagggtaaggtcaacttccttgttaagaaaacacagtcgtccaaggagccagaagttatatgctgacaaaatgccaccagctactttagtggaagctgttgttgggatggggaatctgcaccctctagagaagcagggacctcagctgctggggaaaggctgtcagagttatccatgttattttttttcatttttgtgagtacggtgcctcctaaacaatcacatgaggatttgagactgttagaactcagtgttgttatccacacaaacggaaacattcattatttttaaaaaatgattgaaaatatcagatgaagtaaaaaattgacattaactgtattatagaaatgggaaagtatatccttttgtaatataagatgtattagaagcaaagaagggaaatgggcttcaaacaaaaataaataaatgtaaagatcagtttaattctgaagttaagtggcattttttcccctttctttccaaaataccgagctaaggttttcttgattgtgtttgactctctgcatctcaggagtgatggggattggaattcctgtccccaggttttctttgtatagcacctgtatgatgagaaagcatccagaacaaaaaaagcaatcaatcagtcattttccccctgctttggagcagttgggagtgggaagggaggaagagagtaagttagaggaagagaaatacagaagcttttagactcaacctgtttgtttgagcctaaagacatcttcaaaagcaaaggaatgcaggaaagagcagcaaaaactaagaaataggaaaagaaaggttgttattttcattgtttgaactaatctctgcagcactgagcaaccgtgaaagagcaattagtcttttcccaccttgttacaaggagggaaaaaagtagaaacagacaagaaaccaaggaagttacttttgatttgaaaatgctgttaatcacatagggatatttgggttttacaaacattgtgtatatggagacacatacacacaactcttcttttgttcactttcaaaagaagtcagagtatttaatttttagtttgggtgaacacattgagaacaacgatgtttaaggcaaatggagagcaatgataaggtgcta

SEQ ID NO: 376536 - DNA, 838 bp, Homo sapiens
accagaagcattaaatgttatcgtaaggctaattgaacaagccccaattcaaatgggagaagaggcagtgaggtgggcaaaactggtcatacctttagtggttcattcagcacaaaaggtacatttgcggggagcaactgctctggagatgggaatgccattattgcttcagaaacagcaagaaatagcatctattacggagcagcttatgactactaaattaatctcagaacttcagaagctatttatgagtaaaaatgagacttacgtgttaaaattatggcctttgtttgtcaaactacttggaaggacacccaaagtggcaaagaattggagtcacacaacgtgcatgtttccagctgaggtcaagcaaggttacgctctgcctttttgttttagttctcataccttaaacaggtgtcctttttataatccatgtaatgccacatttttcacttttctgtgcttttcctggtggtttcactgtttaaatttggaacctaaagcttgggtccaggtgctttctagtttgtgttcctaagcaaaggaaggctgtgatatacccaatggtgaaaataaactttgttcaggcatgatttatagagctactggctgtgagtttgatgttagtgattcatttgtataaaatatcttctaatagacgttaagcaggttatatattgaacagctgacaaaagtgttgtgtccagagaacctaaccctgtatttcccatgggagtgatcactcagtatttgccaatttagtgttcaaggctactttatataatagaaaaccataactactatgaataatgagagagaatcaactgtatgttca

SEQ ID NO: 376537 - DNA, 813 bp, Homo sapiens
ctctctccatctctggagtgataggtgttgggattcctttccccaaattttctttgtacaaaacctgtgagatacaagaaagtacccagaggacatttaaaacaggcacagagagtaaggaaggaaggaaatgggggaaggggttatatgtgaggaggcagttttttagtaagtaatatttagtaaggataatgtttttacttttttcacagttttaatgatgaactctacaatgctaattctggaaatgaaaaagtacaatggaaagcattaagttatataacgctgaggaatcttgttaattctacttatagtatttcaaatctagtcaagtcactgaaaatgttcaagtataatcggaaatgtgtctttccgatagccgttcctggtgagacatcctctttatataaaacctgggcattcagaatcaggacagtgttaacacagaagaaaagaaaacccagcagttcctggagaaagactaggacacatggcttttgtgaaaacaagacactagacgatgttcccaggggttttcgccatgaaccttgccatgggtgaggaaaagatactatattttctccccaataccaccaacgaagtaacagatgagtctttcatgctgtgatttgggattaagatacaaggtgagcccagagatgaattgggcacacatttcctggggcaggatgggagttgtggagggctgcacaacagccccactgcaagcctgggatatccagaggcatcttcctcagcacccctaggtgcctgtgggctgtgccttacatttaataaaaacttacaaggctg

SEQ ID NO: 376538 - DNA, 497 bp, Homo sapiens
ggccccctaagaaataccgagctaaagttctcttgattgcgtttgactctctccatctctggagtgataggtgttgggattcctttccccaaattttctttgtacaaaacctgtgagatacaagaaagtacccagaggacatttaaaacaggcacagagagtaaggaaggaaggaaatgggggaaggggttatatgtgaggaggcagttttttagtaagtaatatttagtaaggataatgtttttacttttttcacagttttaatgatgaactctacaatgctaattctggaaatgaaaaagtacaatggaaagcattaagttatataacgctgaggaatcttgttaattctacttatagtatttcaaatctagtcaagtcactgaaaatgttcaagtataatcggaaatgtgagtcattttgtattaacataattttggtcaggtaataatacacaacacacacagacacacacagaattgctgttaagatgttac

SEQ ID NO: 376539 - DNA, 341 bp, Homo sapiens
gattacaggcgtgagccaccacacctggcccacagcagctgtttttttactggactgttttgcagcacttaaactctcatagacatatcagtaaaactgtaggccctcagacaaagcaaagggtttcccctaccctctttttctttgctatcctctatgctctgcctcttgctttagtttcatacaacattcagcttatcattaaggaataaggtttttggctcttatatcactatcatggcgaatcagtggaaaatgagaaacatagtaacacatcatgataaatcctcaacctcggtatctcccctcagtgtcattcttggaaacgtgggagatttagg

SEQ ID NO: 376540 - DNA, 727 bp, Homo sapiens
gggtatattttatattttatataaatagctgcatagcagggaatgcattcttggacaggaggacttataaatatacttaagccatttttattcagtttttaattttttaattattgagttttaaatttatataacatgaaataattgaagatgggcattgtcaacaatgtaatttgcatcataatgaattttccaaattctaccattataagggtccaataggctaattctttgcatttgtccaatacattaattggaataatttatttggtaactacatgtgactggtactaggatgatgttagaaatgagctttgtctgagttcatgttttccagagttttaaaaagttaaaattagtctaccagtaatgtgtacagttcagatgttgatgtatataaacaaatttaggtaatacatatttagggcaaatacagttgtaatgttcatattttttccaaattccactttttagcctgtttgtgcatggaaacgatctgtaaaatggaatatattaaggctccatttaatgaaatttatattatgtgaggcttttaaaaactgtgacagttgtatagtttatagatcgatgttttcttttaccccataggtttgtgtgcctctgattcaaagtacaataagcattgattctaatgcctcacctcagggcaattcgtgtcatgtagctacatctccaggtttaaatcctatgactcctgtacacaaag

SEQ ID NO: 376541 - DNA, 329 bp, Homo sapiens
ctgataatttgtcgagttataaagagggatatatatttaaggcaacagtgggggttagtttaaaattgtcttaattttaaaaattgaaatagcaacatatattctgtgagttaatatttagtatatgttttgcttttattttttcgtttttcctagttagaaaagctactgggagaaattattgcttgtctgcaattcagctacaccggaacttatgatagtgaacttcttgaacaactctccccactattatgcataatatttctgcacaagaataaacagattcgaaaacagagtgctcagttctggaatgccacttttgccaaagt

SEQ ID NO: 376542 - DNA, 9144 bp, Homo sapiens
accagaagcattaaatgttatcgtaaggctaattgaacaagccccaattcaaatgggagaagaggcagtgaggtgggcaaaactggtcatacctttagtggttcattcagcacaaaaggtacatttgcggggagcaactgctctggagatgggaatgccattattgcttcagaaacagcaagaaatagcatctattacggagcagcttatgactactaaattaatctcagaacttcagaagctatttatgagtaaaaatgagacttacgtgttaaaattatggcctttgtttgtcaaactacttggaaggaccttgcatcgaagtgggagtttcatcaattctctcttgcaactagaagaacttggatttcgtagtggagcacccatgattaaaaagatagcttttattgcttggaagagtttaatagataattttgctttaaatccagatatactatgtagtgcaaaaagactcaagttgttaatgcagcctttgagttccatccatgtgagaacagaaactctagcattaacaaaactagaagtctggtggtatttactgatgagacttggacctcatcttcctgctaattttgaacaggtttgtgtgcctctgattcaaagtacaataagcattgattctaatgcctcacctcagggcaattcgtgtcatgtagctacatctccaggtttaaatcctatgactcctgtacacaaaggtgcttcctccccgtacggagccccgggaactccccgaatgaacctgagttcgaatttaggtggaatggccacaatcccatccattcaacttttgggacttgaaatgttgcttcatttcttgtgggtccagaagccttgagttttgctaagcaaataaacttgtgctgagcttagagccattggaacatccgttaatcagcagcccttcctttttttccaaacatgcaaatacacttatcactgctgttcatgatagctttgttgcagttggaaaagatgcccccgatgtggttgtcagtgctatctggaaggagctaattagcttggtgaagtcagttactgaatcaggtaacaaaaaagagaaaccaggttctgaagttttgactctcttattaaagtctttggaaagcatagtaaagtctgaagtatttcctgtatcaaaaacgctggtcctcatggaaattacaattaaaggacttcctcagaaagtattaggttcaccagcatatcaggttgctaatatggatattcttaatggaactccagctttgttcttaattcaattaattttcaacaatttcttggaatgtggtgtatcagatgaaaggttctttctcagtttggaatcacttgtaggctgtgttctttctggtccaacttcaccactagctttcagtgactcagttttaaatgttattaatcaaaatgcaaagcagttggaaaataaggagcatctctggaaaatgtggagtgttatagtcaccccattaactgaattgattaatcagaccaatgaagtaaatcaaggtgatgccttagaacataattttagtgccatctatggtgcattgactttaccagtaaaccacattttttcagaacagagatttccagtggccaccatgaagactttgcttagaacttggtcagaattatatagagcatttgctcgttgtgctgctttggtggcaacagcagaagagaacttgtgctgtgaggaactttcttccaagataatgtccagtttggaagatgaaggcttttctaatttgttgttcgtggatagaattatttatattattactgtaatggttgattgcattgacttctcaccatataatattaaatatcagcccaaagttaaatcaccacagagaccttcagattggtccaaaaagaagaatgagcccctagggaaattgacttctttatttaaacttattgtgaaagtgatctattctttccacacactgagcttcaaggaagcacattctgataccctcttcactattggcaactcaatcaccggcattatttccagtgtacttgggcatatttctttgccttctatgatccgaaaaatatttgcaactttaacaagacctctggcattattttatgaaaactcaaagcttgatgaagttcctaaagtatatagttgtctgaacaacaagttagaaaagctactgggagaaattattgcttgtctgcaattcagctacaccggaacttatgatagtgaacttcttgaacaactctccccactattatgcataatatttctgcacaagaataaacagattcgaaaacagagtgctcagttctggaatgccacttttgccaaagtgatgatgttggtttatcctgaagagttaaaaccagtactaacacaagccaaacaaaaatttctgctcctgttgcctggtttggaaactgttgaaatgatggaggaatccagtggaccatattctgatggaacagaaaattcacaactaaatgtgaagataagtggcatggagagaaaatcaaatggaaaaagagattcatttttggcacaaacaaagaataaaaaagaaaatatgaaaccagcagccaaactgaaacttgaatcttcgtctttaaaagtaaagggtgaaattcttttggaagaggaaaagtctactgactttgtgtttatacctccagaaggaaaagatgcaaaggaaagaatattaactgatcatcaaaaagaagttctcaaaacaaagcggtgtgatattcctgccatgtataataatctggatgtttcccaagataccttatttactcagtatagtcaggaagagcctatggaaattcctactttaaccagaaaaccaaaggaggattctaagatgatgattacggaggagcaaatggacagtgacattgtcattcctcaagatgtcacggaagactgtggtatggctgaacatcttgaaaagtcctccctttcgaataatgagtgtggttctcttgacaaaaccagtccagaaatgtcaaacagtaataatgatgaaagaaaaaaagctttaatttcatcaaggaaaacatcaactgaatgtgcatctagtacagaaaattctttcgttgtcagcagtagttcagtttctaataccactgttgctggaactcccccataccctacaagtcggaggcaaacctttattactttggagaagtttgatggttcagaaaatagaccttttagtccatcccccttgaataatatttcatcaactgttacagtgaaaaataaccaggaaaccatgattaaaacagattttctaccaaaagcaaagcaaagagaagggactttttcaaaatctgattctgaaaaaatagtgaatggaactaagagatcaagccggagagctggtaaagctgaacaaacagggaataaaaggtctaagcccttaatgagatctgagccggagaaaaatactgaggaatctgttgaaggcattgtagtcttagaaaataacccacctggtttgcttaatcaaacagaatgtgtgtcagataatcaggttcatctttctgaatctacaatggagcatgacaatacaaagcttaaagcagcaacagtggaaaatgctgtattattggaaactaatactgtagaggagaaaaatgtagaaattaatttggaatccaaagagaatacacccccagtagtaatatcagcagatcaaatggtaaatgaggatagtcaggttcagataactccaaatcagaaaacccttagacggtcttcaaggcgacgttcagaagtagtagagtctaccactgaaagccaagataaggaaaatagtcatcaaaaaaaggaacgacgtaaggaagaagaaaaacctcttcagaagagtccattgcatataaaagatgatgtgttacctaaacaaaaactgattgctgaacaaactctacaggagaatttaattgagaaaggaagtaatttacatgagaagactcttggggaaactagtgctaatgcagaaactgaacaaaataaaaaaaaggcagaccctgagaacattaagtctgagggggatggtacccaggacattgtagataagtcctctgagaaactagtcagaggccgaacacggtatcaaactagaagagcatctcagggtttgctttccagcattgaaaactcagaatctgatagttcggaggcaaaagaagaaggttctaggaagaagagatctggaaaatggaaaaacaaaagcaatgaaagtgttgacattcaagatcaagaagagaaagtggtgaaacaggaatgtataaaagctgaaaatcagtcacatgattataaagcaacttctgaagaagatgtaagcataaaatctccgatttgcgaaaaacaagatgaaagtaatactgtaatatgtcaggattctacagtaacttcagatttgttgcaagttcctgatgatttaccaaatgtgtgtgaggaaaaaaatgaaactagcaaatatgcagaatattcctttacaagtctacctgtgccagaatcaaatctaaggactagaaatgccattaagagattacataagcgagactcttttgataattgtagtttgggagaatcctcaaaaatagggatatcagatatttcttcgctttcagaaaaaacttttcaaacacttgaatgccaacacaagagaagtaggagggtgaggagatctaaaggttgtgattgctgtggggaaaaatcacaacctcaggaaaagtcactcattgggttaaagaatacagaaaataatgacgtagagattagtgaaacaaaaaaggcagatgtgcaagcacctgtaagcccatcagaaacttctcaagctaatccatattctgaaggacaatttttagatgaacatcatagtgtgaattttcatttgggtctcaaagaggataatgatactattaatgattcattaattgtttctgaaaccaaatcaaaagaaaacactatgcaagaatctcttccttctggaatagtaaactttagagaggaaatttgtgatatggattctagtgaagcaatgtctcttgaaagccaggagtcacctaatgaaaattttaaaactgttggcccgtgtttaggagactcgaaaaatgtttcacaggaatctttggagacaaaagaagaaaaaccagaagaaaccccaaaaatggaactgagtctagagaatgttactgttgaaggaaatgcatgtaaagtaacagaatccaatctagagaaagcaaaaactatggaattgaatgtaggaaatgaagctagctttcatggacaagagagaaccaaaactggtatttctgaagaagcagcaatagaagaaaataaaagaaatgatgactctgaagcagacacagctaaactgaatgccaaagaagtagcaactgaggaatttaattcagatattagtctttctgataatactacacctgtaaaattgaatgctcaaactgagatttctgaacaaacagcagctggggaactagatggaggaaatgatgtatctgatctacactcatctgaagaaacgaataccaaaatgaaaaattatgaagaaatgatgatcggcgaggcaatggctgaaactggccatgatggtgaaacagagaatgagggcataactaccaaaacctcaaagcctgatgaagctgaaacaaacatgttgactgcagaaatggacaactttgtttgtgacacagttgaaatgagcactgaagaaggaatcattgacgctaataaaactgaaacaaatactgagtatagtaaatctgaagaaaaattagataacaatcaaatggtaatggaaagtgatattttacaggaagatcaccatacttcacagaaagtggaggaaccatcacagtgtctggcatctggaacagctatctctgagctaataatagaagacaataatgcatctcctcaaaaactaagggaacttgatccttcacttgtgtcagcaaatgacagtcctagtggcatgcagacacgctgtgtctggtctcctttggcttctccgtctacgagcattttaaagagaggactaaaaagatcccaagaagatgaaatctcatcacctgttaataaggttcgccgtgtctcctttgcagatccaatataccaagcaggattggcagatgacattgatagacggtgctctattgttaggtcccattcttccaatagttctcccataggaaaaagtgttaaaacttctcctactacacaatctaagatttcagaaatggccaaagaatccataccatgcccaacagaaagtgtttacccaccattggtgaactgtgtggcaccagttgacatcattttacctcagattacatcaaacatgtgggcaagaggcctgggacaactcattagagctaagaatataaaaactattggtgatttgagtactcttacagcatctgaaataaaaactcttcctatccgttctccaaaagtgtccaatgtaaaaaaggctctcagaatatatcatgagcagcaggtgaagactcgtggactagaagagattccagtttttgatatttctgaaaaaacagtaaatggaatagaaaataaatctttgtcacctgatgaagaaagacttgtctcagatataattgatcctgttgctttagaaattccattatccaaaaaccttgtggcacagattagtgctcttgctcttcagctggattcagaagatcttcataattattcaggaagccaactatttgaaatgcacgagaaactaagttgtatggcaaactctgtaataaaaaatctacagtcacgttggagatcaccatcccatgaaaattctatttagtattttcagagaaaattgaaggtttttttaaacatcactggatttcttgattgaggaaacaagttctgaaataatagcacaatttcaaagaagagactctttgcaaagttgataacatttcaaaccctgaaggacagtgacttattatgtaagttcaattttgtaagttcattatgtaagatccttttttttttcataatatgtattcttggctgctatgcgtggtttttcaggaaatttaattatcttactgagatgtgaaagcaaaactagtaacagaacttacattttatttcatgctttcttaaacccgtgcatattctggtgaaacatgtaaaatactttaagtaaaattgaacatttttatttgaatttttgctgaactgataaaggtgtttatatttttgtttgtttgtttgtttaattcatgtttgttgggactgaggtttaggaagtttgttactggttaaaaacctcaaatgaaatgcgaaagaatttgaatttttcctgcatatgtcaactttggacagctttcaagaaaaatgagaaaagtttcaacttctggcggttaaaatattaatgcagaatttactaagattttattcatttgcattagcaaatattcatgcagcagcagttgactgaaaatttattcttatgagacgtatagtattcatttttaaatgcatgattgtacattatgtatagacgacaatgtttttaatttataaatttcattctttgttaattgcatgggtttttctgcagcttattgtgaataccttggttctgttcaatagaaacattttgtatatattaaatactgaaatatcagtatcgacggtggaagtgcttcatgggcttgctgcacatatttgtaggatactgtatctgcaaatgcaacaacaaatagttttgtacttggttaacagtcttagttaaaacatgagtttattttctaaaagtatccagaataagtaaaattatagaaataagaaaatgttacacaactttgctgttcatacccttaccttcttactacttttggtttggaggagggtatcaccactagaaagtgtgcctccttaagatttcttaaaggaaagttagtttcagtatttcacagcaagttggactacaaaatctagagttgatctgctttttaaaccttcatttaaaagcaaacttggaagaaatttgaaactgatgtttttaatatatgtctgtgttgcctaggttttctttttttaaagaggtatgtaattaaaacctttgtaaaatttgccaactaatattagtgcctgacttcccatatttgtttcatctttttaactgacagtatatctcacttcttctttgaatagaatgagtgagtgatctcagttttcacattttattcagaagctaatccctacttagcaaggcacacattctacagcaagtcatagaaagtttaatccttgtgcctccttagctctcgtatattcagggatctctataaaagttggtgtcttttttcatcatcataaattcatcataatcacagatatttttgggtctaagatattcatataccaaggatggttttgtaaagaattctgggatcattgaattaaggattgtggcttgaagtaactaaagaaaaatactaatttccttaaaaggaattataattatgatttacattttacatcattaatttcccaaattatatttaaccgtaaggaggtgcacatgagtttttagcaaacaggtatgaataagcagctatgtatatgtgtttggggcagaggggagcagattactttaacacacttcagaattaaaatcagttcgtttcatgactctgtgccttaacgtttgtgtgaactaaacttgctgattgaatgaaattcttgggaagccgaacagtaatagcagaaaatgtgaccaaatgagtatcatgtacttaaatcactgaattttatataagcacaagtattaattttaaaaacattatagtttaataaagctgcatttaaaaatatttgggagcaaagacaagcatgctaaatcttcattttgctatggctataagcatatatttttggcaacttatttgcaatattcttgccttaaagtttcctgcaaatttcccccttagtaattcccgaatagcaaaacattaatattccatgattagctctattgtgttgtctcactattaaaatggaattcgttttttcaaatcttttctaatggttaataaaacaaatgtcagatcataataacactcaaatgt

SEQ ID NO: 376543 - DNA, 7775 bp, Homo sapiens
accagaagcattaaatgttatcgtaaggctaattgaacaagccccaattcaaatgggagaagaggcagtgaggtgggcaaaactggtcatacctttagtggttcattcagcacaaaaggtacatttgcggggagcaactgctctggagatgggaatgccattattgcttcagaaacagcaagaaatagcatctattacggagcagcttatgactactaaattaatctcagaacttcagaagctatttatgagtaaaaatgagacttacgtgttaaaattatggcctttgtttgtcaaactacttggaaggaccttgcatcgaagtgggagtttcatcaattctctcttgcaactagaagaacttggatttcgtagtggagcacccatgattaaaaagatagcttttattgcttggaagagtttaatagataattttgctttaaatccagatatactatgtagtgcaaaaagactcaagttgttaatgcagcctttgagttccatccatgtgagaacagaaactctagcattaacaaaactagaagtctggtggtatttactgatgagacttggacctcatcttcctgctaattttgaacaggtttgtgtgcctctgattcaaagtacaataagcattgattctaatgcctcacctcagggcaattcgtgtcatgtagctacatctccaggtttaaatcctatgactcctgtacacaaaggtgcttcctccccgtacggagccccgggaactccccgaatgaacctgagttcgaatttaggtggaatggccacaatcccatccattcaacttttgggacttgaaatgttgcttcatttcttgtgggtccagaagccttgagttttgctaagcaaataaacttgtgctgagcttagagccattggaacatccgttaatcagcagcccttcctttttttccaaacatgcaaatacacttatcactgctgttcatgatagctttgttgcagttggaaaagatgcccccgatgtggttgtcagtgctatctggaaggagctaattagcttggtgaagtcagttactgaatcaggtaacaaaaaagagaaaccaggttctgaagttttgactctcttattaaagtctttggaaagcatagtaaagtctgaagtatttcctgtatcaaaaacgctggtcctcatggaaattacaattaaaggacttcctcagaaagtattaggttcaccagcatatcaggttgctaatatggatattcttaatggaactccagctttgttcttaattcaattaattttcaacaatttcttggaatgtggtgtatcagatgaaaggttctttctcagtttggaatcacttgtaggctgtgttctttctggtccaacttcaccactagctttcagtgactcagttttaaatgttattaatcaaaatgcaaagcagttggaaaataaggagcatctctggaaaatgtggagtgttatagtcaccccattaactgaattgattaatcagaccaatgaagtaaatcaaggtgatgccttagaacataattttagtgccatctatggtgcattgactttaccagtaaaccacattttttcagaacagagatttccagtggccaccatgaagactttgcttagaacttggtcagaattatatagagcatttgctcgttgtgctgctttggtggcaacagcagaagagaacttgtgctgtgaggaactttcttccaagataatgtccagtttggaagatgaaggcttttctaatttgttgttcgtggatagaattatttatattattactgtaatggttgattgcattgacttctcaccatataatattaaatatcagcccaaagttaaatcaccacagagaccttcagattggtccaaaaagaagaatgagcccctagggaaattgacttctttatttaaacttattgtgaaagtgatctattctttccacacactgagcttcaaggaagcacattctgataccctcttcactattggcaactcaatcaccggcattatttccagtgtacttgggcatatttctttgccttctatgatccgaaaaatatttgcaactttaacaagacctctggcattattttatgaaaactcaaagcttgatgaagttcctaaagtatatagttgtctgaacaacaagttagaaaagctactgggagaaattattgcttgtctgcaattcagctacaccggaacttatgatagtgaacttcttgaacaactctccccactattatgcataatatttctgcacaagaataaacagattcgaaaacagagtgctcagttctggaatgccacttttgccaaagtgatgatgttggtttatcctgaagagttaaaaccagtactaacacaagccaaacaaaaatttctgctcctgttgcctggtttggaaactgttgaaatgatggaggaatccagtggaccatattctgatggaacagaaaattcacaactaaatgtgaagataagtggcatggagagaaaatcaaatggaaaaagagattcatttttggcacaaacaaagaataaaaaagaaaatatgaaaccagcagccaaactgaaacttgaatcttcgtctttaaaagtaaagggtgaaattcttttggaagaggaaaagtctactgactttgtgtttatacctccagaaggaaaagatgcaaaggaaagaatattaactgatcatcaaaaagaagttctcaaaacaaagcggtgtgatattcctgccatgtataataatctggatgtttcccaagataccttatttactcagtatagtcaggaagagcctatggaaattcctactttaaccagaaaaccaaaggaggattctaagatgatgattacggaggagcaaatggacagtgacattgtcattcctcaagatgtcacggaagactgtggtatggctgaacatcttgaaaagtcctccctttcgaataatgagtgtggttctcttgacaaaaccagtccagaaatgtcaaacagtaataatgatgaaagaaaaaaagctttaatttcatcaaggaaaacatcaactgaatgtgcatctagtacagaaaattctttcgttgtcagcagtagttcagtttctaataccactgttgctggaactcccccataccctacaagtcggaggcaaacctttattactttggagaagtttgatggttcagaaaatagaccttttagtccatcccccttgaataatatttcatcaactgttacagtgaaaaataaccaggaaaccatgattaaaacagattttctaccaaaagcaaagcaaagagaagggactttttcaaaatctgattctgaaaaaatagtgaatggaactaagagatcaagccggagagctggtaaagctgaacaaacagggaataaaaggtctaagcccttaatgagatctgagccggagaaaaatactgaggaatctgttgaaggcattgtagtcttagaaaataacccacctggtttgcttaatcaaacagaatgtgtgtcagataatcaggttcatctttctgaatctacaatggagcatgacaatacaaagcttaaagcagcaacagtggaaaatgctgtattattggaaactaatactgtagaggagaaaaatgtagaaattaatttggaatccaaagagaatacacccccagtagtaatatcagcagatcaaatggtaaatgaggatagtcaggttcagataactccaaatcagaaaacccttagacggtcttcaaggcgacgttcagaagtagtagagtctaccactgaaagccaagataaggaaaatagtcatcaaaaaaaggaacgacgtaaggaagaagaaaaacctcttcagaagagtccattgcatataaaagatgatgtgttacctaaacaaaaactgattgctgaacaaactctacaggagaatttaattgagaaaggaagtaatttacatgagaagactcttggggaaactagtgctaatgcagaaactgaacaaaataaaaaaaaggcagaccctgagaacattaagtctgagggggatggtacccaggacattgtagataagtcctctgagaaactagtcagaggccgaacacggtatcaaactagaagagcatctcagggtttgctttccagcattgaaaactcagaatctgatagttcggaggcaaaagaagaaggttctaggaagaagagatctggaaaatggaaaaacaaaagcaatgaaagtgttgacattcaagatcaagaagagaaagtggtgaaacaggaatgtataaaagctgaaaatcagtcacatgattataaagcaacttctgaagaagatgtaagcataaaatctccgatttgcgaaaaacaagatgaaagtaatactgtaatatgtcaggattctacagtaacttcagatttgttgcaagttcctgatgatttaccaaatgtgtgtgaggaaaaaaatgaaactagcaaatatgcagaatattcctttacaagtctacctgtgccagaatcaaatctaaggactagaaatgccattaagagattacataagcgagactcttttgataattgtagtttgggagaatcctcaaaaatagggatatcagatatttcttcgctttcagaaaaaacttttcaaacacttgaatgccaacacaagagaagtaggagggtgaggagatctaaaggttgtgattgctgtggggaaaaatcacaacctcaggaaaagtcactcattgggttaaagaatacagaaaataatgacgtagagattagtgaaacaaaaaaggcagatgtgcaagcacctgtaagcccatcagaaacttctcaagctaatccatattctgaaggacaatttttagatgaacatcatagtgtgaattttcatttgggtctcaaagaggataatgatactattaatgattcattaattgtttctgaaaccaaatcaaaagaaaacactatgcaagaatctcttccttctggaatagtaaactttagagaggaaatttgtgatatggattctagtgaagcaatgtctcttgaaagccaggagtcacctaatgaaaattttaaaactgttggcccgtgtttaggagactcgaaaaatgtttcacaggaatctttggagacaaaagaagaaaaaccagaagaaaccccaaaaatggaactgagtctagagaatgttactgttgaaggaaatgcatgtaaagtaacagaatccaatctagagaaagcaaaaactatggaattgaatgtaggaaatgaagctagctttcatggacaagagagaaccaaaactggtatttctgaagaagcagcaatagaagaaaataaaagaaatgatgactctgaagcagacacagctaaactgaatgccaaagaagtagcaactgaggaatttaattcagatattagtctttctgataatactacacctgtaaaattgaatgctcaaactgagatttctgaacaaacagcagctggggaactagatggaggaaatgatgtatctgatctacactcatctgaagaaacgaataccaaaatgaaaaattatgaagaaatgatgatcggcgaggcaatggctgaaactggccatgatggtgaaacagagaatgagggcataactaccaaaacctcaaagcctgatgaagctgaaacaaacatgttgactgcagaaatggacaactttgtttgtgacacagttgaaatgagcactgaagaaggaatcattgacgctaataaaactgaaacaaatactgagtatagtaaatctgaagaaaaattagataacaatcaaatggtaatggaaagtgatattttacaggaagatcaccatacttcacagaaagtggaggaaccatcacagtgtctggcatctggaacagctatctctgagctaataatagaagacaataatgcatctcctcaaaaactaagggaacttgatccttcacttgtgtcagcaaatgacagtcctagtggcatgcagacacgctgtgtctggtctcctttggcttctccgtctacgagcattttaaagagaggactaaaaagatcccaagaagatgaaatctcatcacctgttaataaggttcgccgtgtctcctttgcagatccaatataccaagcaggattggcagatgacattgatagacggtgctctattgttaggtcccattcttccaatagttctcccataggaaaaagtgttaaaacttctcctactacacaatctaagcataataccacttcagccaaaggatttctgtccccaggatcacgtagccctaaatttaagagctcaaagaagtgtttaatttcagaaatggccaaagaatccataccatgcccaacagaaagtgtttacccaccattggtgaactgtgtggcaccagttgacatcattttacctcagattacatcaaacatgtgggcaagaggcctgggacaactcattagagctaagaatataaaaactattggtgatttgagtactcttacagcatctgaaataaaaactcttcctatccgttctccaaaagtgtccaatgtaaaaaaggctctcagaatatatcatgagcagcaggtgaagactcgtggactagaagagattccagtttttgatatttctgaaaaaacagtaaatggaatagaaaataaatctttgtcacctgatgaagaaagacttgtctcagatataattgatcctgttgctttagaaattccattatccaaaaaccttgtggcacagattagtgctcttgctcttcagctggattcagaagatcttcataattattcaggaagccaactatttgaaatgcacgagaaactaagttgtatggcaaactctgtaataaaaaatctacagtcacgttggagatcaccatcccatgaaaattctatttagtattttcagagaaaattgaaggtttttttaaacatcactggatttcttgattgaggaaacaagttctgaaataatagcacaatttcaaagaagagactctttgcaaagttgataacatttcaaaccctgaaggacagtgacttattatgtaagttcaattttgtaagttcattatgtaagatccttttttttttcataatatgtattcttggctgctatgcgtggtttttcaggaaatttaattatcttactgagatgtgaaagcaaaactagtaacagaacttacattttatttcatgctttcttaaacccgtgcatattctggtgaaacatgtaaaatactttaagtaaaattgaacatttttatttgaatttttgctgaactgataaaggtgtttatatttttgtttgtttgtttgtttaattcatgtttgttgggactgaggtttaggaagtttgttactggttaaaaacctcaaatgaaatgcgaaagaatttgaatttttcctgcatatgtcaactttggacagctttcaagaaaaatgagaaaagtttcaacttctggcggttaaaatattaatgcagaatttactaagattttattcatttgcattagcaaatattcatgcagcagcagttgactgaaaatttattcttatgagacgtatagtattcatttttaaatgcatgattgtacattatgtatagacgacaatgtttttaatttataaatttcattctttgttaattgcatgggtttttctgcagcttattgtgaataccttggttctgttcaatagaaacattttgtatatattaaatactgaaatatca

SEQ ID NO: 376544 - DNA, 7947 bp, Homo sapiens
accagaagcattaaatgttatcgtaaggctaattgaacaagccccaattcaaatgggagaagaggcagtgaggtgggcaaaactggtcatacctttagtggttcattcagcacaaaaggtacatttgcggggagcaactgctctggagatgggaatgccattattgcttcagaaacagcaagaaatagcatctattacggagcagcttatgactactaaattaatctcagaacttcagaagctatttatgagtaaaaatgagacttacgtgttaaaattatggcctttgtttgtcaaactacttggaaggaccttgcatcgaagtgggagtttcatcaattctctcttgcaactagaagaacttggatttcgtagtggagcacccatgattaaaaagatagcttttattgcttggaagagtttaatagataattttgctttaaatccagatatactatgtagtgcaaaaagactcaagttgttaatgcagcctttgagttccatccatgtgagaacagaaactctagcattaacaaaactagaagtctggtggtatttactgatgagacttggacctcatcttcctgctaattttgaacaggtttgtgtgcctctgattcaaagtacaataagcattgattctaatgcctcacctcagggcaattcgtgtcatgtagctacatctccaggtttaaatcctatgactcctgtacacaaaggtgcttcctccccgtacggagccccgggaactccccgaatgaacctgagttcgaatttaggtggaatggccacaatcccatccattcaacttttgggacttgaaatgttgcttcatttcttgtgggtccagaagccttgagttttgctaagcaaataaacttgtgctgagcttagagccattggaacatccgttaatcagcagcccttcctttttttccaaacatgcaaatacacttatcactgctgttcatgatagctttgttgcagttggaaaagatgcccccgatgtggttgtcagtgctatctggaaggagctaattagcttggtgaagtcagttactgaatcaggtaacaaaaaagagaaaccaggttctgaagttttgactctcttattaaagtctttggaaagcatagtaaagtctgaagtatttcctgtatcaaaaacgctggtcctcatggaaattacaattaaaggacttcctcagaaagtattaggttcaccagcatatcaggttgctaatatggatattcttaatggaactccagctttgttcttaattcaattaattttcaacaatttcttggaatgtggtgtatcagatgaaaggttctttctcagtttggaatcacttgtaggctgtgttctttctggtccaacttcaccactagctttcagtgactcagttttaaatgttattaatcaaaatgcaaagcagttggaaaataaggagcatctctggaaaatgtggagtgttatagtcaccccattaactgaattgattaatcagaccaatgaagtaaatcaaggtgatgccttagaacataattttagtgccatctatggtgcattgactttaccagtaaaccacattttttcagaacagagatttccagtggccaccatgaagactttgcttagaacttggtcagaattatatagagcatttgctcgttgtgctgctttggtggcaacagcagaagagaacttgtgctgtgaggaactttcttccaagataatgtccagtttggaagatgaaggcttttctaatttgttgttcgtggatagaattatttatattattactgtaatggttgattgcattgacttctcaccatataatattaaatatcagcccaaagttaaatcaccacagagaccttcagattggtccaaaaagaagaatgagcccctagggaaattgacttctttatttaaacttattgtgaaagtgatctattctttccacacactgagcttcaaggaagcacattctgataccctcttcactattggcaactcaatcaccggcattatttccagtgtacttgggcatatttctttgccttctatgatccgaaaaatatttgcaactttaacaagacctctggcattattttatgaaaactcaaagcttgatgaagttcctaaagtatatagttgtctgaacaacaagttagaaaagctactgggagaaattattgcttgtctgcaattcagctacaccggaacttatgatagtgaacttcttgaacaactctccccactattatgcataatatttctgcacaagaataaacagattcgaaaacagagtgctcagttctggaatgccacttttgccaaagtgatgatgttggtttatcctgaagagttaaaaccagtactaacacaagccaaacaaaaatttctgctcctgttgcctggtttggaaactgttgaaatgatggaggaatccagtggaccatattctgatggaacagaaaattcacaactaaatgtgaagataagtggcatggagagaaaatcaaatggaaaaagagattcatttttggcacaaacaaagaataaaaaagaaaatatgaaaccagcagccaaactgaaacttgaatcttcgtctttaaaagtaaagggtgaaattcttttggaagaggaaaagtctactgactttgtgtttatacctccagaaggaaaagatgcaaaggaaagaatattaactgatcatcaaaaagaagttctcaaaacaaagcggtgtgatattcctgccatgtataataatctggatgtttcccaagataccttatttactcagtatagtcaggaagagcctatggaaattcctactttaaccagaaaaccaaaggaggattctaagatgatgattacggaggagcaaatggacagtgacattgtcattcctcaagatgtcacggaagactgtggtatggctgaacatcttgaaaagtcctccctttcgaataatgagtgtggttctcttgacaaaaccagtccagaaatgtcaaacagtaataatgatgaaagaaaaaaagctttaatttcatcaaggaaaacatcaactgaatgtgcatctagtacagaaaattctttcgttgtcagcagtagttcagtttctaataccactgttgctggaactcccccataccctacaagtcggaggcaaacctttattactttggagaagtttgatggttcagaaaatagaccttttagtccatcccccttgaataatatttcatcaactgttacagtgaaaaataaccaggaaaccatgattaaaacagattttctaccaaaagcaaagcaaagagaagggactttttcaaaatctgattctgaaaaaatagtgaatggaactaagagatcaagccggagagctggtaaagctgaacaaacagggaataaaaggtctaagcccttaatgagatctgagccggagaaaaatactgaggaatctgttgaaggcattgtagtcttagaaaataacccacctggtttgcttaatcaaacagaatgtgtgtcagataatcaggttcatctttctgaatctacaatggagcatgacaatacaaagcttaaagcagcaacagtggaaaatgctgtattattggaaactaatactgtagaggagaaaaatgtagaaattaatttggaatccaaagagaatacacccccagtagtaatatcagcagatcaaatggtaaatgaggatagtcaggttcagataactccaaatcagaaaacccttagacggtcttcaaggcgacgttcagaagtagtagagtctaccactgaaagccaagataaggaaaatagtcatcaaaaaaaggaacgacgtaaggaagaagaaaaacctcttcagaagagtccattgcatataaaagatgatgtgttacctaaacaaaaactgattgctgaacaaactctacaggagaatttaattgagaaaggaagtaatttacatgagaagactcttggggaaactagtgctaatgcagaaactgaacaaaataaaaaaaaggcagaccctgagaacattaagtctgagggggatggtacccaggacattgtagataagtcctctgagaaactagtcagaggccgaacacggtatcaaactagaagagcatctcagggtttgctttccagcattgaaaactcagaatctgatagttcggaggcaaaagaagaaggttctaggaagaagagatctggaaaatggaaaaacaaaagcaatgaaagtgttgacattcaagatcaagaagagaaagtggtgaaacaggaatgtataaaagctgaaaatcagtcacatgattataaagcaacttctgaagaagatgtaagcataaaatctccgatttgcgaaaaacaagatgaaagtaatactgtaatatgtcaggattctacagtaacttcagatttgttgcaagttcctgatgatttaccaaatgtgtgtgaggaaaaaaatgaaactagcaaatatgcagaatattcctttacaagtctacctgtgccagaatcaaatctaaggactagaaatgccattaagagattacataagcgagactcttttgataattgtagtttgggagaatcctcaaaaatagggatatcagatatttcttcgctttcagaaaaaacttttcaaacacttgaatgccaacacaagagaagtaggagggtgaggagatctaaaggttgtgattgctgtggggaaaaatcacaacctcaggaaaagtcactcattgggttaaagaatacagaaaataatgacgtagagattagtgaaacaaaaaaggcagatgtgcaagcacctgtaagcccatcagaaacttctcaagctaatccatattctgaaggacaatttttagatgaacatcatagtgtgaattttcatttgggtctcaaagaggataatgatactattaatgattcattaattgtttctgaaaccaaatcaaaagaaaacactatgcaagaatctcttccttctggaatagtaaactttagagaggaaatttgtgatatggattctagtgaagcaatgtctcttgaaagccaggagtcacctaatgaaaattttaaaactgttggcccgtgtttaggagactcgaaaaatgtttcacaggaatctttggagacaaaagaagaaaaaccagaagaaaccccaaaaatggaactgagtctagagaatgttactgttgaaggaaatgcatgtaaagtaacagaatccaatctagagaaagcaaaaactatggaattgaatgtaggaaatgaagctagctttcatggacaagagagaaccaaaactggtatttctgaagaagcagcaatagaagaaaataaaagaaatgatgactctgaagcagacacagctaaactgaatgccaaagaagtagcaactgaggaatttaattcagatattagtctttctgataatactacacctgtaaaattgaatgctcaaactgagatttctgaacaaacagcagctggggaactagatggaggaaatgatgtatctgatctacactcatctgaagaaacgaataccaaaatgaaaaattatgaagaaatgatgatcggcgaggcaatggctgaaactggccatgatggtgaaacagagaatgagggcataactaccaaaacctcaaagcctgatgaagctgaaacaaacatgttgactgcagaaatggacaactttgtttgtgacacagttgaaatgagcactgaagaaggaatcattgacgctaataaaactgaaacaaatactgagtatagtaaatctgaagaaaaattagataacaatcaaatggtaatggaaagtgatattttacaggaagatcaccatacttcacagaaagtggaggaaccatcacagtgtctggcatctggaacagctatctctgagctaataatagaagacaataatgcatctcctcaaaaactaagggaacttgatccttcacttgtgtcagcaaatgacagtcctagtggcatgcagacacgctgtgtctggtctcctttggcttctccgtctacgagcattttaaagagaggactaaaaagatcccaagaagatgaaatctcatcacctgttaataaggttcgccgtgtctcctttgcagatccaatataccaagcaggattggcagatgacattgatagacggtgctctattgttaggtcccattcttccaatagttctcccataggaaaaagtgttaaaacttctcctactacacaatctaagatttcagaaatggccaaagaatccataccatgcccaacagaaagtgtttacccaccattggtgaactgtgtggcaccagttgacatcattttacctcagattacatcaaacatgtgggcaagaggcctgggacaactcattagagctaagaatataaaaactattggtgatttgagtactcttacagcatctgaaataaaaactcttcctatccgttctccaaaagtgtccaatgtaaaaaaggctctcagaatatatcatgagcagcaggtgaagactcgtggactagaagagattccagtttttgatatttctgaaaaaacagtaaatggaatagaaaataaatctttgtcacctgatgaagaaagacttgtctcagatataattgatcctgttgctttagaaattccattatccaaaaaccttgtggcacagattagtgctcttgctcttcagctggattcagaagatcttcataattattcaggaagccaactatttgaaatgcacgagaaactaagttgtatggcaaactctgtaataaaaaatctacagtcacgttggagatcaccatcccatgaaaattctatttagtattttcagagaaaattgaaggtttttttaaacatcactggatttcttgattgaggaaacaagttctgaaataatagcacaatttcaaagaagagactctttgcaaagttgataacatttcaaaccctgaaggacagtgacttattatgtaagttcaattttgtaagttcattatgtaagatccttttttttttcataatatgtattcttggctgctatgcgtggtttttcaggaaatttaattatcttactgagatgtgaaagcaaaactagtaacagaacttacattttatttcatgctttcttaaacccgtgcatattctggtgaaacatgtaaaatactttaagtaaaattgaacatttttatttgaatttttgctgaactgataaaggtgtttatatttttgtttgtttgtttgtttaattcatgtttgttgggactgaggtttaggaagtttgttactggttaaaaacctcaaatgaaatgcgaaagaatttgaatttttcctgcatatgtcaactttggacagctttcaagaaaaatgagaaaagtttcaacttctggcggttaaaatattaatgcagaatttactaagattttattcatttgcattagcaaatattcatgcagcagcagttgactgaaaatttattcttatgagacgtatagtattcatttttaaatgcatgattgtacattatgtatagacgacaatgtttttaatttataaatttcattctttgttaattgcatgggtttttctgcagcttattgtgaataccttggttctgttcaatagaaacattttgtatatattaaatactgaaatatcaaagaacaacaacaatcataaacaaacaatttgtggcgcgcttgctcctgaaaggtttttaacacccttgtggcgccccgccatgtgatgtgcacgtgccacggtgtccaggacccggctggacatggtggctcttccaaaaacgcgggacggttctaacacaggctggcctggtcaaggacagcatcccgcggtggtattcatgcatggacagccacaccccctcctccccatacgaccaacctaccgta

SEQ ID NO: 376545 - DNA, 8556 bp, Homo sapiens
accagaagcattaaatgttatcgtaaggctaattgaacaagccccaattcaaatgggagaagaggcagtgaggtgggcaaaactggtcatacctttagtggttcattcagcacaaaaggtacatttgcggggagcaactgctctggagatgggaatgccattattgcttcagaaacagcaagaaatagcatctattacggagcagcttatgactactaaattaatctcagaacttcagaagctatttatgagtaaaaatgagacttacgtgttaaaattatggcctttgtttgtcaaactacttggaaggaccttgcatcgaagtgggagtttcatcaattctctcttgcaactagaagaacttggatttcgtagtggagcacccatgattaaaaagatagcttttattgcttggaagagtttaatagataattttgctttaaatccagatatactatgtagtgcaaaaagactcaagttgttaatgcagcctttgagttccatccatgtgagaacagaaactctagcattaacaaaactagaagtctggtggtatttactgatgagacttggacctcatcttcctgctaattttgaacaggtttgtgtgcctctgattcaaagtacaataagcattgattctaatgcctcacctcagggcaattcgtgtcatgtagctacatctccaggtttaaatcctatgactcctgtacacaaaggtgcttcctccccgtacggagccccgggaactccccgaatgaacctgagttcgaatttaggtggaatggccacaatcccatccattcaacttttgggacttgaaatgttgcttcatttcttgtgggtccagaagccttgagttttgctaagcaaataaacttgtgctgagcttagagccattggaacatccgttaatcagcagcccttcctttttttccaaacatgcaaatacacttatcactgctgttcatgatagctttgttgcagttggaaaagatgcccccgatgtggttgtcagtgctatctggaaggagctaattagcttggtgaagtcagttactgaatcaggtaacaaaaaagagaaaccaggttctgaagttttgactctcttattaaagtctttggaaagcatagtaaagtctgaagtatttcctgtatcaaaaacgctggtcctcatggaaattacaattaaaggacttcctcagaaagtattaggttcaccagcatatcaggttgctaatatggatattcttaatggaactccagctttgttcttaattcaattaattttcaacaatttcttggaatgtggtgtatcagatgaaaggttctttctcagtttggaatcacttgtaggctgtgttctttctggtccaacttcaccactagctttcagtgactcagttttaaatgttattaatcaaaatgcaaagcagttggaaaataaggagcatctctggaaaatgtggagtgttatagtcaccccattaactgaattgattaatcagaccaatgaagtaaatcaaggtgatgccttagaacataattttagtgccatctatggtgcattgactttaccagtaaaccacattttttcagaacagagatttccagtggccaccatgaagactttgcttagaacttggtcagaattatatagagcatttgctcgttgtgctgctttggtggcaacagcagaagagaacttgtgctgtgaggaactttcttccaagataatgtccagtttggaagatgaaggcttttctaatttgttgttcgtggatagaattatttatattattactgtaatggttgattgcattgacttctcaccatataatattaaatatcagcccaaagttaaatcaccacagagaccttcagattggtccaaaaagaagaatgagcccctagggaaattgacttctttatttaaacttattgtgaaagtgatctattctttccacacactgagcttcaaggaagcacattctgataccctcttcactattggcaactcaatcaccggcattatttccagtgtacttgggcatatttctttgccttctatgatccgaaaaatatttgcaactttaacaagacctctggcattattttatgaaaactcaaagcttgatgaagttcctaaagtatatagttgtctgaacaacaagttagaaaagctactgggagaaattattgcttgtctgcaattcagctacaccggaacttatgatagtgaacttcttgaacaactctccccactattatgcataatatttctgcacaagaataaacagattcgaaaacagagtgctcagttctggaatgccacttttgccaaagtgatgatgttggtttatcctgaagagttaaaaccagtactaacacaagccaaacaaaaatttctgctcctgttgcctggtttggaaactgttgaaatgatggaggaatccagtggaccatattctgatggaacagaaaattcacaactaaatgtgaagataagtggcatggagagaaaatcaaatggaaaaagagattcatttttggcacaaacaaagaataaaaaagaaaatatgaaaccagcagccaaactgaaacttgaatcttcgtctttaaaagtaaagggtgaaattcttttggaagaggaaaagtctactgactttgtgtttatacctccagaaggaaaagatgcaaaggaaagaatattaactgatcatcaaaaagaagttctcaaaacaaagcggtgtgatattcctgccatgtataataatctggatgtttcccaagataccttatttactcagtatagtcaggaagagcctatggaaattcctactttaaccagaaaaccaaaggaggattctaagatgatgattacggaggagcaaatggacagtgacattgtcattcctcaagatgtcacggaagactgtggtatggctgaacatcttgaaaagtcctccctttcgaataatgagtgtggttctcttgacaaaaccagtccagaaatgtcaaacagtaataatgatgaaagaaaaaaagctttaatttcatcaaggaaaacatcaactgaatgtgcatctagtacagaaaattctttcgttgtcagcagtagttcagtttctaataccactgttgctggaactcccccataccctacaagtcggaggcaaacctttattactttggagaagtttgatggttcagaaaatagaccttttagtccatcccccttgaataatatttcatcaactgttacagtgaaaaataaccaggaaaccatgattaaaacagattttctaccaaaagcaaagcaaagagaagggactttttcaaaatctgattctgaaaaaatagtgaatggaactaagagatcaagccggagagctggtaaagctgaacaaacagggaataaaaggtctaagcccttaatgagatctgagccggagaaaaatactgaggaatctgttgaaggcattgtagtcttagaaaataacccacctggtttgcttaatcaaacagaatgtgtgtcagataatcaggttcatctttctgaatctacaatggagcatgacaatacaaagcttaaagcagcaacagtggaaaatgctgtattattggaaactaatactgtagaggagaaaaatgtagaaattaatttggaatccaaagagaatacacccccagtagtaatatcagcagatcaaatggtaaatgaggatagtcaggttcagataactccaaatcagaaaacccttagacggtcttcaaggcgacgttcagaagtagtagagtctaccactgaaagccaagataaggaaaatagtcatcaaaaaaaggaacgacgtaaggaagaagaaaaacctcttcagaagagtccattgcatataaaagatgatgtgttacctaaacaaaaactgattgctgaacaaactctacaggagaatttaattgagaaaggaagtaatttacatgagaagactcttggggaaactagtgctaatgcagaaactgaacaaaataaaaaaaaggcagaccctgagaacattaagtctgagggggatggtacccaggacattgtagataagtcctctgagaaactagtcagaggccgaacacggtatcaaactagaagagcatctcagggtttgctttccagcattgaaaactcagaatctgatagttcggaggcaaaagaagaaggttctaggaagaagagatctggaaaatggaaaaacaaaagcaatgaaagtgttgacattcaagatcaagaagagaaagtggtgaaacaggaatgtataaaagctgaaaatcagtcacatgattataaagcaacttctgaagaagatgtaagcataaaatctccgatttgcgaaaaacaagatgaaagtaatactgtaatatgtcaggattctacagtaacttcagatttgttgcaagttcctgatgatttaccaaatgtgtgtgaggaaaaaaatgaaactagcaaatatgcagaatattcctttacaagtctacctgtgccagaatcaaatctaaggactagaaatgccattaagagattacataagcgagactcttttgataattgtagtttgggagaatcctcaaaaatagggatatcagatatttcttcgctttcagaaaaaacttttcaaacacttgaatgccaacacaagagaagtaggagggtgaggagatctaaaggttgtgattgctgtggggaaaaatcacaacctcaggaaaagtcactcattgggttaaagaatacagaaaataatgacgtagagattagtgaaacaaaaaaggcagatgtgcaagcacctgtaagcccatcagaaacttctcaagctaatccatattctgaaggacaatttttagatgaacatcatagtgtgaattttcatttgggtctcaaagaggataatgatactattaatgattcattaattgtttctgaaaccaaatcaaaagaaaacactatgcaagaatctcttccttctggaatagtaaactttagagaggaaatttgtgatatggattctagtgaagcaatgtctcttgaaagccaggagtcacctaatgaaaattttaaaactgttggcccgtgtttaggagactcgaaaaatgtttcacaggaatctttggagacaaaagaagaaaaaccagaagaaaccccaaaaatggaactgagtctagagaatgttactgttgaaggaaatgcatgtaaagtaacagaatccaatctagagaaagcaaaaactatggaattgaatgtaggaaatgaagctagctttcatggacaagagagaaccaaaactggtatttctgaagaagcagcaatagaagaaaataaaagaaatgatgactctgaagcagacacagctaaactgaatgccaaagaagtagcaactgaggaatttaattcagatattagtctttctgataatactacacctgtaaaattgaatgctcaaactgagatttctgaacaaacagcagctggggaactagatggaggaaatgatgtatctgatctacactcatctgaagaaacgaataccaaaatgaaaaattatgaagaaatgatgatcggcgaggcaatggctgaaactggccatgatggtgaaacagagaatgagggcataactaccaaaacctcaaagcctgatgaagctgaaacaaacatgttgactgcagaaatggacaactttgtttgtgacacagttgaaatgagcactgaagaaggaatcattgacgctaataaaactgaaacaaatactgagtatagtaaatctgaagaaaaattagataacaatcaaatggtaatggaaagtgatattttacaggaagatcaccatacttcacagaaagtggaggaaccatcacagtgtctggcatctggaacagctatctctgagctaataatagaagacaataatgcatctcctcaaaaactaagggaacttgatccttcacttgtgtcagcaaatgacagtcctagtggcatgcagacacgctgtgtctggtctcctttggcttctccgtctacgagcattttaaagagaggactaaaaagatcccaagaagatgaaatctcatcacctgttaataaggttcgccgtgtctcctttgcagatccaatataccaagcaggattggcagatgacattgatagacggtgctctattgttaggtcccattcttccaatagttctcccataggaaaaagtgttaaaacttctcctactacacaatctaagcataataccacttcagccaaaggatttctgtccccaggatcacgtagccctaaatttaagagctcaaagaagtgtttaatttcagaaatggccaaagaatccataccatgcccaacagaaagtgtttacccaccattggtgaactgtgtggcaccagttgacatcattttacctcagattacatcaaacatgtgggcaagaggcctgggacaactcattagagctaagaatataaaaactattggtgatttgagtactcttacagcatctgaaataaaaactcttcctatccgttctccaaaagtgtccaatgtaaaaaaggctctcagaatatatcatgagcagcaggtgaagactcgtggactagaagagattccagtttttgatatttctgaaaaaacagtaaatggaatagaaaataaatctttgtcacctgatgaagaaagacttgtctcagatataattgatcctgttgctttagaaattccattatccaaaaaccttgtggcacagattagtgctcttgctcttcagctggattcagaagatcttcataattattcaggaagccaactatttgaaatgcacgagaaactaagttgtatggcaaactctgtaataaaaaatctacagtcacgttggagatcaccatcccatgaaaattctatttagtattttcagagaaaattgaaggtttttttaaacatcactggatttcttgattgaggaaacaagttctgaaataatagcacaatttcaaagaagagactctttgcaaagttgataacatttcaaaccctgaaggacagtgacttattatccttcctttctccaaagaacagttaaaaccaaatgtgttatggtaagctgtaaataccgttggaataaaagataaccgttcatcttacctaaaaaattgaagacaatattttccattgttgatgtcacaatttcttgaagatggctctttgcagcctacgtggtagtggagatatatacaaaggacttccctagtatcgttggaccaacaagcacaagcagatggcaggaagattagaacattggatattgattgccagtttttaagtgtcattcttggaaacgtgggagatttaggaaatgacattgaagaggaagaattctgttgaaatagtgattctcaacgtggggtccttggacagcaaggatgaggaaaaaacacagtcatccaaggagccagaagttatatgctgacaaaatgccaccgactactttagtggaagctgttgttgggatagggaatctgcaccctctagagaagcagggacttcagctgctgaggaagggctgtcagagttatccatgttattttttttcatttttgtgagtacggtgcctcctaaacaatcacatgaggatttgagactgttagaactcagtgttgttatccacacaaacggaaacattcattatttttaaaaaatgattgaaaatatcagatgaagtaaaaaattgacattaactgtattatagaaatgggaaagtatatccttttgtaatataagatgtattagaagcaaagaagggaaatgggcttcaaacaaaaataaataaatgtaaagatcagtttaattctgaagttaagtggcattttttcccctttctttccaaaataccgagctaaggttttcttgattgtgtttgactctctgcatctcaggagtgatggggattggaattcctgtccccaggttttctttgtatagcacctgtatgatgagaaagcatccagaacaaaaaaagcaatcaatcagtcattttccccctgctttggagcagttgggagtgggaagggaggaagagagtaagttagaggaagagaaatacagaagcttttagactcaacctgtttgtttgagcctaaagacatcttcaaaagcaaaggaatgcaggaaagagcagcaaaaactaagaaataggaaaagaaaggttgttattttcattgtttgaactaatctctgcagcactgagcaaccgtgaaagagcaattagtcttttcccaccttgttacaaggagggaaaaaagtagaaacagacaagaaaccaaggaagttacttttgatttgaaaatgctgttaatcacatagggatatttgggttttacaaacattgtgtatatggagacacatacacacaactcttcttttgttcactttcaaaagaagtcagagtatttaatttttagtttgggtgaacacattgagaacaacgatgtttaaggcaaatggagagcaatgataaggtgcta

SEQ ID NO: 376546 - DNA, 1423 bp, Homo sapiens
accagaagcattaaatgttatcgtaaggctaattgaacaagccccaattcaaatgggagaagaggcagtgaggtgggcaaaactggtcatacctttagtggttcattcagcacaaaaggtacatttgcggggagcaactgctctggagatgggaatgccattattgcttcagaaacagcaagaaatagcatctattacggagcagcttatgactactaaattaatctcagaacttcagaagctatttatgagtaaaaatgagacttacgtgttaaaattatggcctttgtttgtcaaactacttggaaggaccttgcatcgaagtgggagtttcatcaattctctcttgcaactagaagaacttggatttcgtagtggagcacccatgattaaaaagatagcttttattgcttggaagagtttaatagataattttgctttaaatccagatatactatgtagtgcaaaaagactcaagttgttaatgcagcctttgagttccatccatgtgagaacagaaactctagcattaacaaaactagaagtctggtggtatttactgatgagacttggacctcatcttcctgctaattttgaacaggtttgtgtgcctctgattcaaagtacaataagcattgattctaatgcctcacctcagggcaattcgtgtcatgtagctacatctccaggtttaaatcctatgactcctgtacacaaaggtgcttcctccccgtacggagccccgggaactccccgaatgaacctgagttcgaatttaggtggaatggccacaatcccatccattcaacttttgggacttgaaatgttgcttcatttcttgtgggtccagaagccttgagttttgctaagcaaataaacttgtgctgagcttagagccattggaacatccgttaatcagcagcccttcctttttttccaaacatgcaaatacacttatcactgctgttcatgatagctttgttgcagttggaaaagatgcccccgatgtggttgtcagtgctatctggaaggagctaattagcttggtgaagtcagttactgaatcaggtaacaaaaaagagaaaccaggttctgaagttttgactctcttattaaagtctttggaaagcatagtaaagtctgaagtatttcctgtatcaaaaacgctggtcctcatggaaattacaattaaaggacttcctcagaaagtattaggttcaccagcatatcaggttgctaatatggatattcttaatgcaagtatcttaaatgtaatatgatgaagattggccaaaaacatttatacttcccttttttattttattttattttattttattttattttatttatttttgagacggagttttgctcttgttgcccaggctggagagcagtggcacgatctcggctcactgcaacc

SEQ ID NO: 376547 - DNA, 736 bp, Homo sapiens
agcgggtgacgctcagccgggccttgtggagtgcgggtctctgctgcggacgccgggggccggcgcggcgttggccgcccccggcctcgccgagtgcagcgcgcccgaaggccagtgcctgcgctccgtccgcggcccggcgcccagggtgggcggggaggccgccgcgcagtcgccgcacgctacaccgccggcgccgtcgtttcgcgtcgcccgcttccggccaccgcggccgccattttgttcgcgcggaagcgccgcggtagggtgggaacccaagcgggagagccgcgggatttgcggccgccgccatgccgtcgtccccgctgcgggtggcggtggtgtgctcgagcaaccagaaccggagcatggaggcgcacaacatcctcagcaaacggggattcagcgtccgatcctttcattactttaagagaggaatctccgctagataaaagtcaccttaatagctgacaaatgtctttcctacctaatagataatgtattaataaagatcgagtctaagccaagaaacttgcagagttctctagttgttctcagtaataaaacaatgtcattgaatttccattctttatttggcagtactgtgctctaatgacaaaggttctgtgacctttcaattatgatcatgactaagacacaaagactggaattctatagaagaggcctgacagatcacctgagctcagcgtttgagaccagcctgccacatacgatc

SEQ ID NO: 376548 - DNA, 1491 bp, Homo sapiens
agcgggtgacgctcagccgggccttgtggagtgcgggtctctgctgcggacgccgggggccggcgcggcgttggccgcccccggcctcgccgagtgcagcgcgcccgaaggccagtgcctgcgctccgtccgcggcccggcgcccagggtgggcggggaggccgccgcgcagtcgccgcacgctacaccgccggcgccgtcgtttcgcgtcgcccgcttccggccaccgcggccgccattttgttcgcgcggaagcgccgcggtagggtgggaacccaagcgggagagccgcgggatttgcggccgccgccatgccgtcgtccccgctgcgggtggcggtggtgtgctcgagcaaccagaaccggagcatggaggcgcacaacatcctcagcaaacggggattcagcgtccgatcctttggaacagggactcacgtgaagcttccaggaccagctcccgacaagcccaatgtttatgatttcaaaaccacatatgaccagatgtacaatgatcttcttaggaaagacaaagaactctatacacagaatgggattttacatatgctggacagaaataagagaatcaagccccggccagaaagattccagaactgcaaagacctgtttgatctgatcctcacttgcgaagagagagtgtatgaccaggtggtggaagatctgaattccagagaacaggagacctgccagcccgtgcacgtggtcaatgtggacatccaggacaaccacgaggaggccaccctgggggcgtttctcatctgtgagctctgccagtgtatccagcacacggaagacatggagaacgagatcgacgagctgctgcaggagttcgaggagaagagtggccgcacctttctgcacaccgtctgcttctactgagcccagcgcccgcatggagccgcctctggagcttcctgttgttcatactttttccttcctgacatttgtttttacttacaggtgttctgctggtgacggtagcattacccaaataaactgtgcatatgaaatgggagaggagatgccaaaacgccagatgaaagcaatcaagtttcttcttttccacttttacttatgagcaggatattgattacaaagtttttcttctttaaccaaaaaggaaagacaacggtttgtgtgcacttcccgacatacctgtgtcttcgtgtgcctgccttccctccctcctccccaccgggccggactgtacagagccctgctgcggcgtgttaggaatgacctggaattgtcaataaacagatgctgctgtcaggaaggatcatcaggaacaagacccgaggggacccagagctgacgagacgcgggagatcaaagcaggtaccggaaatgggcgcatgaggccaatgaacggagtccggaaccacagctcgctggcacacccgggggtagatcggccgggacccctagtaggaagcccttcagtcaaaaagccggttacccggatatgagacga

SEQ ID NO: 376549 - DNA, 1111 bp, Homo sapiens
  misc_feature (1095)..(1095): n is a, c, g, or t
  misc_feature (1098)..(1098): n is a, c, g, or t
  misc_feature (1110)..(1110): n is a, c, g, or t
agcgggtgacgctcagccgggccttgtggagtgcgggtctctgctgcggacgccgggggccggcgcggcgttggccgcccccggcctcgccgagtgcagcgcgcccgaaggccagtgcctgcgctccgtccgcggcccggcgcccagggtgggcggggaggccgccgcgcagtcgccgcacgctacaccgccggcgccgtcgtttcgcgtcgcccgcttccggccaccgcggccgccattttgttcgcgcggaagcgccgcggtagggtgggaacccaagcgggagagccgcgggatttgcggccgccgccatgccgtcgtccccgctgcgggtggcggtggtgtgctcgagcaaccagaaccggagcatggaggcgcacaacatcctcagcaaacggggattcagcgtccgatcctttggaacagggactcacgtgaagcttccaggaccagctcccgacaagcccaatgtttatgatttcaaaaccacatatgaccagatgtacaatgatcttcttaggaaagacaaagaactctatacacagaatgggattttacatatgctggacagaaataagagaatcaagccccggccagaaagattccagaactgcaaagacctgtttgatctgatcctcacttgcgaagagagagtgtatgaccaggtggtggaagatctgaattccagagaacaggagacctgccagcccgtgcacgtggtcaatgtggacatccaggacaaccacgaggaggccaccctgggggcgtttctcatctgtgagctctgccagtgtatccagcacacggaagacatggagaacgagatcgacgagctgctgcaggagttcgaggagaagagtggccgcacctttctgcacaccgtctgcttctactgagcccagcgcccgcatggagccgcctctggagcttcctgttgttcatactttttccttcctgacatttgtttttacttacaggtgttctgctggtgacggtagcattacccaaataaactgtgcatatgaaatgggagaggagatgccaaaacgccagatgaaagcaatcaagtttcttcttttccacatctcctcgggnatnctctagagcggnc

SEQ ID NO: 376550 - DNA, 898 bp, Homo sapiens
ccaagctgctcacaccaacctgctcacacggaacagggactcacgtgaagcttccaggaccagctcccgacaagcccaatgtttatgatttcaaaaccacatatgaccagatgtacaatgatcttcttaggaaagacaaagaactctatacacagaatgggattttacatatgctggacagaaataagagaatcaagccccggccagaaagattccagaactgcaaagacctgtttgatctgatcctcacttgcgaagagagagtgtatgaccaggtggtggaagatctgaattccagagaacaggagacctgccagcccgtgcacgtggtcaatgtggacatccaggacaaccacgaggaggccaccctgggggcgtttctcatctgtgagctctgccagtgtatccagcacacggaagacatggagaacgagatcgacgagctgctgcaggagttcgaggagaagagtggccgcacctttctgcacaccgtctgcttctactgagcccagcgcccgcatggagccgcctctggagcttcctgttgttcatactttttccttcctgacatttgtttttacttacaggtgttctgctggtgacggtagcattacccaaataaactgtgcatatgaaatgggagaggagatgccaaaacgccagatgaaagcaatcaagtttcttcttttccacttttacttatgagcaggatattgattacaaagtttttcttctttaaccaaaaaggaaagacaacggtttgtgtgcacttcccgacatacctgtgtcttcgtgtgcctgccttccctccctcctccccaccgggccggactgtacagagccctgctgcggcgtgttaggaatgacctggaattgtcaataaacagatgctgctgtc

SEQ ID NO: 376551 - DNA, 1235 bp, Homo sapiens
agcgggtgacgctcagccgggccttgtggagtgcgggtctctgctgcggacgccgggggccggcgcggcgttggccgcccccggcctcgccgagtgcagcgcgcccgaaggccagtgcctgcgctccgtccgcggcccggcgcccagggtgggcggggaggccgccgcgcagtcgccgcacgctacaccgccggcgccgtcgtttcgcgtcgcccgcttccggccaccgcggccgccattttgttcgcgcggaagcgccgcggtagggtgggaacccaagcgggagagccgcgggatttgcggccgccgccatgccgtcgtccccgctgcgggtggcggtggtgtgctcgagcaaccagaaccggagcatggaggcgcacaacatcctcagcaaacggggattcagcgtccgatcctttggaacagggactcacgtgaagcttccaggaccagctcccgacaagcccaatgtttatgatttcctatacacagaatgggattttacatatgctggacagaaataagagaatcaagccccggccagaaagattccagaactgcaaagacctgtttgatctgatcctcacttgcgaagagagagtgtatgaccaggtggtggaagatctgaattccagagaacaggagacctgccagcccgtgcacgtggtcaatgtggacatccaggacaaccacgaggaggccaccctgggggcgtttctcatctgtgagctctgccagtgtatccagcacacggaagacatggagaacgagatcgacgagctgctgcaggagttcgaggagaagagtggccgcacctttctgcacaccgtctgcttctactgagcccagcgcccgcatggagccgcctctggagcttcctgttgttcatactttttccttcctgacatttgtttttacttacaggtgttctgctggtgacggtagcattacccaaataaactgtgcatatgaaatgggagaggagatgccaaaacgccagatgaaagcaatcaagtttcttcttttccacttttacttatgagcaggatattgattacaaagtttttcttctttaaccaaaaaggaaagacaacggtttgtgtgcacttcccgacatacctgtgtcttcgtgtgcctgccttccctccctcctccccaccgggccggactgtacagagccctgctgcggcgtgttaggaatgacctggaattgtcaataaacagatgctgctgtc

SEQ ID NO: 376552 - DNA, 883 bp, Homo sapiens
  misc_feature (1)..(1): n is a, c, g, or t
ntgttctggcaacactctcttaatcgtccaccgctacaacaaacgggcgggaacagggactcacgtgaagcttccaggaccagctcccgacaagcccaatgtttatgatttcatgtacaatgatcttcttaggaaagacaaagaactctatacacagaatgggattttacatatgctggacagaaataagagaaagattccagaactgcaaagacctgtttgatctgatcctcacttgcgaagagagagtgtatgaccaggtggtggaagatctgaattccagagaacaggagacctgccagcccgtgcacgtggtcaatgtggacatccaggacaaccacgaggaggccaccctgggggcgtttctcatctgtgagctctgccagtgtatccagcacacggaagacatggagaacgagatcgacgagctgctgcaggagttcgaggagaagagtggccgcacctttctgcacaccgtctgcttctactgagcccagcgcccgcatggagccgcctctggagcttcctgttgttcatactttttccttcctgacatttgtttttacttacaggtgttctgctggtgacggtagcattacccaaataaactgtgcatatgaaatgggagaggagatgccaaaacgccagatgaaagcaatcaagtttcttcttttccacttttacttatgagcaggatattgattacaaagtttttcttctttaaccaaaaaggaaagacaacggtttgtgtgcacttcccgacatacctgtgtcttcgtgtgcctgccttccctccctcctccccaccgggccggactgtacagagccctgctgcggcgtgttaggaatgacctggaattgtcaataaacagatgctgctgtc

SEQ ID NO: 376553 - DNA, 716 bp, Homo sapiens
aatagctgaacgactctcttaaactccaccgctacaccataaaagctgatccacaaacgagaggagcaccagtcctcctcttggcttcgagatggcttcgccacaccaagagcccaaacctgggagacctgccagcccgtgcacgtggtcaatgtggacatccaggacaaccacgaggaggccaccctgggggcgtttctcatctgtgagctctgccagtgtatccagcacacggaagacatggagaacgagatcgacgagctgctgcaggagttcgaggagaagagtggccgcacctttctgcacaccgtctgcttctactgagcccagcgcccgcatggagccgcctctggagcttcctgttgttcatactttttccttcctgacatttgtttttacttacaggtgttctgctggtgacggtagcattacccaaataaactgtgcatatgaaatgggagaggagatgccaaaacgccagatgaaagcaatcaagtttcttcttttccacttttacttatgagcaggatattgattacaaagtttttcttctttaaccaaaaaggaaagacaacggtttgtgtgcacttcccgacatacctgtgtcttcgtgtgcctgccttccctccctcctccccaccgggccggactgtacagagccctgctgcggcgtgttaggaatgacctggaattgtcaataaacagatgctgctgtc

SEQ ID NO: 376554 - DNA, 587 bp, Homo sapiens
agtagagacggggtttcaccatgttggccaggctggtcttgaactcctgtcctcaagtgatccgcccgcctcagcctcccaaagtgctgggatcacaggcgagagccaccgcgccaggcccatttttcaagcggatggaccctgtgtggagctggcggtggagcagggagggctggtctttagtgacggggaagggtcgcaatgccagtcacggttcaccccaggactggctggtgggtggggagtcccagaccagcttgtgctgagttggagatttgctcaggtttcctcgaaccatcagccgccttcggtttgaggctcattcattgtgctccccaaactgcagagtccagaaaccactggggctgggctgggcctgcagccggcagagctggggactcagccacattgactgcctgttccctggttttggagcctctgacgtctgtgtcaccttgtcccaatcagatctgaattccagagaacaggagacctgccagcccgtgcacgtggtcaatgtggacatccaggacaaccacgaggaggccaccctgggggcgtttctcatctgtgagctctgccagtgt

SEQ ID NO: 376555 - DNA, 1288 bp, Homo sapiens
agcgggtgacgctcagccgggccttgtggagtgcgggtctctgctgcggacgccgggggccggcgcggcgttggccgcccccggcctcgccgagtgcagcgcgcccgaaggccagtgcctgcgctccgtccgcggcccggcgcccagggtgggcggggaggccgccgcgcagtcgccgcacgctacaccgccggcgccgtcgtttcgcgtcgcccgcttccggccaccgcggccgccattttgttcgcgcggaagcgccgcggtagggtgggaacccaagcgggagagccgcgggatttgcggccgccgccatgccgtcgtccccgctgcgggtggcggtggtgtgctcgagcaaccagaaccggagcatggaggcgcacaacatcctcagcaaacggggattcagcgtccgatcctttggaacagggactcacgtgaagcttccaggaccagctcccgacaagcccaatgtttatgatttcaaaaccacatatgaccagatgtacaatgatcttcttaggaaagacaaagaactctatacacagaatgggattttacatatgctggacagaaataagagaatcaagccccggccagaaagattccagaactgcaaagacctgtttgatctgatcctcacttgcgaagagagagtgtatgaccaggtggtggaagatctgaattccagagaacaggagacctgccagcccgtgcacgtggtcaatgtggacatccaggacaaccacgaggaggccaccctgggggcgtttctcatctgtgagctctgccagtgtatccagcacacggaagacatggagaacgagatcgacgagctgctgcaggagttcgaggagaagagtggccgcacctttctgcacaccgtctgcttctactgagcccagcgcccgcatggagccgcctctggagcttcctgttgttcatactttttccttcctgacatttgtttttacttacaggtgttctgctggtgacggtagcattacccaaataaactgtgcatatgaaatgggagaggagatgccaaaacgccagatgaaagcaatcaagtttcttcttttccacttttacttatgagcaggatattgattacaaagtttttcttctttaaccaaaaaggaaagacaacggtttgtgtgcacttcccgacatacctgtgtcttcgtgtgcctgccttccctccctcctccccaccgggccggactgtacagagccctgctgcggcgtgttaggaatgacctggaattgtcaataaacagatgctgctgtc

SEQ ID NO: 376556 - DNA, 624 bp, Homo sapiens
  misc_feature (205)..(205): n is a, c, g, or t
ctctagaggtgtcccaaatctctcattgcgagctcacttccactatgtcctatcaataggagctgtatttgccatcataggaggcttcattcactgatttcccctattctcaggctacaccctagaacaaacctacgccaaaatccatttcactatcatattcatcggcgtaaatctaactttcttcccacaacactttctcggnctatccggaatgccccgacgttactcggactaccccaatgagagatttaaatctctcagtggtcaatgtggacatccaggacaaccacgaggaggccaccctgggggcgtttctcatctgtgagctctgccagtgtatccagcacacggaagacatggagaacgagatcgacgagctgctgcaggagttcgaggagaagagtggccgcacctttctgcacaccgtctgcttctactgagcccagcagagatttaaatctctcattgcgcaacacatcctatcagactgggtctggcccttaaattctctgtgtactattatgagattctgaactcccccagagaaagctgctctcttgcaaagacagcttttgatgaagccaatgctgaacttgatacattaagtgaagagtcattcaa

SEQ ID NO: 376557 - DNA, 1347 bp, Homo sapiens
agcgggtgacgctcagccgggccttgtggagtgcgggtctctgctgcggacgccgggggccggcgcggcgttggccgcccccggcctcgccgagtgcagcgcgcccgaaggccagtgcctgcgctccgtccgcggcccggcgcccagggtgggcggggaggccgccgcgcagtcgccgcacgctacaccgccggcgccgtcgtttcgcgtcgcccgcttccggccaccgcggccgccattttgttcgcgcggaagcgccgcggtagggtgggaacccaagcgggagagccgcgggatttgcggccgccgccatgccgtcgtccccgctgcgggtggcggtggtgtgctcgagcaaccagaaccggagcatggaggcgcacaacatcctcagcaaacggggattcagcgtccgatcctttggaacagggactcacgtgaagcttccaggaccagctcccgacaagcccaatgtttatgatttcaaaaccacatatgaccagatgtacaatgatcttcttaggaaagacaaagaactctatacacagaatgggattttacatatgctggacagaaataagagaatcaagccccggccagaaagattccagaactgcaaagacctgtttgatctgatcctcacttgcgaagagagagtgtatgaccaggtggtggaagatctgaattccagagaacaggagacctgccagcccgtgcacgtggtcaatgtggacatccaggacaaccacgaggaggccaccctgggggcgtttctcatctgtgagctctgccagtgtatccagcacacggaagacatggagaacgagatcgacgagctgctgcaggagttcgaggagaagagtggccgcacctttctgcacaccgtctgcttctactgagcccagcgcccgcatggagccgcctctggagcttcctgttgttcatactttttccttcctgacatttgtttttacttacaggtgttctgctggtgacggtagcattacccaaataaactgtgcatatgaaatgggagaggagatgccaaaacgccagatgaaagcaatcaagtttcttcttttccacttttacttatgagcaggatattgattacaaagtttttcttctttaaccaaaaaggaaagacaacggtttgtgtgcacttcccgacatacctgtgtcttcgtgtgcctgccttccctccctcctccccaccgggccggactgtacagagccctgctgcggcgtgttaggaatgacctggaattgtcaataaacagatgctgctgtccccgatgcggccgaaatttactcacatatacccacaccagcggtaataaaaaaaaaaaa

SEQ ID NO: 376558 - DNA, 758 bp, Homo sapiens
aacctaagtgctagtacgagcctgtgttaatcggacgagggaaataagagaatcaagccccggccagaaagattccagaactgcaaagacctgtttgatctgatcctcacttgcgaagagagagtgtatgaccaggtggtggaagatctgaattccagagaacaggagacctgccagcccgtgcacgtggtcaatgtggacatccaggacaaccacgaggaggccaccctgggggcgtttctcatctgtgagctctgccagtgtatccagcacacggaagacatggagaacgagatcgacgagctgctgcaggagttcgaggagaagagtggccgcacctttctgcacaccgtctgcttctactgagcccagcgcccgcatggagccgcctctggagcttcctgttgttcatactttttccttcctgacatttgtttttacttacaggtgttctgctggtgacggtagcattacccaaataaactgtgcatatgaaatgggagaggagatgccaaaacgccagatgaaagcaatcaagtttcttcttttccacttttacttatgagcaggatattgattacaaagtttttcttctttaaccaaaaaggaaagacaacggtttgtgtgcacttcccgacatacctgtgtcttcgtgtgcctgccttccctccctcctccccaccgggccggactgtacagagccctgctgcggcgtgttaggaatgacctggaattgtcaataaacagatgctgctgtc

SEQ ID NO: 376559 - DNA, 1199 bp, Homo sapiens
agcgggtgacgctcagccgggccttgtggagtgcgggtctctgctgcggacgccgggggccggcgcggcgttggccgcccccggcctcgccgagtgcagcgcgcccgaaggccagtgcctgcgctccgtccgcggcccggcgcccagggtgggcggggaggccgccgcgcagtcgccgcacgctacaccgccggcgccgtcgtttcgcgtcgcccgcttccggccaccgcggccgccattttgttcgcgcggaagcgccgcggtagggtgggaacccaagcgggagagccgcgggatttgcggccgccgccatgccgtcgtccccgctgcgggtggcggtggtgtgctcgagcaaccagaaccggagcatggaggcgcacaacatcctcagcaaacggggattcagcgtccgatcctttggaacagggactcacgtgaagcttccaggaccagctcccgacaagcccaatgtttatgatttcatgtacaatgatcttcttaggaaagacaaagaactctatacacagaatgggattttacatatgctggacagaaataagagaaagattccagaactgcaaagacctgtttgatctgatcctcacttgcgaagagagagtgtatgaccaggtggtggaagggagacctgccagcccgtgcacgtggtcaatgtggacatccaggacaaccacgaggaggccaccctgggggcgtttctcatctgtgagctctgccagtgtatccagcacacggaagacatggagaacgagatcgacgagctgctgcaggagttcgaggagaagagtggccgcacctttctgcacaccgtctgcttctactgagcccagcccgcctctggagcttcctgttgttcatactttttccttcctgacatttgtttttacttacaggtgttctgctggtgacggtagcattacccaaataaactatgccaaaacgccagatgaaagcaatcaagtttcttcttttccacttttacttatgagcaggatattgattacaaagtttttcttctttaaccaaaaaggaaagacaacggtttgtgtgcacttcccgacatacctgtgtcttcgtgtgcctgccttccctccctcctccccaccgggccggactgtacagagccctgctgcggcgtgttaggaatgacctggaattgtcaataaacagatgctgctgtc

SEQ ID NO: 376560 - DNA, 871 bp, Homo sapiens
cttcaacctatctctcacaccaatcagatcttcggcctgagcgagacggacccttcctccttcctgtattatcgtcccttctataccatcctgggctggcctaccccagcatttcctcctccggggccacacccgtctttgacaacatctggaaccagggcctggtttctcaggacctcttctctgtctacctcagcgccgatgaccagagtggcagcgtggtgatctttggtggcattgactcttcttactacactggaagtctgaactgggtgcctgttaccgtcgagggttactggcagatcaccgtggacagcatcaccatgaacggagaggccatcgcctgcgctgagggctgccaggccattgttgacaccggcacctctctgctgaccggcccaaccagccccattgccaacatccagagcgacatcggagccagcgagaactcagatggcgacatggtggtcagctgctcagccatcagcagcctgcccgacatcgtcttcaccatcaatggagtccagtaccccgtgccacccagtgcctacatcctgcagagcgaggggagctgcatcagtggcttccagggcatgaacctccccaccgaatctggagagctttggatcctgggtgatgtcttcatccgccagtactttaccgtcttcgacagggcaaacaaccaggtcggcctggcccccgtggcttaagcctaagtctcttcagccacctcccaggaagatctggcctctgtcctgtgcccactttagatgtatctaattctcctgactgttcttcccaggggagtgtggaggtcttggccctgttccctgtcctaccaataacgtagaataaaaacataacccactga

SEQ ID NO: 376561 - DNA, 563 bp, Homo sapiens
cttcaacctatctctcacaccaatcagatcttcggcctgagcgagacggacccttcctccttcctgtattatcgtcccttctataccatcctgggctggcctaccccagcatttcctcctccggggccacacccgtctttgacaacatctggaaccagggcctggtttctcaggacctcttctctgtctacctcagcgccgatgaccagagtggcagcgtggtgatctttggtggcattgactcttcttactacactggaagtctgaactgggtgcctgttaccgtcgagggttactggcagatcaccgtggacagcatcaccatgaacggagaggccatcgcctgcgctgagggctgccaggccattgttgacaccggcacctctctgctgaccggcccaaccagccccattgccaacatccagagcgacatcggagccagcgagaactcagatggcgacatggtggtcagctgctcagccatcagcagcctgcccgacatcgtcttcaccatcaatggagtccatcaggaactccgggaagtcaatggtcccccccgggaa

SEQ ID NO: 376562 - DNA, 630 bp, Homo sapiens
tgcgtgtgatactctagagatcccctgtatctgggagggtactggcagatcaccgtgacagcatcaccatgaacggagaggccatcgcctgcgctgagggctgccaggccattgttgacaccggcacctctctgctgaccggcccaaccagccccattgccaacatccagagcgacatcggagccagcgagaactcagatggcgacatggtggtcagctgctcagccatcagcagcctgcccgacatcgtcttcaccatcaatggagtccagtaccccgtgccacccagtgcctacatcctgcagagcgaggggagctgcatcagtggcttccagggcatgaacctccccaccgaatctggagagctttggatcctgtatccggggaggtcgtccccaagggcaccccagctgggccggtagatctgaaagatggtgatccaggaggtgagcactactcaccagaagaggacgcccacagctgagcgccagacatagcctttgatttggctctgtgctgtgtaggctgagacaagggaaggcctctcggaagaaccagaaggatgtagaccaaccagagacacggcaggaaagcacaccccccccggatactccccgggataaagggtac

SEQ ID NO: 376563 - DNA, 302 bp, Homo sapiens
  misc_feature (52)..(52): n is a, c, g, or t
  misc_feature (83)..(83): n is a, c, g, or t
ctcccaaaaaaaaaaaaaaaagtttttcccccggggagccccccctcttccnccccccccccaaaaaaaaaaaaacgcagctnctactttaccgtcttcgacagggcaaacaaccaggtcggcctggcccccgtggcttaagcctaagtctcttcagccacctcccaggaagatctggcctctgtcctgtgcccactttagatgtatctaattctcctgactgttcttcccaggggagtgtggaggtcttggccctgttccctgtcctaccaataacgtagaataaaaacataacccactga

SEQ ID NO: 376564 - DNA, 348 bp, Homo sapiens
aggatccccagtgcgtagtcagtgtcaatgctgataacatgtgtctttcaatccccttctcacaaatatacacatacataaaggcacaatacttatacatgtgacacacagacacatgtgttaaaaaggtaagtgctgggcctggcttccccaatacctgagtacccactgacaacggggcctctgtcctgtgcccactttagatgtatctaattctcctgactgttcttcccaggggagtgtggaggtcttggccctgttccctgtcctaccaataacgtagaataaaaacataacccactgaacggcctcactgacacggcctcactgcaacgcctgggatactct

SEQ ID NO: 376565 - DNA, 447 bp, Homo sapiens
accacacattcaaactataaggcctgtgttcttccaaacgtagttccaccactcccccgctgtgtgaccttgggcaggtggcctcacctccctcaggctcagtgtcctcatggtaagtggaaacaacagtgacggtgcccactgcatgggccctggcctaagaggaaaagaaaccacattggtcacaccccaggacagccctggaaagtgcccaatcaacggtcgctctgaggaggcaacagcagatggtcacacaaatggacgaacaaaaaaattcatgtcttctcccctcactttccacagcgatgacaagagtggcagcgtggtgatctttggtggcattgactcttcttactacactggaagtctgaactgggtgcctgttaccgtcgagggttactggcagatcaccgtggacaggtgagactgccatgaacgggcagcatc

SEQ ID NO: 376566 - DNA, 378 bp, Homo sapiens
gagttgtgacccacactggctaaccaagatcaggaagaaaaggttgagtgttatcataagcttctcttctctcactaatggggtcagacgctggtgacgttgatagcacacaggctatccgggagggaatacgcactccagtgtggagagcgaggggagctgcatcagtggcttccagggcatgaacctccccaccgaatctggagagctttggatcctgggtgatgtcttcatccgccagatgtggagagagggagagagccagtgtggagagagccagtgtggagagagggagagagccagtgtggagagagggagagagccagtgtggagagagccagtgtggagagagggagagagccagtgtggagagggtcc

SEQ ID NO: 376567 - DNA, 609 bp, Homo sapiens
ctcgagttggtacctgccagtaccctcgacggtaaggcagatcaccgtgtacagcatcaccatgaacggagaggccatcgcctgcgctgagggctgccaggccattgttgacaccggcacctctctgctgaccggcccaaccagccccattgccaacatccagagcgacatcggagccagcgagaactcagatggcgacatggtggtcagctgctcagccatcagcagcctgcccgacatcgtcttcaccatcaatggagtccagtaccccgtgccacccagtgcctacatcctgcagagcgaggggagctgcatcagtggcttccagggcatgaacctccccaccgaatctggagagctttggatcctgggtgatgtcttcatccgccagtactttaccgtcttcgacagggcaaacaaccaggtcggcctggcccccgtggcttaagcctaagtctcttcagccacctcccaggaagatctggcctctgtcctgtgcccactttagatgtatctaattctcctgactgttcttcccaggggagtgtggaggtcttggccctgttccctgtcctaccaataacgtagaataaaaacataacccactga

SEQ ID NO: 376568 - DNA, 893 bp, Homo sapiens
cttcaacctatctctcacaccaatcagatcttcggcctgagcgagacggacccttcctccttcctgtattatcgtcccttctataccatcctgggctggcctaccccagcatttcctcctccggggccacacccgtctttgacaacatctggaaccagggcctggtttctcaggacctcttctctgtctacctcagcgccgatgaccagagtggcagcgtggtgatctttggtggcattgactcttcttactacactggaagtctgaactgggtgcctgttaccgtcgagggttactggcagatcaccgtggacagcatcaccatgaacggagaggccatcgcctgcgctgagggctgccaggccattgttgacaccggcacctctctgctgaccggcccaaccagccccattgccaacatccagagcgacatcggagccagcgagaactcagatggcgacatggtggtcagctgctcagccatcagcagcctgcccgacatcgtcttcaccatcaatggagtccagtaccccgtgccacccagtgcctacatcctgcagagcgaggggagctgcatcagtggcttccagggcatgaacctccccaccgaatctggagagctttggatcctgggtgatgtcttcatccgccagtactttaccgtcttcgacagggcaaacaaccaggtcggcctggcccccgtggcttaagcctaagtctcttcagccacctcccaggaagatctggcctctgtcctgtgcccactttagatgtatctaattctcctgactgttcttcccaggggagtgtggaggtcttggccctgttccctgtcctaccaataacgtagaataaaaacataacccactgaaaggtctagtggagctgcttct

SEQ ID NO: 376569 - DNA, 938 bp, Homo sapiens
  misc_feature (872)..(872): n is a, c, g, or t
cttcaacctatctctcacaccaatcagatcttcggcctgagcgagacggacccttcctccttcctgtattatcgtcccttctataccatcctgggctggcctaccccagcatttcctcctccggggccacacccgtctttgacaacatctggaaccagggcctggtttctcaggacctcttctctgtctacctcagcgccgatgaccagagtggcagcgtggtgatctttggtggcattgactcttcttactacactggaagtctgaactgggtgcctgttaccgtcgagggttactggcagatcaccgtggacagcatcaccatgaacggagaggccatcgcctgcgctgagggctgccaggccattgttgacaccggcacctctctgctgaccggcccaaccagccccattgccaacatccagagcgacatcggagccagcgagaactcagatggcgacatggtggtcagctgctcagccatcagcagcctgcccgacatcgtcttcaccatcaatggagtccagtaccccgtgccacccagtgcctacatcctgcagagcgaggggagctgcatcagtggcttccagggcatgaacctccccaccgaatctggagagctttggatcctgggtgatgtcttcatccgccagtactttaccgtcttcgacagggcaaacaaccaggtcggcctggcccccgtggcttaagcctaagtctcttcagccacctcccaggaagatctggcctctgtcctgtgcccactttagatgtatctaattctcctgactgttcttcccaggggagtgtggaggtcttggccctgttccctgtcctaccaataacgtagaataaaaacataacccactganaacggcttcactgacaatggtcctctcctcccaccccatggaatcaagctcttttccctgcattca

SEQ ID NO: 376570 - DNA, 915 bp, Homo sapiens
cttcaacctatctctcacaccaatcagatcttcggcctgagcgagacggacccttcctccttcctgtattatcgtcccttctataccatcctgggctggcctaccccagcatttcctcctccggggccacacccgtctttgacaacatctggaaccagggcctggtttctcaggacctcttctctgtctacctcagcgccgatgaccagagtggcagcgtggtgatctttggtggcattgactcttcttactacactggaagtctgaactgggtgcctgttaccgtcgagggttactggcagatcaccgtggacagcatcaccatgaacggagaggccatcgcctgcgctgagggctgccaggccattgttgacaccggcacctctctgctgaccggcccaaccagccccattgccaacatccagagcgacatcggagccagcgagaactcagatggcgacatggtggtcagctgctcagccatcagcagcctgcccgacatcgtcttcaccatcaatggagtccagtaccccgtgccacccagtgcctacatcctgcagagcgaggggagctgcatcagtggcttccagggcatgaacctccccaccgaatctggagagctttggatcctgggtgatgtcttcatccgccagtactttaccgtcttcgacagggcaaacaaccaggtcggcctggcccccgtggcttaagcctaagtctcttcagccacctcccaggaagatctggcctctgtcctgtgcccactttagatgtatctaattctcctgactgttcttcccaggggagtgtggaggtcttggccctgttccctgtcctaccaataacgtagaataaaaacataacccactgaacggcctcactgacacggcctcactgcaacgcctgggatactct

SEQ ID NO: 376571 - DNA, 810 bp, Homo sapiens
cttcaacctatctctcacaccaatcagatcttcggcctgagcgagacggacccttcctccttcctgtattatcgtcccttctataccatcctgggctggcctaccccagcatttcctcctccggggccacacccgtctttgacaacatctggaaccagggcctggtttctcaggacctcttctctgtctacctcagcgccgatgaccagagtggcagcgtggtgatctttggtggcattgactcttcttactacactggaagtctgaactgggtgcctgttaccgtcgagggttactggcagatcaccgtggacagcatcaccatgaacggagaggccatcgcctgcgctgagggctgccaggccattgttgacaccggcacctctctgctgaccggcccaaccagccccattgccaacatccagagcgacatcggagccagcgagaactcagatggcgacatggtggtcagctgctcagccatcagcagcctgcccgacatcgtcttcaccatcaatggagtccagtaccccgtgccacccagtgcctacatcctgcagagcgaggggagctgcatcagtggcttccagggcatgaacctccccaccgaatctggagagctttggatcctgggtgatgtcttcatccgccaggtggagagagagagagagccatgtggagagagggagagagccagtgtggagagagccagtgtggagagagggagagagccagtgtggagagagggagagagccagtgtggagagagccagtgtggagagagggagagagccagtgtggagagggtcc

SEQ ID NO: 376572 - DNA, 514 bp, Homo sapiens
tacatatacgaactcgagttggtacctctctccactggctctctctacactggctctctctctctctctctctctccacactggaagtctgaactgggtgcctgttaccgtcgagggttactggcagatcaccgtggacagcatcaccatgaacggagaggccatcgcctgcgctgagggctgccaggccattgttgacaccggcacctctctgctgaccggcccaaccagccccattgccaacatccagagcgacatcggagccagcgagaactcagatggcgacatggtggtcagctgctcagccatcagcagcctgcccgacatcgtcttcaccatcaatggagtccagtaccccgtgccacccagtgcctacatcctgcagagcgaggggagctgcatcagtggcttccagggcatgaacctccccaccgaatctggagagctttggatcctgggtgatgtcttcatccgccaggtggagagagggtaccaactcgagtcgtatatgtaa

SEQ ID NO: 376573 - DNA, 633 bp, Homo sapiens
cttcaacctatctctcacaccaatcagatcttcggcctgagcgagacggacccttcctccttcctgtattatcgtcccttctataccatcctgggctggcctaccccagcatttcctcctccggggccacacccgtctttgacaacatctggaaccagggcctggtttctcaggacctcttctctgtctacctcagcgccgatgaccagagtggcagcgtggtgatctttggtggcattgactcttcttactacactggaagtctgaactgggtgcctgttaccgtcgagggttactggcagatcaccgtggacagcatcaccatgaacggagaggccatcgcctgcgctgagggctgccaggccattgttgacaccggcacctctctgctgaccggcccaaccagccccattgccaacatccagagcgacatcggagccagcgagaactcagatggcgacatggtggtcagctgctcagccatcagcagcctgcccgacatcgtcttcaccatcaatggagtccagggcgcccaatgggcgcacgaaaggccggtatatttcaaaccaaaaacctttttctgggggtctgaatgagccgtcggccaatggggcgccctttaaccgggcgtcc

SEQ ID NO: 376574 - DNA, 392 bp, Homo sapiens
tacatatacgaactcgagttggtacctctctccacactggaagtctgaactgggtgcctgttaccgtcgagggttactggcagatcaccgtggacagcatcaccatgaacggagaggccatcgcctgcgctgagggctgccaggccattgttgacaccggcacctctctgctgaccggcccaaccagccccattgccaacatccagagcgacatcggagccagcgagaactcagatggcgacatggtggtcagctgctcagccatcagcagcctgcccgacatcgtcttcaccatcaatggagtccagtaccccgtgccacccagtgcctacatcctgcagggtgtcctaaggcgagctcagggaggacagaaacctccagtgtggagagag

SEQ ID NO: 376575 - DNA, 485 bp, Homo sapiens
cttctcccctcactttccacagcgatgaccagagtggcagcgtggtgatctttggtggcattgactcttcttactacactggaagtctgaactgggtgcctgttaccgtcgagggttactggcagatcaccgtggacagcatcaccatgaacggagaggccatcgcctgcgctgagggctgccaggccattgttgacaccggcacctctctgctgaccggcccaaccagccccattgccaacatccagagcgacatcggagccagcgagaactcagatggcgacatggtggtcagctgctcagccatcagcagcctgcccgacatcgtcttcaccatcaatggagtccattgcaaagtgggagtaggaagtgtgacaggaataaagacagggaaaatgtcaataaacaaataaggaaaaacagaaatactggtagatcaggtatgctctaaagaaaacaaggctgggcttctgtgacttgtcttg

SEQ ID NO: 376576 - DNA, 652 bp, Homo sapiens
tacatatacgaactcgagttggtacctctctccacactggaagtctgaactgggtgcctgttaccgtcgagggttactggcagatcaccgtggacagcatcaccatgaacggagaggccatcgcctgcgctgagggctgccaggccattgttgacaccggcacctctctgctgaccggcccaaccagccccattgccaacatccagagcgacatcggagccagcgagaactcagatggcgacatggtggtcagctgctcagccatcagcagcctgcccgacatcgtcttcaccatcaatggagtccagtaccccgtgccacccagtgcctacatcctgcagagcgaggggagctgcatcagtggcttccagggcatgaacctccccaccgaatctggagagctttggatcctgggtgatgtcttcatccgccagtactttaccgtcttcgacagggcaaacaaccaggtcggcctggcccccgtggcttaagcctaagtctcttcagccacctcccaggaagatctggcctctgtcctgtgcccactttagatgtatctaattctcctgactgttcttcccaggggagtgtggaggtcttggccctgttccctgtcctaccaataacgtagaataaaaacataacccactga

SEQ ID NO: 376577 - DNA, 696 bp, Homo sapiens
tacatatacgaactcgagttggtacctctctccactggctctctctacactggctctctctctctctctctctctccacactggaagtctgaactgggtgcctgttaccgtcgagggttactggcagatcaccgtggacagcatcaccatgaacggagaggccatcgcctgcgctgagggctgccaggccattgttgacaccggcacctctctgctgaccggcccaaccagccccattgccaacatccagagcgacatcggagccagcgagaactcagatggcgacatggtggtcagctgctcagccatcagcagcctgcccgacatcgtcttcaccatcaatggagtccagtaccccgtgccacccagtgcctacatcctgcagagcgaggggagctgcatcagtggcttccagggcatgaacctccccaccgaatctggagagctttggatcctgggtgatgtcttcatccgccagtactttaccgtcttcgacagggcaaacaaccaggtcggcctggcccccgtggcttaagcctaagtctcttcagccacctcccaggaagatctggcctctgtcctgtgcccactttagatgtatctaattctcctgactgttcttcccaggggagtgtggaggtcttggccctgttccctgtcctaccaataacgtagaataaaaacataacccactga

SEQ ID NO: 376578 - DNA, 689 bp, Homo sapiens
cttcaacctatctctcacaccaatcagatcttcggcctgagcgagacggacccttcctccttcctgtattatcgtcccttctataccatcctgggctggcctaccccagcatttcctcctccggggccacacccgtctttgacaacatctggaaccagggcctggtttctcaggacctcttctctgtctacctcagcgccgatgaccagagtggcagcgtggtgatctttggtggcattgactcttcttactacactggaagtctgaactgggtgcctgttaccgtcgagggttactggcagatcaccgtggacagcatcaccatgaacggagaggccatcgcctgcgctgagggctgccaggccattgttgacaccggcacctctctgctgaccggcccaaccagccccattgccaacatccagagcgacatcggagccagcgagaactcagatggcgacatggtggtcagctgctcagccatcagcagcctgcccgacatcgtcttcaccatcaatggagtccagtaccccgtgccacccagtgcctacatcctgcagagcgaggggagctgcatcagtggcttccagggcatgaacctccccaccgaatctggagagctttggatcctgggtgatgtcttcatccgccaggtggagagagggtaccaactcgagtcgtatatgtaa

SEQ ID NO: 376579 - DNA, 459 bp, Homo sapiens
tacatattcgaatcgagttggtacggagcagcgagaactcagattagacatggtggtcagctgctcagccatcagcagcctgcccgacatcgtcttcaccatcaatggagtccagtaccccgtgccacccagtgcctacatcctgcagagcgaggggagctgcatcagtggcttccagggcatgaacctccccaccgaatctggagagctttggatcctgggtgatgtcttcatccgccagtactttaccgtcttcgacagggcaaacaaccaggtcggcctggcccccgtggcttaagcctaagtctcttcagccacctcccaggaagatctggcctctgtcctgtgcccactttagatgtatctaattctcctgactgttcttcccaggggagtgtggaggtcttggccctgttccctgtcctaccaataacgtagaataaaaacataacccactga

SEQ ID NO: 376580 - DNA, 562 bp, Homo sapiens
cttcaacctatctctcacaccaatcagatcttcggcctgagcgagacggacccttcctccttcctgtattatcgtcccttctataccatcctgggctggcctaccccagcatttcctcctccggggccacacccgtctttgacaacatctggaaccagggcctggtttctcaggacctcttctctgtctacctcagcgccgatgaccagagtggcagcgtggtgatctttggtggcattgactcttcttactacactggaagtctgaactgggtgcctgttaccgtcgagggttactggcagatcaccgtggacagcatcaccatgaacggagaggccatcgcctgcgctgagggctgccaggccattgttgacaccggcacctctctgctgaccggcccaaccagccccattgccaacatccagagcgacatcggagccagcgagaactcagatggcgacatggtggtcagctgctcagccatcagcagcctgcccgacatcgtcttcaccatcaatggagtccagtggagagagggtaccaactcgagtcgtatatgtaa

SEQ ID NO: 376581 - DNA, 352 bp, Homo sapiens
cttcaacctatctctcacaccaatcagatcttcggcctgagcgagacggacccttcctccttcctgtattatcgtcccttctataccatcctgggctggcctaccccagcatttcctcctccggggccacacccgtctttgacaacatctggaaccagggcctggtttctcaggacctcttctctgtctacctcagcgccgatgaccagagtggcagcgtggtgatctttggtggcattgactcttcttactacactggaagtctgaactgggtgcctgttaccgtcgagggttactggcagatcaccgtggacaggtggagagagggtaccaactcgagtcgtatatgtaa

SEQ ID NO: 376582 - DNA, 375 bp, Homo sapiens
tctttcccatcatccatctcaatggatggatgttttacttatatttgtctgaaaaataatgattctgtcagttatcaataatctttaactttatgctaaagaaactcatcattatctaatgagttttgccctttgcggtcatcagtgccagtgtccttggaggaaactcaccaaaactgaagtcagtcgagtcagacctgagacttaaagacctaaaagcagagacttcctctatcctggtagcaacaagtaaagaggggaagagagaggtcacttcctagaacagagggcccctgaaagattgttttggccaattctctgtttctacataggatttctcattcctcattcctgagcaattgcttataggtacac

SEQ ID NO: 376583 - DNA, 425 bp, Homo sapiens
ccattgggttacttcccagtttttgggttattcccaagtaaagctgtttgaacaagtacaattatttgaatagacataaagcatggcaatgttaatttcaatgtagaattcaaaccaaaatgtattaactacaataagagagagctttatattgctgtctaccaaaaagatacaggtcaatagctttcatataagcctttacaacaactttccattgttgtaaaagatctattctgaacaaaacaccaggcccagataatttcaaagttgtgccaaactttaaagaaatgatcatttccagttttcaaacagtttcaaaacatagggaaaaaatagtaagcttccaaattatcttgaggctagcacagccccgatccaaaaacctgacaaagtggcaacctccttcccctattaaaaaaaaaaaa

SEQ ID NO: 376584 - DNA, 456 bp, Homo sapiens
tgagacggagtctcgctctgtcgcccaggctggagtgcagtggcgcgatctcggctcactttacgctccgcctcctaggttcacgccattctcctacctcagcctcccgagtagctgggactataggcacccgccaccacacccccctaattttttgtatttttagtagagacggggtttcactgtgttagccaggattgtctcgatctcctgaccttgtgatccacctgtctcggcctcccaaagtgctgggattacaggcgtgagccaccgcacccggccatgtctcccaaatctttagcccagatcctgcttccatgcttcagacaatttgctcaaatatctagttgacaactctatttagatgtctttttgccactaccaactcaatatatttaaagtgactttatcaccttcctctgtcaaatttgccttttcttgtgttcccatcttagt

SEQ ID NO: 376585 - DNA, 334 bp, Homo sapiens
tggaatctaagtctagccatatgagtgatagtagaaacaatagaaacatttaaccactaatttcctatttcttgatcaaagaaaaaaaggtaagaacttattattttctcagtaggatgttatatgttccaaagctttctgagggaaatctttcccttctctctcaaaactctcctaaaactctcaaaaagccttccccataatgagggaaaatctcaggactcaattcctcttctctttttccccacccaatttcagcaattagtagacatgttgaacagggtaaacatgaaagtcatacagaaaggtaacaaacggtaattaaaataccttg

SEQ ID NO: 376586 - DNA, 349 bp, Homo sapiens
gctttttagcactttcaatatcattttagcatttgattcagattggttggttttgaggatgggagaagaggggaatttgtattgaccgtaaggcttggtggtggctgcaccactgcaccaatctgggaaccatttaagtccctcagaagactacagtcctgcaccatataatgacatttcagtcaactgtgaacagcacatacgacagcggtcccataacattataatggagctgaaaaattcttattgcctagtgacattacagccatctgaacaccacacattactcacattctatgatgctgctgctgtaaacaaatgtacaaagctgacggtcatataaaagtat

SEQ ID NO: 376587 - DNA, 548 bp, Homo sapiens
atccaaattccaatgccccaaaataatcttttattggaatagggccccaactcattcatctggctgctgttgggttaaaacaacagagttaaatagttgcgactgagatcctatgactgaaacctgaacacattatttaacccttggaagttttcttagcccttctctggaagccaaaagctaagactgaagcacagccttaagtacatatagttccttttcccaaagtatgtattaacagcatacatttaaaaaataaaaataccccgtttcaaacacattaaagtttgttcataatttgaggaaacatcctttcacctaaatagaatttaagtttctaattccaatactatgctatcttctagttcagatgttcaagctagtgtttacgcccaggcagtttctggcactagagattaagataaaatttatgctattttccgagagctatgatcctactgcaaaaatttaattaggaaatgggcggccgcgcatggtggctcacacctgtaatcccccagcactttgggaggccgaggggggcagat

SEQ ID NO: 376588 - DNA, 574 bp, Homo sapiens
ttttgtaaggcacttgcaagattaaaaattgttccttctccacttctaagaagatcaaaatatgagaaataaaaacttagactctacagggaaatatttattaacacgtttgtatctatttataatatatacattcagagtgattatatttttggcaagaaatgccttcttgaagacccccaaaattaaagtgtgcatgcataatcgagactgattttgaaagatgataggaatttttatgagaaatttaaattgattctgtcagctctgaaataaatacatctttactatattttaatatggaagtttgcataattccagtatgtatgcaaaatgcaagactttattatatgagtttatgggccagaaatcattttgctcttagaattaatttgattttggcaaatacttcaattttctaagatccttctttaagccctgttacctggaaacctgaaaaaaataaacaacttttgggcttgagagggatgtctgggcaattagaatagctacactgaagtctgcccgtgtgtgtgtgtgtgtgtgtgtgtgtgtgtgtgtgtgtgtgtgtgtg

SEQ ID NO: 376589 - DNA, 526 bp, Homo sapiens
atgaagctctcagttcagagatcaagatgattgggggataagaagaagaaaaacattcctgcaggactagtctgggcagaagaggagttgtggtaactagatatgaggagaaagagaggaaggaggcacagagcagttggagcttgctgcctggaagaatgacgttttagagacaaggtctgactgtgttgcccaggctggacttcaactcctcagtacaagtgatcctcctgcctgagcctcctgaatagctgggactacaggcctgcaccaccataccctgctcttagttacacaaatcttaaaatgatgctgttatgttaattcaattaagaaagtaaactagttctatgatccaagcacatagttgtgactcaattcatgttgttgtttttaatcctgaaatgatattgtaaaataagagctttgccttaaagtttttgttactcagtttttacatttgaggtaagaaggcaagtggcagggaagaatgattagcaataaagctttttaaaagttcttcaga

SEQ ID NO: 376590 - DNA, 666 bp, Homo sapiens
attacaggcatgagtcactgcacctggcctgggaataacagtttaaggccagcctcttaaaatgaaagttattgtggcaacttctaaaagatgggttgaaaagagaggaaactggggataacatcataaatagattattatattatccctggtgaaagaaaatgaaggcctgaaacaaggcagagaaggcaaagataaacttgatatctaatggaatatgggtaagtaaccatataagttatcagccaaaatgggacatgcttaagagtcaaagaaggcactattaataattactccagcatatcaaaataccacattataccccataaatacatacaatttgtcaactaaaaataattttttttttaattcatgagggggataagaagaagatgaggagaaagagaggaaggaggcacagagcagttggagcttgctgcctggaagaatgacggtatgataaagagatgggatgatgtgaaataattcacattgttaattatgaagtgtgttttgaatcacctcagtgttacccagaaacgacactcggttatcatgttcagataggggacaatgtgtttttgcagtgatagcagtggaggggaagggttgtcagcttaaggggcagttggtcattctgtcatcaaatgaattagtagcaagact

SEQ ID NO: 376591 - DNA, 854 bp, Homo sapiens
aatacaatccctgtcctaaattaaagctattcagtaaactgagacaaagtatttgaaatgaaaagtaatcttttagacactcaaatgtctaattaaggcttgcacctcccattcccccgagtctcccttccctctcctaccctctatcttgccctgagaatgacaggaaggtggtgggagatttccttctaaaaataaatttcatcaataaactgttaaaaaaaattaattatacacactactaactctcaacagaaagcgaaactgagccttgctccaaagagaaaactgatccttgatctttttactttcatgtagtataaagttggaatgtcttaagttattccttcttaaaatcatgtatttccatttaaaaaaaatcttattttaatgttattcccctgagatccttccttcatccaaatcttagttaccagcattcagagtctaagttacacttgattatatttttctttctttcatttcattcttcatattattcccaggtgattatattatttacctaaaagctaaatctggttcaatgtttttttccatagacactgtctaagtatttctgaagaaaaccaggtggaacatgaatcatatcctaccatctggatgaatataaaccaaattaagagctatatgaggctgcaaaaatatttgagggcatgcttgaattttgaggaattgataaaataacagccaggcacggtggctcacacctgtaatcccagctctttgggaggctgaggtgtgagaatcacttgaacctgggaggtggaggttgtagtgagccaagattgcgccattgctccccagcctgggcaacaagagcgaaactcttattc

SEQ ID NO: 376592 - DNA, 4753 bp, Homo sapiens
  misc_feature (14)..(14): n is a, c, g, or t
  misc_feature (22)..(22): n is a, c, g, or t
aagcggctggtacngtccgggnggtatgggatccgcgagctgtcgcgtctggtcgtggtctggcggagctgcggttggcttgtggcgtctccgccgccgccgccctcccttcctcttccccatcttcttctctcggtcccgggagcccccgcccggagagagtcgcggttgctgatcgtggtgcttgagtagagccgtggttggtgacagcatgacgagcgaggtgatagaagacgagaagcaattctattccaaggccaagacctactggaaacaaatcccacccacggtggacggcatgcttggggggtatggccacatctccagcatcgacatcaacagctcccggaagtttctgcagaggtttttgagggaaggcccgaacaagacaggaacgtcctgtgccctggactgtggagctggcattgggaggatcaccaagcggctgctcctgccgctgttcagagaggtggatatggtcgacataacggaggacttcctggttcaagccaagacctacctgggggaggagggcaagagggtgaggaactacttctgttgtgggctccaggacttcaccccggagccggactcttacgacgtgatctggatccagtgggtgataggtgagggttccaccgcccttccctgctcacctgtatgtctcctgccactcgcgttccccataaggtgtcaggaccagggctttgcactcctgcagcaagtgggccagtgaggattccccaccccgcccaggcccacccccaccccgtacttcccaggactgagggacaggctcggcctaaaaggtagatttcttccttctaggttttgtttcagttgaatacctgctaccatccatttgggtgcagttttttgttgaaaaaattttaatggccaataacttactgcattcaaagtgaggagttttataagggttttatttttaataagatgaatagtttaagcttcgtgtctagccctgcaccctcttagcctaacagcacacctcgagcgctgtgccctgggctgctgacgtggcggcaggccgctagcagcagtcggccacctcctgaggcgggcagcacaggcctgctgtggacactctaggtctggccttgtattttgtggtctcagaagcctttgtggggacttctagtgtagggaaggcagtctctctgggagctcctgcaatgccaaactcttagcccaggttcactcctccgatccaagcctggcaggggtggggcatcatggtgtgtaggtatcaggcaggacttgtaagccatcccgtcaagtcaaattctggcttaatgtgtctttaggtagatgacctctgagccacagtttcctattctatgaattggggtttagtaaatctctcgggactgagagccaatgaggccatgtgtgcacacaaaatgctgggcacaaatgaggggctcagcggggctgagaagtacatcccatccagtgccgacatccgcttgcatggtgccctggtaaccttgcctctgccctccccaggccacctcaccgatcagcacctggccgagttcctgcggcgctgcaagggcagcctccgccccaacggcatcatcgtcatcaaagacaacatggcccaggagggcgtgattctggacgacgtggacagcagcgtgtgccgggaccttgacgtggtccgcaggatcatctgcagtgcaggcctcagcctcctggccgaggagaggcaggagaacctccccgatgagatctaccatgtctatagctttgccctgagatgagccggggctggcaggagaaactgaggaaccacagtcctggtggggggagctggcagctgggcaagatccaggcgccacgctggcggttcgtgagtgtcgaggcaccactaaatatagctgtctgccgtccactcattatgcgggctcttcttcaaaaggcaaggtgggacccggcggggagggtgctgctgaaccagcggtgaggcaggagcccagaccctgctctcctgcgagatgggattgggtggaaggggctccagggctcctggtgctccccatgtgggaatagggtggccacatcagtaaccgattccctgggcctccagcccggccttccagccatgggcctggctgcctgaagaggaaggaaaccacccccaacttggttgctggggacttgaagacttcagtgtgatctttacctaggggagggacagagctgggctggtggagcccatgggtgctgcctgatggtgctgtggggtgggtgctcatgtgccaagtcctgcttggcagtggagacctggggcccttaaagtgttacaacagcctgcagcaagggaagttccccgtagcctcagtcttctctgggcttgaggctgctccttggcaggcatttaaagtaaaaaataaaatggggctgggcgcggtggctcacgcctgtaatcccagcactttgggaggccgaggcgggcagatcacgaggtcaggagattgagaccatcctggctaacaggtgaaaccccgtctctacttaaaatacaaaaaaaaaaaaaattagccaggcgtgatggcgggcgcctgtagtcccagctactcaggaggctgaggcaggagaatggggtgagcccgggaggcagagcttgcagtgagctgagattgcgccactgcactccagcctaggtgacagagcgagactctgtctcaaaataaaactaaaataaaatgggggccgggcacagtggctcatgtctgtaatcccagcactttgaaaggccgaggcaggcgaatcacctgaggtcaggagtttgagaccagcctgaccaacatggcgaaaccccgtctctactaaaaatacaaaaatcagccaggcatggtggtgggcacctataatgccagctactcaggaggctgaggcaggagaactgcttgaacctgggaggcagaggtcgcagtgagccgagattgcaccattgcactccagcctgggtgacagagtgtctcgaaaaaaaaaaataataaaatgggacctccacactgtggaggcccttgccagtctagagtggtgcttctttgcagggacttggaaacaaccccccaaacacagcatcccctcacacctgccacccacttccttaccggctgctgtgggagcctctatcctgaactatggaggggcggggtggaaattttatataaggaccttgttaaggccaagaaagtcagtttaatcttacaatataaatatatcatttagtcacctcagcttatccccagaggtgtttacacaattcccaatgaccagtgcagcttggaagggactgaggctcgcaagtgggtggcacagtcggctcttcagtggctccaaagtgagcccctcacaacaggagacacttcagagaggtctgtccccagccacgcactcatgattgctttttagcagaagtcatggtcgctgaggccctgggtttggcaaaagcacagctgccagcagagcacagttctggtaggtggggccacggctgacctggccccagagctacaggaacaggcaggggccagcttggcttgcaacaccatgaaacaagcctgtggggcccttagtgtcttctcccgcagagcccaccagaaacacttctgtgagtaacagaacctggaaggaaaaggggcaggggtggggccttggtggcaccgcacaggacgtgccccaggcttcctctccagctgcactgccacgtgcggccaacaagagccccgcagccctggggtgctgaggcttggtccttcccagcttctgcaaatgccctggcactgccctccaattcagagggtataaacatcaatccaagccctgttcctctttccaacatgggggggacttggagtgccactggagggaagggggcagtctctctggaagaaccagagctgcacccttcaccactggagtgatcacagcttcaggctctacctggctggcttttctcatgaaggatcccgtctcatctcccagatcaaaaagaccctcttctaatgctgtcccagcatctaccaacaggctgacctgagctgcccgtgtcccccgttcctgtagcctgagacctatcagatgtcatcttccacggagccactgtgctcgctaaggaggtaccacttcagcctgtcgggcagaggcagggctttgaccttcacatccacaggccacggctgaaggtagagccggatggccacacggcacaggtgcttgaggggcgggggatagctctccagctgcctcaaggagaagtggagggcctggatcttttccgccaggctgcccacagggtggatatcgaagttttcgggcagctggagtttctgagagttggtcaccatgagatccaggacagtctcagctttgcgcaggaggtccgcatggctctcgtcttccgtgcagcctgggtgggaacagagcctctcaaagatgatgtgaaagccagaccagcaggacgcaccgtgcagggagcagttgtaggcggctccggactccaggaggaagcgcaggagagggaagtgcagtttaaagctcttcaggcagatgtgggtgagggactcgtgggctgggcactcgctggggtcggccccgtgtgccagcagcagccgtgtgacttggaagcagaagcggttgatcatctgggcctcctctttgtcccctcccacggtctcaccaagcaggaagatgatgcaggtgaacactgtgtccccatctt

SEQ ID NO: 376593 - DNA, 4689 bp, Homo sapiens
  misc_feature (14)..(14): n is a, c, g, or t
  misc_feature (22)..(22): n is a, c, g, or t
aagcggctggtacngtccgggnggtatgggatccgcgagctgtcgcgtctggtcgtggtctggcggagctgcggttggcttgtggcgtctccgccgccgccgccctcccttcctcttccccatcttcttctctcggtcccgggagcccccgcccggagagagtcgcggttgctgatcgtggtgcttgagtagagccgtggttggtgacagcatgacgagcgaggtgatagaagacgagaagcaattctattccaaggccaagacctactggaaacaaatcccacccacggtggacggcatgcttggggggaaggcccgaacaagacaggaacgtcctgtgccctggactgtggagctggcattgggaggatcaccaagcggctgctcctgccgctgttcagagaggtggatatggtcgacataacggaggacttcctggttcaagccaagacctacctgggggaggagggcaagagggtgaggaactacttctgttgtgggctccaggacttcaccccggagccggactcttacgacgtgatctggatccagtgggtgataggtgagggttccaccgcccttccctgctcacctgtatgtctcctgccactcgcgttccccataaggtgtcaggaccagggctttgcactcctgcagcaagtgggccagtgaggattccccaccccgcccaggcccacccccaccccgtacttcccaggactgagggacaggctcggcctaaaaggtagatttcttccttctaggttttgtttcagttgaatacctgctaccatccatttgggtgcagttttttgttgaaaaaattttaatggccaataacttactgcattcaaagtgaggagttttataagggttttatttttaataagatgaatagtttaagcttcgtgtctagccctgcaccctcttagcctaacagcacacctcgagcgctgtgccctgggctgctgacgtggcggcaggccgctagcagcagtcggccacctcctgaggcgggcagcacaggcctgctgtggacactctaggtctggccttgtattttgtggtctcagaagcctttgtggggacttctagtgtagggaaggcagtctctctgggagctcctgcaatgccaaactcttagcccaggttcactcctccgatccaagcctggcaggggtggggcatcatggtgtgtaggtatcaggcaggacttgtaagccatcccgtcaagtcaaattctggcttaatgtgtctttaggtagatgacctctgagccacagtttcctattctatgaattggggtttagtaaatctctcgggactgagagccaatgaggccatgtgtgcacacaaaatgctgggcacaaatgaggggctcagcggggctgagaagtacatcccatccagtgccgacatccgcttgcatggtgccctggtaaccttgcctctgccctccccaggccacctcaccgatcagcacctggccgagttcctgcggcgctgcaagggcagcctccgccccaacggcatcatcgtcatcaaagacaacatggcccaggagggcgtgattctggacgacgtggacagcagcgtgtgccgggaccttgacgtggtccgcaggatcatctgcagtgcaggcctcagcctcctggccgaggagaggcaggagaacctccccgatgagatctaccatgtctatagctttgccctgagatgagccggggctggcaggagaaactgaggaaccacagtcctggtggggggagctggcagctgggcaagatccaggcgccacgctggcggttcgtgagtgtcgaggcaccactaaatatagctgtctgccgtccactcattatgcgggctcttcttcaaaaggcaaggtgggacccggcggggagggtgctgctgaaccagcggtgaggcaggagcccagaccctgctctcctgcgagatgggattgggtggaaggggctccagggctcctggtgctccccatgtgggaatagggtggccacatcagtaaccgattccctgggcctccagcccggccttccagccatgggcctggctgcctgaagaggaaggaaaccacccccaacttggttgctggggacttgaagacttcagtgtgatctttacctaggggagggacagagctgggctggtggagcccatgggtgctgcctgatggtgctgtggggtgggtgctcatgtgccaagtcctgcttggcagtggagacctggggcccttaaagtgttacaacagcctgcagcaagggaagttccccgtagcctcagtcttctctgggcttgaggctgctccttggcaggcatttaaagtaaaaaataaaatggggctgggcgcggtggctcacgcctgtaatcccagcactttgggaggccgaggcgggcagatcacgaggtcaggagattgagaccatcctggctaacaggtgaaaccccgtctctacttaaaatacaaaaaaaaaaaaaattagccaggcgtgatggcgggcgcctgtagtcccagctactcaggaggctgaggcaggagaatggggtgagcccgggaggcagagcttgcagtgagctgagattgcgccactgcactccagcctaggtgacagagcgagactctgtctcaaaataaaactaaaataaaatgggggccgggcacagtggctcatgtctgtaatcccagcactttgaaaggccgaggcaggcgaatcacctgaggtcaggagtttgagaccagcctgaccaacatggcgaaaccccgtctctactaaaaatacaaaaatcagccaggcatggtggtgggcacctataatgccagctactcaggaggctgaggcaggagaactgcttgaacctgggaggcagaggtcgcagtgagccgagattgcaccattgcactccagcctgggtgacagagtgtctcgaaaaaaaaaaataataaaatgggacctccacactgtggaggcccttgccagtctagagtggtgcttctttgcagggacttggaaacaaccccccaaacacagcatcccctcacacctgccacccacttccttaccggctgctgtgggagcctctatcctgaactatggaggggcggggtggaaattttatataaggaccttgttaaggccaagaaagtcagtttaatcttacaatataaatatatcatttagtcacctcagcttatccccagaggtgtttacacaattcccaatgaccagtgcagcttggaagggactgaggctcgcaagtgggtggcacagtcggctcttcagtggctccaaagtgagcccctcacaacaggagacacttcagagaggtctgtccccagccacgcactcatgattgctttttagcagaagtcatggtcgctgaggccctgggtttggcaaaagcacagctgccagcagagcacagttctggtaggtggggccacggctgacctggccccagagctacaggaacaggcaggggccagcttggcttgcaacaccatgaaacaagcctgtggggcccttagtgtcttctcccgcagagcccaccagaaacacttctgtgagtaacagaacctggaaggaaaaggggcaggggtggggccttggtggcaccgcacaggacgtgccccaggcttcctctccagctgcactgccacgtgcggccaacaagagccccgcagccctggggtgctgaggcttggtccttcccagcttctgcaaatgccctggcactgccctccaattcagagggtataaacatcaatccaagccctgttcctctttccaacatgggggggacttggagtgccactggagggaagggggcagtctctctggaagaaccagagctgcacccttcaccactggagtgatcacagcttcaggctctacctggctggcttttctcatgaaggatcccgtctcatctcccagatcaaaaagaccctcttctaatgctgtcccagcatctaccaacaggctgacctgagctgcccgtgtcccccgttcctgtagcctgagacctatcagatgtcatcttccacggagccactgtgctcgctaaggaggtaccacttcagcctgtcgggcagaggcagggctttgaccttcacatccacaggccacggctgaaggtagagccggatggccacacggcacaggtgcttgaggggcgggggatagctctccagctgcctcaaggagaagtggagggcctggatcttttccgccaggctgcccacagggtggatatcgaagttttcgggcagctggagtttctgagagttggtcaccatgagatccaggacagtctcagctttgcgcaggaggtccgcatggctctcgtcttccgtgcagcctgggtgggaacagagcctctcaaagatgatgtgaaagccagaccagcaggacgcaccgtgcagggagcagttgtaggcggctccggactccaggaggaagcgcaggagagggaagtgcagtttaaagctcttcaggcagatgtgggtgagggactcgtgggctgggcactcgctggggtcggccccgtgtgccagcagcagccgtgtgacttggaagcagaagcggttgatcatctgggcctcctctttgtcccctcccacggtctcaccaagcaggaagatgatgcaggtgaacactgtgtccccatctt

SEQ ID NO: 376594 - DNA, 1706 bp, Homo sapiens
  misc_feature (14)..(14): n is a, c, g, or t
  misc_feature (22)..(22): n is a, c, g, or t
aagcggctggtacngtccgggnggtatgggatccgcgagctgtcgcgtctggtcgtggtctggcggagctgcggttggcttgtggcgtctccgccgccgccgccctcccttcctcttccccatcttcttctctcggtcccgggagcccccgcccggagagagtcgcggttgctgatcgtggtgcttgagtagagccgtggttggtgacagcatgacgagcgaggtgatagaagacgagaagcaattctattccaaggccaagacctactggaaacaaatcccacccacggtggacggcatgcttggggggtatggccacatctccagcatcgacatcaacagctcccggaagtttctgcagaggtttttgagggaaggcccgaacaagacaggaacgtcctgtgccctggactgtggagctggcattgggaggatcaccaagcggctgctcctgccgctgttcagagaggtggatatggtcgacataacggaggacttcctggttcaagccaagacctacctgggggaggagggcaagagggtgaggaactacttctgttgtgggctccaggacttcaccccggagccggactcttacgacgtgatctggatccagtgggtgataggccacctcaccgatcagcacctggccgagttcctgcggcgctgcaagggcagcctccgccccaacggcatcatcgtcatcaaagacaacatggcccaggagggcgtgattctggacgacgtggacagcagcgtgtgccgggaccttgacgtggtccgcaggatcatctgcagtgcaggcctcagcctcctggccgaggagaggcaggagaacctccccgatgagatctaccatgtctatagctttgccctgagatgagccggggctggcaggagaaactgaggaaccacagtcctggtggggggagctggcagctgggcaagatccaggcgccacgctggcggttcgtgagtgtcgaggcaccactaaatatagctgtctgccgtccactcattatgcgggctcttcttcaaaaggcaaggtgggacccggcggggagggtgctgctgaaccagcggtgaggcaggagcccagaccctgctctcctgcgagatgggattgggtggaaggggctccagggctcctggtgctccccatgtgggaatagggtggccacatcagtaaccgattccctgggcctccagcccggccttccagccatgggcctggctgcctgaagaggaaggaaaccacccccaacttggttgctggggacttgaagacttcagtgtgatctttacctaggggagggacagagctgggctggtggagcccatgggtgctgcctgatggtgctgtggggtgggtgctcatgtgccaagtcctgcttggcagtggagacctggggcccttaaagtgttacaacagcctgcagcaagggaagttccccgtagcctcagtcttctctgggcttgaggctgctccttggcaggcatttaaagtaaaaaataaaatggggctgggcgcggtggctcacgcctgtaatcccagcactttgggaggccgaggcgggcggattacctgaggtcaggagttcgagaccagcctggccaacatggtgaaaccctgtctctactaaaaatacaaaattagccagccatggtggtgcatgcctgtaatcccagctactcgggaggctgag

SEQ ID NO: 376595 - DNA, 1018 bp, Homo sapiens
  misc_feature (14)..(14): n is a, c, g, or t
  misc_feature (22)..(22): n is a, c, g, or t
aagcggctggtacngtccgggnggtatgggatccgcgagctgtcgcgtctggtcgtggtctggcggagctgcggttggcttgtggcgtctccgccgccgccgccctcccttcctcttccccatcttcttctctcggtcccgggagcccccgcccggagagagtcgcggttgctgatcgtggtgcttgagtagagccgtggttggtgacagcatgacgagcgaggtgatagaagacgagaagcaattctattccaaggccaagacctactggaaacaaatcccacccacggtggacggcatgcttggggggtatggccacatctccagcatcgacatcaacagctcccggaagtttctgcagaggtttttgagggaaggcccgaacaagacaggaacgtcctgtgccctggactgtggagctggcattgggaggatcaccaagcggctgctcctgccgctgttcagagaggtggatatggtcgacataacggaggacttcctggttcaagccaagacctacctgggggaggagggcaagagggtgaggaactacttctgttgtgggctccaggacttcaccccggagccggactcttacgacgtgatctggatccagtgggtgataggccacctcaccgatcagcacctggccgagttcctgcggcgctgcaagggcagcctccgccccaacggcatcatcgtcatcaaagacaacatggcccaggagggcgtgattctggacgacgtggacagcagcgtgtgccgggaccttgacgtggtccgcaggatcatctgcagtgcaggcctcagcctcctggccgaggagaggcaggagaacctccccgatgagatctaccatgtctatagctttgccctgagatgagccggggctggcaggagaaactgaggaaccacagtcctggtggggggagctggcagctgggcaagatccaggcgccacgctggcggttcgtgagtgtcgaggcaccactaaatatagctgtctgccgtccactca

SEQ ID NO: 376596 - DNA, 3803 bp, Homo sapiens
ggccctggctgcctgggcgccgattcccgggacgcgccggccgacagcaggggaggcggcagcagggaccgcagcagcccccgcttccgcacggcccgccgggtcgcggagagtcgcggttgctgatcgtggtgcttgagtagagccgtggttggtgacagcatgacgagcgaggtgatagaagacgagaagcaattctattccaaggccaagacctactggaaacaaatcccacccacggtggacggcatgcttggggggtatggccacatctccagcatcgacatcaacagctcccggaagtttctgcagaggtttttgagggaaggcccgaacaagacaggaacgtcctgtgccctggactgtggagctggcattgggaggatcaccaagcggctgctcctgccgctgttcagagaggtggatatggtcgacataacggaggacttcctggttcaagccaagacctacctgggggaggagggcaagagggtgaggaactacttctgttgtgggctccaggacttcaccccggagccggactcttacgacgtgatctggatccagtgggtgataggccacctcaccgatcagcacctggccgagttcctgcggcgctgcaagggcagcctccgccccaacggcatcatcgtcatcaaagacaacatggcccaggagggcgtgattctggacgacgtggacagcagcgtgtgccgggaccttgacgtggtccgcaggatcatctgcagtgcaggcctcagcctcctggccgaggagaggcaggagaacctccccgatgagatctaccatgtctatagctttgccctgagatgagccggggctggcaggagaaactgaggaaccacagtcctggtggggggagctggcagctgggcaagatccaggcgccacgctggcggttcgtgagtgtcgaggcaccactaaatatagctgtctgccgtccactcattatgcgggctcttcttcaaaaggcaaggtgggacccggcggggagggtgctgctgaaccagcggtgaggcaggagcccagaccctgctctcctgcgagatgggattgggtggaaggggctccagggctcctggtgctccccatgtgggaatagggtggccacatcagtaaccgattccctgggcctccagcccggccttccagccatgggcctggctgcctgaagaggaaggaaaccacccccaacttggttgctggggacttgaagacttcagtgtgatctttacctaggggagggacagagctgggctggtggagcccatgggtgctgcctgatggtgctgtggggtgggtgctcatgtgccaagtcctgcttggcagtggagacctggggcccttaaagtgttacaacagcctgcagcaagggaagttccccgtagcctcagtcttctctgggcttgaggctgctccttggcaggcatttaaagtaaaaaataaaatggggctgggcgcggtggctcacgcctgtaatcccagcactttgggaggccgaggcgggcagatcacgaggtcaggagattgagaccatcctggctaacaggtgaaaccccgtctctacttaaaatacaaaaaaaaaaaaaattagccaggcgtgatggcgggcgcctgtagtcccagctactcaggaggctgaggcaggagaatggggtgagcccgggaggcagagcttgcagtgagctgagattgcgccactgcactccagcctaggtgacagagcgagactctgtctcaaaataaaactaaaataaaatgggggccgggcacagtggctcatgtctgtaatcccagcactttgaaaggccgaggcaggcgaatcacctgaggtcaggagtttgagaccagcctgaccaacatggcgaaaccccgtctctactaaaaatacaaaaatcagccaggcatggtggtgggcacctataatgccagctactcaggaggctgaggcaggagaactgcttgaacctgggaggcagaggtcgcagtgagccgagattgcaccattgcactccagcctgggtgacagagtgtctcgaaaaaaaaaaataataaaatgggacctccacactgtggaggcccttgccagtctagagtggtgcttctttgcagggacttggaaacaaccccccaaacacagcatcccctcacacctgccacccacttccttaccggctgctgtgggagcctctatcctgaactatggaggggcggggtggaaattttatataaggaccttgttaaggccaagaaagtcagtttaatcttacaatataaatatatcatttagtcacctcagcttatccccagaggtgtttacacaattcccaatgaccagtgcagcttggaagggactgaggctcgcaagtgggtggcacagtcggctcttcagtggctccaaagtgagcccctcacaacaggagacacttcagagaggtctgtccccagccacgcactcatgattgctttttagcagaagtcatggtcgctgaggccctgggtttggcaaaagcacagctgccagcagagcacagttctggtaggtggggccacggctgacctggccccagagctacaggaacaggcaggggccagcttggcttgcaacaccatgaaacaagcctgtggggcccttagtgtcttctcccgcagagcccaccagaaacacttctgtgagtaacagaacctggaaggaaaaggggcaggggtggggccttggtggcaccgcacaggacgtgccccaggcttcctctccagctgcactgccacgtgcggccaacaagagccccgcagccctggggtgctgaggcttggtccttcccagcttctgcaaatgccctggcactgccctccaattcagagggtataaacatcaatccaagccctgttcctctttccaacatgggggggacttggagtgccactggagggaagggggcagtctctctggaagaaccagagctgcacccttcaccactggagtgatcacagcttcaggctctacctggctggcttttctcatgaaggatcccgtctcatctcccagatcaaaaagaccctcttctaatgctgtcccagcatctaccaacaggctgacctgagctgcccgtgtcccccgttcctgtagcctgagacctatcagatgtcatcttccacggagccactgtgctcgctaaggaggtaccacttcagcctgtcgggcagaggcagggctttgaccttcacatccacaggccacggctgaaggtagagccggatggccacacggcacaggtgcttgaggggcgggggatagctctccagctgcctcaaggagaagtggagggcctggatcttttccgccaggctgcccacagggtggatatcgaagttttcgggcagctggagtttctgagagttggtcaccatgagatccaggacagtctcagctttgcgcaggaggtccgcatggctctcgtcttccgtgcagcctgggtgggaacagagcctctcaaagatgatgtgaaagccagaccagcaggacgcaccgtgcagggagcagttgtaggcggctccggactccaggaggaagcgcaggagagggaagtgcagtttaaagctcttcaggcagatgtgggtgagggactcgtgggctgggcactcgctggggtcggccccgtgtgccagcagcagccgtgtgacttggaagcagaagcggttgatcatctgggcctcctctttgtcccctcccacggtctcaccaagcaggaagatgatgcaggtgaacactgtgtccccatctt

SEQ ID NO: 376597 - DNA, 3788 bp, Homo sapiens
  misc_feature (14)..(14): n is a, c, g, or t
  misc_feature (22)..(22): n is a, c, g, or t
aagcggctggtacngtccgggnggtatgggatccgcgagctgtcgcgtctggtcgtggtctggcggagctgcggttggcttgtggcgtctccgccgccgccgccctcccttcctcttccccatcttcttctctcggtcccgggagcccccgcccggagagagtcgcggttgctgatcgtggtgcttgagtagagccgtggttggtgacagcatgacgagcgaggtgatagaagacgagaagcaattctattccaaggccaagacctactggaaacaaatcccacccacggtggacggcatgcttggggggaaggcccgaacaagacaggaacgtcctgtgccctggactgtggagctggcattgggaggatcaccaagcggctgctcctgccgctgttcagagaggtggatatggtcgacataacggaggacttcctggttcaagccaagacctacctgggggaggagggcaagagggtgaggaactacttctgttgtgggctccaggacttcaccccggagccggactcttacgacgtgatctggatccagtgggtgataggccacctcaccgatcagcacctggccgagttcctgcggcgctgcaagggcagcctccgccccaacggcatcatcgtcatcaaagacaacatggcccaggagggcgtgattctggacgacgtggacagcagcgtgtgccgggaccttgacgtggtccgcaggatcatctgcagtgcaggcctcagcctcctggccgaggagaggcaggagaacctccccgatgagatctaccatgtctatagctttgccctgagatgagccggggctggcaggagaaactgaggaaccacagtcctggtggggggagctggcagctgggcaagatccaggcgccacgctggcggttcgtgagtgtcgaggcaccactaaatatagctgtctgccgtccactcattatgcgggctcttcttcaaaaggcaaggtgggacccggcggggagggtgctgctgaaccagcggtgaggcaggagcccagaccctgctctcctgcgagatgggattgggtggaaggggctccagggctcctggtgctccccatgtgggaatagggtggccacatcagtaaccgattccctgggcctccagcccggccttccagccatgggcctggctgcctgaagaggaaggaaaccacccccaacttggttgctggggacttgaagacttcagtgtgatctttacctaggggagggacagagctgggctggtggagcccatgggtgctgcctgatggtgctgtggggtgggtgctcatgtgccaagtcctgcttggcagtggagacctggggcccttaaagtgttacaacagcctgcagcaagggaagttccccgtagcctcagtcttctctgggcttgaggctgctccttggcaggcatttaaagtaaaaaataaaatggggctgggcgcggtggctcacgcctgtaatcccagcactttgggaggccgaggcgggcagatcacgaggtcaggagattgagaccatcctggctaacaggtgaaaccccgtctctacttaaaatacaaaaaaaaaaaaaattagccaggcgtgatggcgggcgcctgtagtcccagctactcaggaggctgaggcaggagaatggggtgagcccgggaggcagagcttgcagtgagctgagattgcgccactgcactccagcctaggtgacagagcgagactctgtctcaaaataaaactaaaataaaatgggggccgggcacagtggctcatgtctgtaatcccagcactttgaaaggccgaggcaggcgaatcacctgaggtcaggagtttgagaccagcctgaccaacatggcgaaaccccgtctctactaaaaatacaaaaatcagccaggcatggtggtgggcacctataatgccagctactcaggaggctgaggcaggagaactgcttgaacctgggaggcagaggtcgcagtgagccgagattgcaccattgcactccagcctgggtgacagagtgtctcgaaaaaaaaaaataataaaatgggacctccacactgtggaggcccttgccagtctagagtggtgcttctttgcagggacttggaaacaaccccccaaacacagcatcccctcacacctgccacccacttccttaccggctgctgtgggagcctctatcctgaactatggaggggcggggtggaaattttatataaggaccttgttaaggccaagaaagtcagtttaatcttacaatataaatatatcatttagtcacctcagcttatccccagaggtgtttacacaattcccaatgaccagtgcagcttggaagggactgaggctcgcaagtgggtggcacagtcggctcttcagtggctccaaagtgagcccctcacaacaggagacacttcagagaggtctgtccccagccacgcactcatgattgctttttagcagaagtcatggtcgctgaggccctgggtttggcaaaagcacagctgccagcagagcacagttctggtaggtggggccacggctgacctggccccagagctacaggaacaggcaggggccagcttggcttgcaacaccatgaaacaagcctgtggggcccttagtgtcttctcccgcagagcccaccagaaacacttctgtgagtaacagaacctggaaggaaaaggggcaggggtggggccttggtggcaccgcacaggacgtgccccaggcttcctctccagctgcactgccacgtgcggccaacaagagccccgcagccctggggtgctgaggcttggtccttcccagcttctgcaaatgccctggcactgccctccaattcagagggtataaacatcaatccaagccctgttcctctttccaacatgggggggacttggagtgccactggagggaagggggcagtctctctggaagaaccagagctgcacccttcaccactggagtgatcacagcttcaggctctacctggctggcttttctcatgaaggatcccgtctcatctcccagatcaaaaagaccctcttctaatgctgtcccagcatctaccaacaggctgacctgagctgcccgtgtcccccgttcctgtagcctgagacctatcagatgtcatcttccacggagccactgtgctcgctaaggaggtaccacttcagcctgtcgggcagaggcagggctttgaccttcacatccacaggccacggctgaaggtagagccggatggccacacggcacaggtgcttgaggggcgggggatagctctccagctgcctcaaggagaagtggagggcctggatcttttccgccaggctgcccacagggtggatatcgaagttttcgggcagctggagtttctgagagttggtcaccatgagatccaggacagtctcagctttgcgcaggaggtccgcatggctctcgtcttccgtgcagcctgggtgggaacagagcctctcaaagatgatgtgaaagccagaccagcaggacgcaccgtgcagggagcagttgtaggcggctccggactccaggaggaagcgcaggagagggaagtgcagtttaaagctcttcaggcagatgtgggtgagggactcgtgggctgggcactcgctggggtcggccccgtgtgccagcagcagccgtgtgacttggaagcagaagcggttgatcatctgggcctcctctttgtcccctcccacggtctcaccaagcaggaagatgatgcaggtgaacactgtgtccccatctt

SEQ ID NO: 376598 - DNA, 3806 bp, Homo sapiens
ccccccccccccccccccccccaaaacggctaggacgaggcgggtgtgtgaatcggcagaggcttcatcttccccattcttcttctctcggtcccgggagccccgcccggagagagtcgcggttgctgatcgtggtgcttgagtagagccgtggttggtgacagcatgacgagcgaggtgatagaagacgagaagcaattctattccaaggccaagacctactggaaacaaatcccacccacggtggacggcatgcttggggggtatggccacatctccagcatcgacatcaacagctcccggaagtttctgcagaggtttttgagggaaggcccgaacaagacaggaacgtcctgtgccctggactgtggagctggcattgggaggatcaccaagcggctgctcctgccgctgttcagagaggtggatatggtcgacataacggaggacttcctggttcaagccaagacctacctgggggaggagggcaagagggtgaggaactacttctgttgtgggctccaggacttcaccccggagccggactcttacgacgtgatctggatccagtgggtgataggccacctcaccgatcagcacctggccgagttcctgcggcgctgcaagggcagcctccgccccaacggcatcatcgtcatcaaagacaacatggcccaggagggcgtgattctggacgacgtggacagcagcgtgtgccgggaccttgacgtggtccgcaggatcatctgcagtgcaggcctcagcctcctggccgaggagaggcaggagaacctccccgatgagatctaccatgtctatagctttgccctgagatgagccggggctggcaggagaaactgaggaaccacagtcctggtggggggagctggcagctgggcaagatccaggcgccacgctggcggttcgtgagtgtcgaggcaccactaaatatagctgtctgccgtccactcattatgcgggctcttcttcaaaaggcaaggtgggacccggcggggagggtgctgctgaaccagcggtgaggcaggagcccagaccctgctctcctgcgagatgggattgggtggaaggggctccagggctcctggtgctccccatgtgggaatagggtggccacatcagtaaccgattccctgggcctccagcccggccttccagccatgggcctggctgcctgaagaggaaggaaaccacccccaacttggttgctggggacttgaagacttcagtgtgatctttacctaggggagggacagagctgggctggtggagcccatgggtgctgcctgatggtgctgtggggtgggtgctcatgtgccaagtcctgcttggcagtggagacctggggcccttaaagtgttacaacagcctgcagcaagggaagttccccgtagcctcagtcttctctgggcttgaggctgctccttggcaggcatttaaagtaaaaaataaaatggggctgggcgcggtggctcacgcctgtaatcccagcactttgggaggccgaggcgggcagatcacgaggtcaggagattgagaccatcctggctaacaggtgaaaccccgtctctacttaaaatacaaaaaaaaaaaaaattagccaggcgtgatggcgggcgcctgtagtcccagctactcaggaggctgaggcaggagaatggggtgagcccgggaggcagagcttgcagtgagctgagattgcgccactgcactccagcctaggtgacagagcgagactctgtctcaaaataaaactaaaataaaatgggggccgggcacagtggctcatgtctgtaatcccagcactttgaaaggccgaggcaggcgaatcacctgaggtcaggagtttgagaccagcctgaccaacatggcgaaaccccgtctctactaaaaatacaaaaatcagccaggcatggtggtgggcacctataatgccagctactcaggaggctgaggcaggagaactgcttgaacctgggaggcagaggtcgcagtgagccgagattgcaccattgcactccagcctgggtgacagagtgtctcgaaaaaaaaaaataataaaatgggacctccacactgtggaggcccttgccagtctagagtggtgcttctttgcagggacttggaaacaaccccccaaacacagcatcccctcacacctgccacccacttccttaccggctgctgtgggagcctctatcctgaactatggaggggcggggtggaaattttatataaggaccttgttaaggccaagaaagtcagtttaatcttacaatataaatatatcatttagtcacctcagcttatccccagaggtgtttacacaattcccaatgaccagtgcagcttggaagggactgaggctcgcaagtgggtggcacagtcggctcttcagtggctccaaagtgagcccctcacaacaggagacacttcagagaggtctgtccccagccacgcactcatgattgctttttagcagaagtcatggtcgctgaggccctgggtttggcaaaagcacagctgccagcagagcacagttctggtaggtggggccacggctgacctggccccagagctacaggaacaggcaggggccagcttggcttgcaacaccatgaaacaagcctgtggggcccttagtgtcttctcccgcagagcccaccagaaacacttctgtgagtaacagaacctggaaggaaaaggggcaggggtggggccttggtggcaccgcacaggacgtgccccaggcttcctctccagctgcactgccacgtgcggccaacaagagccccgcagccctggggtgctgaggcttggtccttcccagcttctgcaaatgccctggcactgccctccaattcagagggtataaacatcaatccaagccctgttcctctttccaacatgggggggacttggagtgccactggagggaagggggcagtctctctggaagaaccagagctgcacccttcaccactggagtgatcacagcttcaggctctacctggctggcttttctcatgaaggatcccgtctcatctcccagatcaaaaagaccctcttctaatgctgtcccagcatctaccaacaggctgacctgagctgcccgtgtcccccgttcctgtagcctgagacctatcagatgtcatcttccacggagccactgtgctcgctaaggaggtaccacttcagcctgtcgggcagaggcagggctttgaccttcacatccacaggccacggctgaaggtagagccggatggccacacggcacaggtgcttgaggggcgggggatagctctccagctgcctcaaggagaagtggagggcctggatcttttccgccaggctgcccacagggtggatatcgaagttttcgggcagctggagtttctgagagttggtcaccatgagatccaggacagtctcagctttgcgcaggaggtccgcatggctctcgtcttccgtgcagcctgggtgggaacagagcctctcaaagatgatgtgaaagccagaccagcaggacgcaccgtgcagggagcagttgtaggcggctccggactccaggaggaagcgcaggagagggaagtgcagtttaaagctcttcaggcagatgtgggtgagggactcgtgggctgggcactcgctggggtcggccccgtgtgccagcagcagccgtgtgacttggaagcagaagcggttgatcatctgggcctcctctttgtcccctcccacggtctcaccaagcaggaagatgatgcaggtgaacactgtgtccccatctt

SEQ ID NO: 376599 - DNA, 3540 bp, Homo sapiens
ggaagggccgcacgtgcggtgacagggtccctctgataggttatatgcctctgcttttcaggaaggcccgaacaagacaggaacgtcctgtgccctggactgtggagctggcattgggaggatcaccaagcggctgctcctgccgctgttcagagaggtggatatggtcgacataacggaggacttcctggttcaagccaagacctacctgggggaggagggcaagagggtgaggaactacttctgttgtgggctccaggacttcaccccggagccggactcttacgacgtgatctggatccagtgggtgataggccacctcaccgatcagcacctggccgagttcctgcggcgctgcaagggcagcctccgccccaacggcatcatcgtcatcaaagacaacatggcccaggagggcgtgattctggacgacgtggacagcagcgtgtgccgggaccttgacgtggtccgcaggatcatctgcagtgcaggcctcagcctcctggccgaggagaggcaggagaacctccccgatgagatctaccatgtctatagctttgccctgagatgagccggggctggcaggagaaactgaggaaccacagtcctggtggggggagctggcagctgggcaagatccaggcgccacgctggcggttcgtgagtgtcgaggcaccactaaatatagctgtctgccgtccactcattatgcgggctcttcttcaaaaggcaaggtgggacccggcggggagggtgctgctgaaccagcggtgaggcaggagcccagaccctgctctcctgcgagatgggattgggtggaaggggctccagggctcctggtgctccccatgtgggaatagggtggccacatcagtaaccgattccctgggcctccagcccggccttccagccatgggcctggctgcctgaagaggaaggaaaccacccccaacttggttgctggggacttgaagacttcagtgtgatctttacctaggggagggacagagctgggctggtggagcccatgggtgctgcctgatggtgctgtggggtgggtgctcatgtgccaagtcctgcttggcagtggagacctggggcccttaaagtgttacaacagcctgcagcaagggaagttccccgtagcctcagtcttctctgggcttgaggctgctccttggcaggcatttaaagtaaaaaataaaatggggctgggcgcggtggctcacgcctgtaatcccagcactttgggaggccgaggcgggcagatcacgaggtcaggagattgagaccatcctggctaacaggtgaaaccccgtctctacttaaaatacaaaaaaaaaaaaaattagccaggcgtgatggcgggcgcctgtagtcccagctactcaggaggctgaggcaggagaatggggtgagcccgggaggcagagcttgcagtgagctgagattgcgccactgcactccagcctaggtgacagagcgagactctgtctcaaaataaaactaaaataaaatgggggccgggcacagtggctcatgtctgtaatcccagcactttgaaaggccgaggcaggcgaatcacctgaggtcaggagtttgagaccagcctgaccaacatggcgaaaccccgtctctactaaaaatacaaaaatcagccaggcatggtggtgggcacctataatgccagctactcaggaggctgaggcaggagaactgcttgaacctgggaggcagaggtcgcagtgagccgagattgcaccattgcactccagcctgggtgacagagtgtctcgaaaaaaaaaaataataaaatgggacctccacactgtggaggcccttgccagtctagagtggtgcttctttgcagggacttggaaacaaccccccaaacacagcatcccctcacacctgccacccacttccttaccggctgctgtgggagcctctatcctgaactatggaggggcggggtggaaattttatataaggaccttgttaaggccaagaaagtcagtttaatcttacaatataaatatatcatttagtcacctcagcttatccccagaggtgtttacacaattcccaatgaccagtgcagcttggaagggactgaggctcgcaagtgggtggcacagtcggctcttcagtggctccaaagtgagcccctcacaacaggagacacttcagagaggtctgtccccagccacgcactcatgattgctttttagcagaagtcatggtcgctgaggccctgggtttggcaaaagcacagctgccagcagagcacagttctggtaggtggggccacggctgacctggccccagagctacaggaacaggcaggggccagcttggcttgcaacaccatgaaacaagcctgtggggcccttagtgtcttctcccgcagagcccaccagaaacacttctgtgagtaacagaacctggaaggaaaaggggcaggggtggggccttggtggcaccgcacaggacgtgccccaggcttcctctccagctgcactgccacgtgcggccaacaagagccccgcagccctggggtgctgaggcttggtccttcccagcttctgcaaatgccctggcactgccctccaattcagagggtataaacatcaatccaagccctgttcctctttccaacatgggggggacttggagtgccactggagggaagggggcagtctctctggaagaaccagagctgcacccttcaccactggagtgatcacagcttcaggctctacctggctggcttttctcatgaaggatcccgtctcatctcccagatcaaaaagaccctcttctaatgctgtcccagcatctaccaacaggctgacctgagctgcccgtgtcccccgttcctgtagcctgagacctatcagatgtcatcttccacggagccactgtgctcgctaaggaggtaccacttcagcctgtcgggcagaggcagggctttgaccttcacatccacaggccacggctgaaggtagagccggatggccacacggcacaggtgcttgaggggcgggggatagctctccagctgcctcaaggagaagtggagggcctggatcttttccgccaggctgcccacagggtggatatcgaagttttcgggcagctggagtttctgagagttggtcaccatgagatccaggacagtctcagctttgcgcaggaggtccgcatggctctcgtcttccgtgcagcctgggtgggaacagagcctctcaaagatgatgtgaaagccagaccagcaggacgcaccgtgcagggagcagttgtaggcggctccggactccaggaggaagcgcaggagagggaagtgcagtttaaagctcttcaggcagatgtgggtgagggactcgtgggctgggcactcgctggggtcggccccgtgtgccagcagcagccgtgtgacttggaagcagaagcggttgatcatctgggcctcctctttgtcccctcccacggtctcaccaagcaggaagatgatgcaggtgaacactgtgtccccatctt

SEQ ID NO: 376600 - DNA, 933 bp, Homo sapiens
  misc_feature (14)..(14): n is a, c, g, or t
  misc_feature (22)..(22): n is a, c, g, or t
aagcggctggtacngtccgggnggtatgggatccgcgagctgtcgcgtctggtcgtggtctggcggagctgcggttggcttgtggcgtctccgccgccgccgccctcccttcctcttccccatcttcttctctcggtcccgggagcccccgcccggagagagtcgcggttgctgatcgtggtgcttgagtagagccgtggttggtgacagcatgacgagcgaggtgatagaagacgagaagcaattctattccaaggccaagacctactggaaacaaatcccacccacggtggacggcatgcttggggggtatggccacatctccagcatcgacatcaacagctcccggaagtttctgcagaggtttttgagggaaggcccgaacaagacaggaacgtcctgtgccctggactgtggagctggcattgggaggatcaccaagcggctgctcctgccgctgttcagagaggtggatatggtcgacataacggaggacttcctggttcaagccaagacctacctgggggaggagggcaagagggccacctcaccgatcagcacctggccgagttcctgcggcgctgcaagggcagcctccgccccaacggcatcatcgtcatcaaagacaacatggcccaggagggcgtgattctggacgacgtggacagcagcgtgtgccgggaccttgacgtggtccgcaggatcatctgcagtgcaggcctcagcctcctggccgaggagaggcaggagaacctccccgatgagatctaccatgtctatagctttgccctgagatgagccggggctggcaggagaaactgaggaaccacagtcctggtggggggagctggcagctgggcaagatccaggcgccacgctggcggttcgtgagtgtcgaggcaccactaaatatagctgtctgccgtccactca

SEQ ID NO: 376601 - DNA, 1647 bp, Homo sapiens
  misc_feature (14)..(14): n is a, c, g, or t
  misc_feature (22)..(22): n is a, c, g, or t
aagcggctggtacngtccgggnggtatgggatccgcgagctgtcgcgtctggtcgtggtctggcggagctgcggttggcttgtggcgtctccgccgccgccgccctcccttcctcttccccatcttcttctctcggtcccgggagcccccgcccggagagagtcgcggttgctgatcgtggtgcttgagtagagccgtggttggtgacagcatgacgagcgaggtgatagaagacgagaagcaattctattccaaggccaagacctactggaaacaaatcccacccacggtggacggcatgcttggggggtatggccacatctccagcatcgacatcaacagctcccggaagtttctgcagaggtttttgagggaaggcccgaacaagacaggaacgtcctgtgccctggactgtggagctggcattgggaggatcaccaagcggctgctcctgccgctgttcagagaggtggatatggtcgacataacggaggacttcctggttcaagccaagacctacctgggggaggagggcaagagggtgaggaactacttctgttgtgggctccaggacttcaccccggagccggactcttacgacgtgatctggatccagtgggtgataggtgagggttccaccgcccttccctgctcacctgtatgtctcctgccactcgcgttccccataaggtgtcaggaccagggctttgcactcctgcagcaagtgggccagtgaggattccccaccccgcccaggcccacccccaccccgtacttcccaggactgagggacaggctcggcctaaaaggtagatttcttccttctaggttttgtttcagttgaatacctgctaccatccatttgggtgcagttttttgttgaaaaaattttaatggccaataacttactgcattcaaagtgaggagttttataagggttttatttttaataagatgaatagtttaagcttcgtgtctagccctgcaccctcttagcctaacagcacacctcgagcgctgtgccctgggctgctgacgtggcggcaggccgctagcagcagtcgggcagaggcagggctttgaccttcacatccacaggccacggctgaaggtagagccggatggccacacggcacaggtgcttgaggggcgggggatagctctccagctgcctcaaggagaagtggagggcctggatcttttccgccaggctgcccacagggtggatatcgaagttttcgggcagctggagtttctgagagttggtcaccatgagatccaggacagtctcagctttgcgcaggaggtccgcatggctctcgtcttccgtgcagcctgggtgggaacagagcctctcaaagatgatgtgaaagccagaccagcaggacgcaccgtgcagggagcagttgtaggcggctccggactccaggaggaagcgcaggagagggaagtgcagtttaaagctcttcaggcagatgtgggtgagggactcgtgggctgggcactcgctggggtcggccccgtgtgccagcagcagccgtgtgacttggaagcagaagcggttgatcatctgggcctcctctttgtcccctcccacggtctcaccaagcaggaagatgatgcaggtgaacactgtgtccccatctt

SEQ ID NO: 376602 - DNA, 251 bp, Homo sapiens
aagcgcaggagagggaagtgcagtttaaagctcttcaggcagatgtgggtgagggactcgtgggctgggcactcgctggggtcggccccgtgtgccagcagcagccgtgtgacttggaagcagaagcggttgatcatctgggcctcctctttgtcccctcccacggtctcaccaagcaggaagatgatgcaggtgaacactgtgtccccatctttggtggtggccttgacgtctgcccctagaagagccat

SEQ ID NO: 376603 - DNA, 3852 bp, Homo sapiens
  misc_feature (14)..(14): n is a, c, g, or t
  misc_feature (22)..(22): n is a, c, g, or t
aagcggctggtacngtccgggnggtatgggatccgcgagctgtcgcgtctggtcgtggtctggcggagctgcggttggcttgtggcgtctccgccgccgccgccctcccttcctcttccccatcttcttctctcggtcccgggagcccccgcccggagagagtcgcggttgctgatcgtggtgcttgagtagagccgtggttggtgacagcatgacgagcgaggtgatagaagacgagaagcaattctattccaaggccaagacctactggaaacaaatcccacccacggtggacggcatgcttggggggtatggccacatctccagcatcgacatcaacagctcccggaagtttctgcagaggtttttgagggaaggcccgaacaagacaggaacgtcctgtgccctggactgtggagctggcattgggaggatcaccaagcggctgctcctgccgctgttcagagaggtggatatggtcgacataacggaggacttcctggttcaagccaagacctacctgggggaggagggcaagagggtgaggaactacttctgttgtgggctccaggacttcaccccggagccggactcttacgacgtgatctggatccagtgggtgataggccacctcaccgatcagcacctggccgagttcctgcggcgctgcaagggcagcctccgccccaacggcatcatcgtcatcaaagacaacatggcccaggagggcgtgattctggacgacgtggacagcagcgtgtgccgggaccttgacgtggtccgcaggatcatctgcagtgcaggcctcagcctcctggccgaggagaggcaggagaacctccccgatgagatctaccatgtctatagctttgccctgagatgagccggggctggcaggagaaactgaggaaccacagtcctggtggggggagctggcagctgggcaagatccaggcgccacgctggcggttcgtgagtgtcgaggcaccactaaatatagctgtctgccgtccactcattatgcgggctcttcttcaaaaggcaaggtgggacccggcggggagggtgctgctgaaccagcggtgaggcaggagcccagaccctgctctcctgcgagatgggattgggtggaaggggctccagggctcctggtgctccccatgtgggaatagggtggccacatcagtaaccgattccctgggcctccagcccggccttccagccatgggcctggctgcctgaagaggaaggaaaccacccccaacttggttgctggggacttgaagacttcagtgtgatctttacctaggggagggacagagctgggctggtggagcccatgggtgctgcctgatggtgctgtggggtgggtgctcatgtgccaagtcctgcttggcagtggagacctggggcccttaaagtgttacaacagcctgcagcaagggaagttccccgtagcctcagtcttctctgggcttgaggctgctccttggcaggcatttaaagtaaaaaataaaatggggctgggcgcggtggctcacgcctgtaatcccagcactttgggaggccgaggcgggcagatcacgaggtcaggagattgagaccatcctggctaacaggtgaaaccccgtctctacttaaaatacaaaaaaaaaaaaaattagccaggcgtgatggcgggcgcctgtagtcccagctactcaggaggctgaggcaggagaatggggtgagcccgggaggcagagcttgcagtgagctgagattgcgccactgcactccagcctaggtgacagagcgagactctgtctcaaaataaaactaaaataaaatgggggccgggcacagtggctcatgtctgtaatcccagcactttgaaaggccgaggcaggcgaatcacctgaggtcaggagtttgagaccagcctgaccaacatggcgaaaccccgtctctactaaaaatacaaaaatcagccaggcatggtggtgggcacctataatgccagctactcaggaggctgaggcaggagaactgcttgaacctgggaggcagaggtcgcagtgagccgagattgcaccattgcactccagcctgggtgacagagtgtctcgaaaaaaaaaaataataaaatgggacctccacactgtggaggcccttgccagtctagagtggtgcttctttgcagggacttggaaacaaccccccaaacacagcatcccctcacacctgccacccacttccttaccggctgctgtgggagcctctatcctgaactatggaggggcggggtggaaattttatataaggaccttgttaaggccaagaaagtcagtttaatcttacaatataaatatatcatttagtcacctcagcttatccccagaggtgtttacacaattcccaatgaccagtgcagcttggaagggactgaggctcgcaagtgggtggcacagtcggctcttcagtggctccaaagtgagcccctcacaacaggagacacttcagagaggtctgtccccagccacgcactcatgattgctttttagcagaagtcatggtcgctgaggccctgggtttggcaaaagcacagctgccagcagagcacagttctggtaggtggggccacggctgacctggccccagagctacaggaacaggcaggggccagcttggcttgcaacaccatgaaacaagcctgtggggcccttagtgtcttctcccgcagagcccaccagaaacacttctgtgagtaacagaacctggaaggaaaaggggcaggggtggggccttggtggcaccgcacaggacgtgccccaggcttcctctccagctgcactgccacgtgcggccaacaagagccccgcagccctggggtgctgaggcttggtccttcccagcttctgcaaatgccctggcactgccctccaattcagagggtataaacatcaatccaagccctgttcctctttccaacatgggggggacttggagtgccactggagggaagggggcagtctctctggaagaaccagagctgcacccttcaccactggagtgatcacagcttcaggctctacctggctggcttttctcatgaaggatcccgtctcatctcccagatcaaaaagaccctcttctaatgctgtcccagcatctaccaacaggctgacctgagctgcccgtgtcccccgttcctgtagcctgagacctatcagatgtcatcttccacggagccactgtgctcgctaaggaggtaccacttcagcctgtcgggcagaggcagggctttgaccttcacatccacaggccacggctgaaggtagagccggatggccacacggcacaggtgcttgaggggcgggggatagctctccagctgcctcaaggagaagtggagggcctggatcttttccgccaggctgcccacagggtggatatcgaagttttcgggcagctggagtttctgagagttggtcaccatgagatccaggacagtctcagctttgcgcaggaggtccgcatggctctcgtcttccgtgcagcctgggtgggaacagagcctctcaaagatgatgtgaaagccagaccagcaggacgcaccgtgcagggagcagttgtaggcggctccggactccaggaggaagcgcaggagagggaagtgcagtttaaagctcttcaggcagatgtgggtgagggactcgtgggctgggcactcgctggggtcggccccgtgtgccagcagcagccgtgtgacttggaagcagaagcggttgatcatctgggcctcctctttgtcccctcccacggtctcaccaagcaggaagatgatgcaggtgaacactgtgtccccatctt

SEQ ID NO: 376604 - DNA, 3613 bp, Homo sapiens
  misc_feature (14)..(14): n is a, c, g, or t
  misc_feature (22)..(22): n is a, c, g, or t
  misc_feature (3600)..(3600): n is a, c, g, or t
aagcggctggtacngtccgggnggtatgggatccgcgagctgtcgcgtctggtcgtggtctggcggagctgcggttggcttgtggcgtctccgccgccgccgccctcccttcctcttccccatcttcttctctcggtcccgggagcccccgcccggagagagtcgcggttgctgatcgtggtgcttgagtagagccgtggttggtgacagcatgacgagcgaggtgatagaagacgagaagcaattctattccaaggccaagacctactggaaacaaatcccacccacggtggacggcatgcttggggggtatggccacatctccagcatcgacatcaacagctcccggaagtttctgcagaggtttttgagggaaggcccgaacaagacaggaacgtcctgtgccctggactgtggagctggcattgggaggatcaccaagcggctgctcctgccgctgttcagagaggtggatatggtcgacataacggaggacttcctggttcaagccaagacctacctgggggaggagggcaagagggtgaggaactacttctgttgtgggctccaggacttcaccccggagccggactcttacgacgtgatctggatccagtgggtgataggccacctcaccgatcagcacctggccgagttcctgcggcgctgcaagggcagcctccgccccaacggcatcatcgtcatcaaagacaacatggcccaggagggcgtgattctggacgacgtggacagcagcgtgtgccgggaccttgacgtggtccgcaggatcatctgcagtgcaggcctcagcctcctggccgaggagaggcaggagaacctccccgatgagatctaccatgtctatagctttgccctgagatgagccggggctggcaggagaaactgaggaaccacagtcctggtggggggagctggcagctgggcaagatccaggcgccacgctggcggttcgtgagtgtcgaggcaccactaaatatagctgtctgccgtccactcattatgcgggctcttcttcaaaaggcaaggtgggacccggcggggagggtgctgctgaaccagcggtgaggcaggagcccagaccctgctctcctgcgagatgggattgggtggaaggggctccagggctcctggtgctccccatgtgggaatagggtggccacatcagtaaccgattccctgggcctccagcccggccttccagccatgggcctggctgcctgaagaggaaggaaaccacccccaacttggttgctggggacttgaagacttcagtgtgatctttacctaggggagggacagagctgggctggtggagcccatgggtgctgcctgatggtgctgtggggtgggtgctcatgtgccaagtcctgcttggcagtggagacctggggcccttaaagtgttacaacagcctgcagcaagggaagttccccgtagcctcagtcttctctgggcttgaggctgctccttggcaggcatttaaagtaaaaaataaaatggggctgggcgcggtggctcacgcctgtaatcccagcactttgggaggccgaggcgggcagatcacgaggtcaggagattgagaccatcctggctaacaggtgaaaccccgtctctacttaaaatacaaaaaaaaaaaaaattagccaggcgtgatggcgggcgcctgtagtcccagctactcaggaggctgaggcaggagaatggggtgagcccgggaggcagagcttgcagtgagctgagattgcgccactgcactccagcctaggtgacagagcgagactctgtctcaaaataaaactaaaataaaatgggggccgggcacagtggctcatgtctgtaatcccagcactttgaaaggccgaggcaggcgaatcacctgaggtcaggagtttgagaccagcctgaccaacatggcgaaaccccgtctctactaaaaatacaaaaatcagccaggcatggtggtgggcacctataatgccagctactcaggaggctgaggcaggagaactgcttgaacctgggaggcagaggtcgcagtgagccgagattgcaccattgcactccagcctgggtgacagagtgtctcgaaaaaaaaaaataataaaatgggacctccacactgtggaggcccttgccagtctagagtggtgcttctttgcagggacttggaaacaaccccccaaacacagcatcccctcacacctgccacccacttccttaccggctgctgtgggagcctctatcctgaactatggaggggcggggtggaaattttatataaggaccttgttaaggccaagaaagtcagtttaatcttacaatataaatatatcatttagtcacctcagcttatccccagaggtgtttacacaattcccaatgaccagtgcagcttggaagggactgaggctcgcaagtgggtggcacagtcggctcttcagtggctccaaagtgagcccctcacaacaggagacacttcagagaggtctgtccccagccacgcactcatgattgctttttagcagaagtcatggtcgctgaggccctgggtttggcaaaagcacagctgccagcagagcacagttctggtaggtggggccacggctgacctggccccagagctacaggaacaggcaggggccagcttggcttgcaacaccatgaaacaagcctgtggggcccttagtgtcttctcccgcagagcccaccagaaacacttctgtgagtaacagaacctggaaggaaaaggggcaggggtggggccttggtggcaccgcacaggacgtgccccaggcttcctctccagctgcactgccacgtgcggccaacaagagccccgcagccctggggtgctgaggcttggtccttcccagcttctgcaaatgccctggcactgccctccaattcagagggtataaacatcaatccaagccctgttcctctttccaacatgggggggacttggagtgccactggagggaagggggcagtctctctggaagaaccagagctgcacccttcaccactggagtgatcacagcttcaggctctacctggctggcttttctcatgaaggatcccgtctcatctcccagatcaaaaagaccctcttctaatgctgtcccagcatctaccaacaggctgacctgagctgcccgtgtcccccgttcctgtagcctgagacctatcagatgtcatcttccacggagccactgtgctcgctaaggaggtaccacttcagcctgtcgggcagaggcagggctttgaccttcacatccacaggccacggctgaaggtagagccggatggccacacggcacaggtgcttgaggggcgggggatagctctccagctgcctcaaggagaagtggagggcctggatcttttccgccaggctgcccacagggtggatatcgaagttttcgggcagctggagtttctgagagttggtcaccatgagatccaggacagtctcagctttgcgcaggaggtccgcatggctctcgtcttccgtgcagcctgggtgggacaggtgactcaaagaacctggccgacctcgccccatctttacatcgcgcncctcgtcctttag

SEQ ID NO: 376605 - DNA, 4901 bp, Homo sapiens
gcctcgtgccgctccgaggtgccccatgtgcggcaggaagaagcagcctccacaggactgcgctcagcgggagacggggcttccccgtgaagaggtgctgagtgcgaatgcccactccaacacctggtcactgtgtgatcttgagaaagagttgagcctctctgggccctggcttccccaacaaccaaaggctgtacagagagcggcttaggagagagctcctgtgtgcgccgccgagggctctgctggctcaggacatctgtaggaccagttccagctccagtgggcaccgccagcacgcccaggagagtcgcggttgctgatcgtggtgcttgagtagagccgtggttggtgacagcatgacgagcgaggtgatagaagacgagaagcaattctattccaaggccaagacctactggaaacaaatcccacccacggtggacggcatgcttggggggtatggccacatctccagcatcgacatcaacagctcccggaagtttctgcagaggtttttgagggaaggcccgaacaagacaggaacgtcctgtgccctggactgtggagctggcattgggaggatcaccaagcggctgctcctgccgctgttcagagaggtggatatggtcgacataacggaggacttcctggttcaagccaagacctacctgggggaggagggcaagagggtgaggaactacttctgttgtgggctccaggacttcaccccggagccggactcttacgacgtgatctggatccagtgggtgataggtgagggttccaccgcccttccctgctcacctgtatgtctcctgccactcgcgttccccataaggtgtcaggaccagggctttgcactcctgcagcaagtgggccagtgaggattccccaccccgcccaggcccacccccaccccgtacttcccaggactgagggacaggctcggcctaaaaggtagatttcttccttctaggttttgtttcagttgaatacctgctaccatccatttgggtgcagttttttgttgaaaaaattttaatggccaataacttactgcattcaaagtgaggagttttataagggttttatttttaataagatgaatagtttaagcttcgtgtctagccctgcaccctcttagcctaacagcacacctcgagcgctgtgccctgggctgctgacgtggcggcaggccgctagcagcagtcggccacctcctgaggcgggcagcacaggcctgctgtggacactctaggtctggccttgtattttgtggtctcagaagcctttgtggggacttctagtgtagggaaggcagtctctctgggagctcctgcaatgccaaactcttagcccaggttcactcctccgatccaagcctggcaggggtggggcatcatggtgtgtaggtatcaggcaggacttgtaagccatcccgtcaagtcaaattctggcttaatgtgtctttaggtagatgacctctgagccacagtttcctattctatgaattggggtttagtaaatctctcgggactgagagccaatgaggccatgtgtgcacacaaaatgctgggcacaaatgaggggctcagcggggctgagaagtacatcccatccagtgccgacatccgcttgcatggtgccctggtaaccttgcctctgccctccccaggccacctcaccgatcagcacctggccgagttcctgcggcgctgcaagggcagcctccgccccaacggcatcatcgtcatcaaagacaacatggcccaggagggcgtgattctggacgacgtggacagcagcgtgtgccgggaccttgacgtggtccgcaggatcatctgcagtgcaggcctcagcctcctggccgaggagaggcaggagaacctccccgatgagatctaccatgtctatagctttgccctgagatgagccggggctggcaggagaaactgaggaaccacagtcctggtggggggagctggcagctgggcaagatccaggcgccacgctggcggttcgtgagtgtcgaggcaccactaaatatagctgtctgccgtccactcattatgcgggctcttcttcaaaaggcaaggtgggacccggcggggagggtgctgctgaaccagcggtgaggcaggagcccagaccctgctctcctgcgagatgggattgggtggaaggggctccagggctcctggtgctccccatgtgggaatagggtggccacatcagtaaccgattccctgggcctccagcccggccttccagccatgggcctggctgcctgaagaggaaggaaaccacccccaacttggttgctggggacttgaagacttcagtgtgatctttacctaggggagggacagagctgggctggtggagcccatgggtgctgcctgatggtgctgtggggtgggtgctcatgtgccaagtcctgcttggcagtggagacctggggcccttaaagtgttacaacagcctgcagcaagggaagttccccgtagcctcagtcttctctgggcttgaggctgctccttggcaggcatttaaagtaaaaaataaaatggggctgggcgcggtggctcacgcctgtaatcccagcactttgggaggccgaggcgggcagatcacgaggtcaggagattgagaccatcctggctaacaggtgaaaccccgtctctacttaaaatacaaaaaaaaaaaaaattagccaggcgtgatggcgggcgcctgtagtcccagctactcaggaggctgaggcaggagaatggggtgagcccgggaggcagagcttgcagtgagctgagattgcgccactgcactccagcctaggtgacagagcgagactctgtctcaaaataaaactaaaataaaatgggggccgggcacagtggctcatgtctgtaatcccagcactttgaaaggccgaggcaggcgaatcacctgaggtcaggagtttgagaccagcctgaccaacatggcgaaaccccgtctctactaaaaatacaaaaatcagccaggcatggtggtgggcacctataatgccagctactcaggaggctgaggcaggagaactgcttgaacctgggaggcagaggtcgcagtgagccgagattgcaccattgcactccagcctgggtgacagagtgtctcgaaaaaaaaaaataataaaatgggacctccacactgtggaggcccttgccagtctagagtggtgcttctttgcagggacttggaaacaaccccccaaacacagcatcccctcacacctgccacccacttccttaccggctgctgtgggagcctctatcctgaactatggaggggcggggtggaaattttatataaggaccttgttaaggccaagaaagtcagtttaatcttacaatataaatatatcatttagtcacctcagcttatccccagaggtgtttacacaattcccaatgaccagtgcagcttggaagggactgaggctcgcaagtgggtggcacagtcggctcttcagtggctccaaagtgagcccctcacaacaggagacacttcagagaggtctgtccccagccacgcactcatgattgctttttagcagaagtcatggtcgctgaggccctgggtttggcaaaagcacagctgccagcagagcacagttctggtaggtggggccacggctgacctggccccagagctacaggaacaggcaggggccagcttggcttgcaacaccatgaaacaagcctgtggggcccttagtgtcttctcccgcagagcccaccagaaacacttctgtgagtaacagaacctggaaggaaaaggggcaggggtggggccttggtggcaccgcacaggacgtgccccaggcttcctctccagctgcactgccacgtgcggccaacaagagccccgcagccctggggtgctgaggcttggtccttcccagcttctgcaaatgccctggcactgccctccaattcagagggtataaacatcaatccaagccctgttcctctttccaacatgggggggacttggagtgccactggagggaagggggcagtctctctggaagaaccagagctgcacccttcaccactggagtgatcacagcttcaggctctacctggctggcttttctcatgaaggatcccgtctcatctcccagatcaaaaagaccctcttctaatgctgtcccagcatctaccaacaggctgacctgagctgcccgtgtcccccgttcctgtagcctgagacctatcagatgtcatcttccacggagccactgtgctcgctaaggaggtaccacttcagcctgtcgggcagaggcagggctttgaccttcacatccacaggccacggctgaaggtagagccggatggccacacggcacaggtgcttgaggggcgggggatagctctccagctgcctcaaggagaagtggagggcctggatcttttccgccaggctgcccacagggtggatatcgaagttttcgggcagctggagtttctgagagttggtcaccatgagatccaggacagtctcagctttgcgcaggaggtccgcatggctctcgtcttccgtgcagcctgggtgggaacagagcctctcaaagatgatgtgaaagccagaccagcaggacgcaccgtgcagggagcagttgtaggcggctccggactccaggaggaagcgcaggagagggaagtgcagtttaaagctcttcaggcagatgtgggtgagggactcgtgggctgggcactcgctggggtcggccccgtgtgccagcagcagccgtgtgacttggaagcagaagcggttgatcatctgggcctcctctttgtcccctcccacggtctcaccaagcaggaagatgatgcaggtgaacactgtgtccccatctt

SEQ ID NO: 376606 - DNA, 3767 bp, Homo sapiens
  misc_feature (14)..(14): n is a, c, g, or t
  misc_feature (22)..(22): n is a, c, g, or t
aagcggctggtacngtccgggnggtatgggatccgcgagctgtcgcgtctggtcgtggtctggcggagctgcggttggcttgtggcgtctccgccgccgccgccctcccttcctcttccccatcttcttctctcggtcccgggagcccccgcccggagagagtcgcggttgctgatcgtggtgcttgagtagagccgtggttggtgacagcatgacgagcgaggtgatagaagacgagaagcaattctattccaaggccaagacctactggaaacaaatcccacccacggtggacggcatgcttggggggtatggccacatctccagcatcgacatcaacagctcccggaagtttctgcagaggtttttgagggaaggcccgaacaagacaggaacgtcctgtgccctggactgtggagctggcattgggaggatcaccaagcggctgctcctgccgctgttcagagaggtggatatggtcgacataacggaggacttcctggttcaagccaagacctacctgggggaggagggcaagagggccacctcaccgatcagcacctggccgagttcctgcggcgctgcaagggcagcctccgccccaacggcatcatcgtcatcaaagacaacatggcccaggagggcgtgattctggacgacgtggacagcagcgtgtgccgggaccttgacgtggtccgcaggatcatctgcagtgcaggcctcagcctcctggccgaggagaggcaggagaacctccccgatgagatctaccatgtctatagctttgccctgagatgagccggggctggcaggagaaactgaggaaccacagtcctggtggggggagctggcagctgggcaagatccaggcgccacgctggcggttcgtgagtgtcgaggcaccactaaatatagctgtctgccgtccactcattatgcgggctcttcttcaaaaggcaaggtgggacccggcggggagggtgctgctgaaccagcggtgaggcaggagcccagaccctgctctcctgcgagatgggattgggtggaaggggctccagggctcctggtgctccccatgtgggaatagggtggccacatcagtaaccgattccctgggcctccagcccggccttccagccatgggcctggctgcctgaagaggaaggaaaccacccccaacttggttgctggggacttgaagacttcagtgtgatctttacctaggggagggacagagctgggctggtggagcccatgggtgctgcctgatggtgctgtggggtgggtgctcatgtgccaagtcctgcttggcagtggagacctggggcccttaaagtgttacaacagcctgcagcaagggaagttccccgtagcctcagtcttctctgggcttgaggctgctccttggcaggcatttaaagtaaaaaataaaatggggctgggcgcggtggctcacgcctgtaatcccagcactttgggaggccgaggcgggcagatcacgaggtcaggagattgagaccatcctggctaacaggtgaaaccccgtctctacttaaaatacaaaaaaaaaaaaaattagccaggcgtgatggcgggcgcctgtagtcccagctactcaggaggctgaggcaggagaatggggtgagcccgggaggcagagcttgcagtgagctgagattgcgccactgcactccagcctaggtgacagagcgagactctgtctcaaaataaaactaaaataaaatgggggccgggcacagtggctcatgtctgtaatcccagcactttgaaaggccgaggcaggcgaatcacctgaggtcaggagtttgagaccagcctgaccaacatggcgaaaccccgtctctactaaaaatacaaaaatcagccaggcatggtggtgggcacctataatgccagctactcaggaggctgaggcaggagaactgcttgaacctgggaggcagaggtcgcagtgagccgagattgcaccattgcactccagcctgggtgacagagtgtctcgaaaaaaaaaaataataaaatgggacctccacactgtggaggcccttgccagtctagagtggtgcttctttgcagggacttggaaacaaccccccaaacacagcatcccctcacacctgccacccacttccttaccggctgctgtgggagcctctatcctgaactatggaggggcggggtggaaattttatataaggaccttgttaaggccaagaaagtcagtttaatcttacaatataaatatatcatttagtcacctcagcttatccccagaggtgtttacacaattcccaatgaccagtgcagcttggaagggactgaggctcgcaagtgggtggcacagtcggctcttcagtggctccaaagtgagcccctcacaacaggagacacttcagagaggtctgtccccagccacgcactcatgattgctttttagcagaagtcatggtcgctgaggccctgggtttggcaaaagcacagctgccagcagagcacagttctggtaggtggggccacggctgacctggccccagagctacaggaacaggcaggggccagcttggcttgcaacaccatgaaacaagcctgtggggcccttagtgtcttctcccgcagagcccaccagaaacacttctgtgagtaacagaacctggaaggaaaaggggcaggggtggggccttggtggcaccgcacaggacgtgccccaggcttcctctccagctgcactgccacgtgcggccaacaagagccccgcagccctggggtgctgaggcttggtccttcccagcttctgcaaatgccctggcactgccctccaattcagagggtataaacatcaatccaagccctgttcctctttccaacatgggggggacttggagtgccactggagggaagggggcagtctctctggaagaaccagagctgcacccttcaccactggagtgatcacagcttcaggctctacctggctggcttttctcatgaaggatcccgtctcatctcccagatcaaaaagaccctcttctaatgctgtcccagcatctaccaacaggctgacctgagctgcccgtgtcccccgttcctgtagcctgagacctatcagatgtcatcttccacggagccactgtgctcgctaaggaggtaccacttcagcctgtcgggcagaggcagggctttgaccttcacatccacaggccacggctgaaggtagagccggatggccacacggcacaggtgcttgaggggcgggggatagctctccagctgcctcaaggagaagtggagggcctggatcttttccgccaggctgcccacagggtggatatcgaagttttcgggcagctggagtttctgagagttggtcaccatgagatccaggacagtctcagctttgcgcaggaggtccgcatggctctcgtcttccgtgcagcctgggtgggaacagagcctctcaaagatgatgtgaaagccagaccagcaggacgcaccgtgcagggagcagttgtaggcggctccggactccaggaggaagcgcaggagagggaagtgcagtttaaagctcttcaggcagatgtgggtgagggactcgtgggctgggcactcgctggggtcggccccgtgtgccagcagcagccgtgtgacttggaagcagaagcggttgatcatctgggcctcctctttgtcccctcccacggtctcaccaagcaggaagatgatgcaggtgaacactgtgtccccatctt

SEQ ID NO: 376607 - DNA, 3776 bp, Homo sapiens
gaatggttggacttttgtctgtaggattttcttagagtggtcaatgcccacctggtatcaggcactgggctaatggtgtacaaggtaatgtctctacccccaggaagctgcatgctgggagaggagacggatggagtccagcctggagagtcgcggttgctgatcgtggtgcttgagtagagccgtggttggtgacagcatgacgagcgaggtgatagaagacgagaagcaattctattccaaggccaagacctactggaaacaaatcccacccacggtggacggcatgcttggggggaaggcccgaacaagacaggaacgtcctgtgccctggactgtggagctggcattgggaggatcaccaagcggctgctcctgccgctgttcagagaggtggatatggtcgacataacggaggacttcctggttcaagccaagacctacctgggggaggagggcaagagggtgaggaactacttctgttgtgggctccaggacttcaccccggagccggactcttacgacgtgatctggatccagtgggtgataggccacctcaccgatcagcacctggccgagttcctgcggcgctgcaagggcagcctccgccccaacggcatcatcgtcatcaaagacaacatggcccaggagggcgtgattctggacgacgtggacagcagcgtgtgccgggaccttgacgtggtccgcaggatcatctgcagtgcaggcctcagcctcctggccgaggagaggcaggagaacctccccgatgagatctaccatgtctatagctttgccctgagatgagccggggctggcaggagaaactgaggaaccacagtcctggtggggggagctggcagctgggcaagatccaggcgccacgctggcggttcgtgagtgtcgaggcaccactaaatatagctgtctgccgtccactcattatgcgggctcttcttcaaaaggcaaggtgggacccggcggggagggtgctgctgaaccagcggtgaggcaggagcccagaccctgctctcctgcgagatgggattgggtggaaggggctccagggctcctggtgctccccatgtgggaatagggtggccacatcagtaaccgattccctgggcctccagcccggccttccagccatgggcctggctgcctgaagaggaaggaaaccacccccaacttggttgctggggacttgaagacttcagtgtgatctttacctaggggagggacagagctgggctggtggagcccatgggtgctgcctgatggtgctgtggggtgggtgctcatgtgccaagtcctgcttggcagtggagacctggggcccttaaagtgttacaacagcctgcagcaagggaagttccccgtagcctcagtcttctctgggcttgaggctgctccttggcaggcatttaaagtaaaaaataaaatggggctgggcgcggtggctcacgcctgtaatcccagcactttgggaggccgaggcgggcagatcacgaggtcaggagattgagaccatcctggctaacaggtgaaaccccgtctctacttaaaatacaaaaaaaaaaaaaattagccaggcgtgatggcgggcgcctgtagtcccagctactcaggaggctgaggcaggagaatggggtgagcccgggaggcagagcttgcagtgagctgagattgcgccactgcactccagcctaggtgacagagcgagactctgtctcaaaataaaactaaaataaaatgggggccgggcacagtggctcatgtctgtaatcccagcactttgaaaggccgaggcaggcgaatcacctgaggtcaggagtttgagaccagcctgaccaacatggcgaaaccccgtctctactaaaaatacaaaaatcagccaggcatggtggtgggcacctataatgccagctactcaggaggctgaggcaggagaactgcttgaacctgggaggcagaggtcgcagtgagccgagattgcaccattgcactccagcctgggtgacagagtgtctcgaaaaaaaaaaataataaaatgggacctccacactgtggaggcccttgccagtctagagtggtgcttctttgcagggacttggaaacaaccccccaaacacagcatcccctcacacctgccacccacttccttaccggctgctgtgggagcctctatcctgaactatggaggggcggggtggaaattttatataaggaccttgttaaggccaagaaagtcagtttaatcttacaatataaatatatcatttagtcacctcagcttatccccagaggtgtttacacaattcccaatgaccagtgcagcttggaagggactgaggctcgcaagtgggtggcacagtcggctcttcagtggctccaaagtgagcccctcacaacaggagacacttcagagaggtctgtccccagccacgcactcatgattgctttttagcagaagtcatggtcgctgaggccctgggtttggcaaaagcacagctgccagcagagcacagttctggtaggtggggccacggctgacctggccccagagctacaggaacaggcaggggccagcttggcttgcaacaccatgaaacaagcctgtggggcccttagtgtcttctcccgcagagcccaccagaaacacttctgtgagtaacagaacctggaaggaaaaggggcaggggtggggccttggtggcaccgcacaggacgtgccccaggcttcctctccagctgcactgccacgtgcggccaacaagagccccgcagccctggggtgctgaggcttggtccttcccagcttctgcaaatgccctggcactgccctccaattcagagggtataaacatcaatccaagccctgttcctctttccaacatgggggggacttggagtgccactggagggaagggggcagtctctctggaagaaccagagctgcacccttcaccactggagtgatcacagcttcaggctctacctggctggcttttctcatgaaggatcccgtctcatctcccagatcaaaaagaccctcttctaatgctgtcccagcatctaccaacaggctgacctgagctgcccgtgtcccccgttcctgtagcctgagacctatcagatgtcatcttccacggagccactgtgctcgctaaggaggtaccacttcagcctgtcgggcagaggcagggctttgaccttcacatccacaggccacggctgaaggtagagccggatggccacacggcacaggtgcttgaggggcgggggatagctctccagctgcctcaaggagaagtggagggcctggatcttttccgccaggctgcccacagggtggatatcgaagttttcgggcagctggagtttctgagagttggtcaccatgagatccaggacagtctcagctttgcgcaggaggtccgcatggctctcgtcttccgtgcagcctgggtgggaacagagcctctcaaagatgatgtgaaagccagaccagcaggacgcaccgtgcagggagcagttgtaggcggctccggactccaggaggaagcgcaggagagggaagtgcagtttaaagctcttcaggcagatgtgggtgagggactcgtgggctgggcactcgctggggtcggccccgtgtgccagcagcagccgtgtgacttggaagcagaagcggttgatcatctgggcctcctctttgtcccctcccacggtctcaccaagcaggaagatgatgcaggtgaacactgtgtccccatctt

SEQ ID NO: 376608 - DNA, 3915 bp, Homo sapiens
gcctcgtgccgctccgaggtgccccatgtgcggcaggaagaagcagcctccacaggactgcgctcagcgggagacggggcttccccgtgaagaggtgctgagtgcgaatgcccactccaacacctggtcactgtgtgatcttgagaaagagttgagcctctctgggccctggcttccccaacaaccaaaggctgtacagagagcggcttaggagagagctcctgtgtgcgccgccgagggctctgctggctcaggacatctgtaggaccagttccagctccagtgggcaccgccagcacgcccaggagagtcgcggttgctgatcgtggtgcttgagtagagccgtggttggtgacagcatgacgagcgaggtgatagaagacgagaagcaattctattccaaggccaagacctactggaaacaaatcccacccacggtggacggcatgcttggggggtatggccacatctccagcatcgacatcaacagctcccggaagtttctgcagaggtttttgagggaaggcccgaacaagacaggaacgtcctgtgccctggactgtggagctggcattgggaggatcaccaagcggctgctcctgccgctgttcagagaggtggatatggtcgacataacggaggacttcctggttcaagccaagacctacctgggggaggagggcaagagggccacctcaccgatcagcacctggccgagttcctgcggcgctgcaagggcagcctccgccccaacggcatcatcgtcatcaaagacaacatggcccaggagggcgtgattctggacgacgtggacagcagcgtgtgccgggaccttgacgtggtccgcaggatcatctgcagtgcaggcctcagcctcctggccgaggagaggcaggagaacctccccgatgagatctaccatgtctatagctttgccctgagatgagccggggctggcaggagaaactgaggaaccacagtcctggtggggggagctggcagctgggcaagatccaggcgccacgctggcggttcgtgagtgtcgaggcaccactaaatatagctgtctgccgtccactcattatgcgggctcttcttcaaaaggcaaggtgggacccggcggggagggtgctgctgaaccagcggtgaggcaggagcccagaccctgctctcctgcgagatgggattgggtggaaggggctccagggctcctggtgctccccatgtgggaatagggtggccacatcagtaaccgattccctgggcctccagcccggccttccagccatgggcctggctgcctgaagaggaaggaaaccacccccaacttggttgctggggacttgaagacttcagtgtgatctttacctaggggagggacagagctgggctggtggagcccatgggtgctgcctgatggtgctgtggggtgggtgctcatgtgccaagtcctgcttggcagtggagacctggggcccttaaagtgttacaacagcctgcagcaagggaagttccccgtagcctcagtcttctctgggcttgaggctgctccttggcaggcatttaaagtaaaaaataaaatggggctgggcgcggtggctcacgcctgtaatcccagcactttgggaggccgaggcgggcagatcacgaggtcaggagattgagaccatcctggctaacaggtgaaaccccgtctctacttaaaatacaaaaaaaaaaaaaattagccaggcgtgatggcgggcgcctgtagtcccagctactcaggaggctgaggcaggagaatggggtgagcccgggaggcagagcttgcagtgagctgagattgcgccactgcactccagcctaggtgacagagcgagactctgtctcaaaataaaactaaaataaaatgggggccgggcacagtggctcatgtctgtaatcccagcactttgaaaggccgaggcaggcgaatcacctgaggtcaggagtttgagaccagcctgaccaacatggcgaaaccccgtctctactaaaaatacaaaaatcagccaggcatggtggtgggcacctataatgccagctactcaggaggctgaggcaggagaactgcttgaacctgggaggcagaggtcgcagtgagccgagattgcaccattgcactccagcctgggtgacagagtgtctcgaaaaaaaaaaataataaaatgggacctccacactgtggaggcccttgccagtctagagtggtgcttctttgcagggacttggaaacaaccccccaaacacagcatcccctcacacctgccacccacttccttaccggctgctgtgggagcctctatcctgaactatggaggggcggggtggaaattttatataaggaccttgttaaggccaagaaagtcagtttaatcttacaatataaatatatcatttagtcacctcagcttatccccagaggtgtttacacaattcccaatgaccagtgcagcttggaagggactgaggctcgcaagtgggtggcacagtcggctcttcagtggctccaaagtgagcccctcacaacaggagacacttcagagaggtctgtccccagccacgcactcatgattgctttttagcagaagtcatggtcgctgaggccctgggtttggcaaaagcacagctgccagcagagcacagttctggtaggtggggccacggctgacctggccccagagctacaggaacaggcaggggccagcttggcttgcaacaccatgaaacaagcctgtggggcccttagtgtcttctcccgcagagcccaccagaaacacttctgtgagtaacagaacctggaaggaaaaggggcaggggtggggccttggtggcaccgcacaggacgtgccccaggcttcctctccagctgcactgccacgtgcggccaacaagagccccgcagccctggggtgctgaggcttggtccttcccagcttctgcaaatgccctggcactgccctccaattcagagggtataaacatcaatccaagccctgttcctctttccaacatgggggggacttggagtgccactggagggaagggggcagtctctctggaagaaccagagctgcacccttcaccactggagtgatcacagcttcaggctctacctggctggcttttctcatgaaggatcccgtctcatctcccagatcaaaaagaccctcttctaatgctgtcccagcatctaccaacaggctgacctgagctgcccgtgtcccccgttcctgtagcctgagacctatcagatgtcatcttccacggagccactgtgctcgctaaggaggtaccacttcagcctgtcgggcagaggcagggctttgaccttcacatccacaggccacggctgaaggtagagccggatggccacacggcacaggtgcttgaggggcgggggatagctctccagctgcctcaaggagaagtggagggcctggatcttttccgccaggctgcccacagggtggatatcgaagttttcgggcagctggagtttctgagagttggtcaccatgagatccaggacagtctcagctttgcgcaggaggtccgcatggctctcgtcttccgtgcagcctgggtgggaacagagcctctcaaagatgatgtgaaagccagaccagcaggacgcaccgtgcagggagcagttgtaggcggctccggactccaggaggaagcgcaggagagggaagtgcagtttaaagctcttcaggcagatgtgggtgagggactcgtgggctgggcactcgctggggtcggccccgtgtgccagcagcagccgtgtgacttggaagcagaagcggttgatcatctgggcctcctctttgtcccctcccacggtctcaccaagcaggaagatgatgcaggtgaacactgtgtccccatctt

SEQ ID NO: 376609 - DNA, 3793 bp, Homo sapiens
  misc_feature (14)..(14): n is a, c, g, or t
  misc_feature (22)..(22): n is a, c, g, or t
aagcggctggtacngtccgggnggtatgggatccgcgagctgtcgcgtctggtcgtggtctggcggagctgcggttggcttgtggcgtctccgccgccgccgccctcccttcctcttccccatcttcttctctcggtcccgggagcccccgcccggagtgagtagcgcgaggcggtgcgaagggagagtcgcggttgctgatcgtggtgcttgagtagagccgtggttggtgacagcatgacgagcgaggtgatagaagacgagaagcaattctattccaaggccaagacctactggaaacaaatcccacccacggtggacggcatgcttggggggtatggccacatctccagcatcgacatcaacagctcccggaagtttctgcagaggtttttgagggaaggcccgaacaagacaggaacgtcctgtgccctggactgtggagctggcattgggaggatcaccaagcggctgctcctgccgctgttcagagaggtggatatggtcgacataacggaggacttcctggttcaagccaagacctacctgggggaggagggcaagagggccacctcaccgatcagcacctggccgagttcctgcggcgctgcaagggcagcctccgccccaacggcatcatcgtcatcaaagacaacatggcccaggagggcgtgattctggacgacgtggacagcagcgtgtgccgggaccttgacgtggtccgcaggatcatctgcagtgcaggcctcagcctcctggccgaggagaggcaggagaacctccccgatgagatctaccatgtctatagctttgccctgagatgagccggggctggcaggagaaactgaggaaccacagtcctggtggggggagctggcagctgggcaagatccaggcgccacgctggcggttcgtgagtgtcgaggcaccactaaatatagctgtctgccgtccactcattatgcgggctcttcttcaaaaggcaaggtgggacccggcggggagggtgctgctgaaccagcggtgaggcaggagcccagaccctgctctcctgcgagatgggattgggtggaaggggctccagggctcctggtgctccccatgtgggaatagggtggccacatcagtaaccgattccctgggcctccagcccggccttccagccatgggcctggctgcctgaagaggaaggaaaccacccccaacttggttgctggggacttgaagacttcagtgtgatctttacctaggggagggacagagctgggctggtggagcccatgggtgctgcctgatggtgctgtggggtgggtgctcatgtgccaagtcctgcttggcagtggagacctggggcccttaaagtgttacaacagcctgcagcaagggaagttccccgtagcctcagtcttctctgggcttgaggctgctccttggcaggcatttaaagtaaaaaataaaatggggctgggcgcggtggctcacgcctgtaatcccagcactttgggaggccgaggcgggcagatcacgaggtcaggagattgagaccatcctggctaacaggtgaaaccccgtctctacttaaaatacaaaaaaaaaaaaaattagccaggcgtgatggcgggcgcctgtagtcccagctactcaggaggctgaggcaggagaatggggtgagcccgggaggcagagcttgcagtgagctgagattgcgccactgcactccagcctaggtgacagagcgagactctgtctcaaaataaaactaaaataaaatgggggccgggcacagtggctcatgtctgtaatcccagcactttgaaaggccgaggcaggcgaatcacctgaggtcaggagtttgagaccagcctgaccaacatggcgaaaccccgtctctactaaaaatacaaaaatcagccaggcatggtggtgggcacctataatgccagctactcaggaggctgaggcaggagaactgcttgaacctgggaggcagaggtcgcagtgagccgagattgcaccattgcactccagcctgggtgacagagtgtctcgaaaaaaaaaaataataaaatgggacctccacactgtggaggcccttgccagtctagagtggtgcttctttgcagggacttggaaacaaccccccaaacacagcatcccctcacacctgccacccacttccttaccggctgctgtgggagcctctatcctgaactatggaggggcggggtggaaattttatataaggaccttgttaaggccaagaaagtcagtttaatcttacaatataaatatatcatttagtcacctcagcttatccccagaggtgtttacacaattcccaatgaccagtgcagcttggaagggactgaggctcgcaagtgggtggcacagtcggctcttcagtggctccaaagtgagcccctcacaacaggagacacttcagagaggtctgtccccagccacgcactcatgattgctttttagcagaagtcatggtcgctgaggccctgggtttggcaaaagcacagctgccagcagagcacagttctggtaggtggggccacggctgacctggccccagagctacaggaacaggcaggggccagcttggcttgcaacaccatgaaacaagcctgtggggcccttagtgtcttctcccgcagagcccaccagaaacacttctgtgagtaacagaacctggaaggaaaaggggcaggggtggggccttggtggcaccgcacaggacgtgccccaggcttcctctccagctgcactgccacgtgcggccaacaagagccccgcagccctggggtgctgaggcttggtccttcccagcttctgcaaatgccctggcactgccctccaattcagagggtataaacatcaatccaagccctgttcctctttccaacatgggggggacttggagtgccactggagggaagggggcagtctctctggaagaaccagagctgcacccttcaccactggagtgatcacagcttcaggctctacctggctggcttttctcatgaaggatcccgtctcatctcccagatcaaaaagaccctcttctaatgctgtcccagcatctaccaacaggctgacctgagctgcccgtgtcccccgttcctgtagcctgagacctatcagatgtcatcttccacggagccactgtgctcgctaaggaggtaccacttcagcctgtcgggcagaggcagggctttgaccttcacatccacaggccacggctgaaggtagagccggatggccacacggcacaggtgcttgaggggcgggggatagctctccagctgcctcaaggagaagtggagggcctggatcttttccgccaggctgcccacagggtggatatcgaagttttcgggcagctggagtttctgagagttggtcaccatgagatccaggacagtctcagctttgcgcaggaggtccgcatggctctcgtcttccgtgcagcctgggtgggaacagagcctctcaaagatgatgtgaaagccagaccagcaggacgcaccgtgcagggagcagttgtaggcggctccggactccaggaggaagcgcaggagagggaagtgcagtttaaagctcttcaggcagatgtgggtgagggactcgtgggctgggcactcgctggggtcggccccgtgtgccagcagcagccgtgtgacttggaagcagaagcggttgatcatctgggcctcctctttgtcccctcccacggtctcaccaagcaggaagatgatgcaggtgaacactgtgtccccatctt

SEQ ID NO: 376610 - DNA, 1919 bp, Homo sapiens
  misc_feature (14)..(14): n is a, c, g, or t
  misc_feature (22)..(22): n is a, c, g, or t
aagcggctggtacngtccgggnggtatgggatccgcgagctgtcgcgtctggtcgtggtctggcggagctgcggttggcttgtggcgtctccgccgccgccgccctcccttcctcttccccatcttcttctctcggtcccgggagcccccgcccggagagagtcgcggttgctgatcgtggtgcttgagtagagccgtggttggtgacagcatgacgagcgaggtgatagaagacgagaagcaattctattccaaggccaagacctactggaaacaaatcccacccacggtggacggcatgcttggggggtatggccacatctccagcatcgacatcaacagctcccggaagtttctgcagaggtttttgagggaaggcccgaacaagacaggaacgtcctgtgccctggactgtggagctggcattgggaggatcaccaagcggctgctcctgccgctgttcagagaggtggatatggtcgacataacggaggacttcctggttcaagccaagacctacctgggggaggagggcaagagggtgaggaactacttctgttgtgggctccaggacttcaccccggagccggactcttacgacgtgatctggatccagtgggtgataggtgagggttccaccgcccttccctgctcacctgtatgtctcctgccactcgcgttccccataaggtgtcaggaccagggctttgcactcctgcagcaagtgggccagtgaggattccccaccccgcccaggcccacccccaccccgtacttcccaggactgagggacaggctcggcctaaaaggtagatttcttccttctaggttttgtttcagttgaatacctgctaccatccatttgggtgcagttttttgttgaaaaaattttaatggccaataacttactgcattcaaagtgaggagttttataagggttttatttttaataagatgaatagtttaagcttcgtgtctagccctgcaccctcttagcctaacagcacacctcgagcgctgtgccctgggctgctgacgtggcggcaggccgctagcagcagtcggccacctcctgaggcgggcagcacaggcctgctgtggacactctaggtctggccttgtattttgtggtctcagaagcctttgtggggacttctagtgtagggaaggcagtctctctgggagctcctgcaatgccaaactcttagcccaggttcactcctccgatccaagcctggcaggggtggggcatcatggtgtgtaggtatcaggcaggacttgtaagccatcccgtcaagtcaaattctggcttaatgtgtctttaggtagatgacctctgagccacagtttcctattctatgaattggggtttagtaaatctctcgggactgagagccaatgaggccatgtgtgcacacaaaatgctgggcacaaatgaggggctcagcggggctgagaagtacatcccatccagtgccgacatccgcttgcatggtgccctggtaaccttgcctctgccctccccaggccacctcaccgatcagcacctggccgagttcctgcggcgctgcaagggcagcctccgccccaacggcatcatcgtcatcaaagacaacatggcccaggagggcgtgattctggacgacgtggacagcagcgtgtgccgggaccttgacgtggtccgcaggatcatctgcagtgcaggcctcagcctcctggccgaggagaggcaggagaacctccccgatgagatctaccatgtctatagctttgccctgagatgagccggggctggcaggagaaactgaggaaccacagtcctggtggggggagctggcagctgggcaagatccaggcgccacgctggcggttcgtgagtgtcgaggcaccactaaatatagctgtctgccgtccactca

SEQ ID NO: 376611 - DNA, 825 bp, Homo sapiens
  misc_feature (636)..(636): n is a, c, g, or t
aatgcgcagcctgagagggggtgagggacactgtcccagctgccacctagactcggagctccatccaaacctccagcgaagacatcccagccatggccatgcagaaaatctttgcccgggaaatcttggactccaggggcaaccccacggtggaggtggacctgcacacggccaagggccgattccgagcagctgtgcccagtggggcttccacgggtatctatgaggctctggaactaagagacggagacaaaggccgctacctggggaaaggagtcctgaaggctgtggagaacatcaacagtactctgggccctgctctgctgcaaaagaaactaagcgttgcggatcaagaaaaagttgacaaatttatgattgagctagatgggaccgagaataagtccaagtttggggccaatgccatcctgggcgtgtccttggccgtgtgtaaggcgggagcagctgagaagggggtccccctgtaccgccacatcgcagatctcgctgggaaccctgacctcatactcccagtgccagccttcaatgtgatcaacgggggctcccatgctggaaacaagctggccatgcaggagttcatgattctgcctgtgggagccagtcttcagagcatgggcntggcgcggtctacacactcaggggtcatcaggcagtttgggaggtgcccatgggtgaggagggttcgcccactcgggaaagaggcgggtgtgaaaggcccgggggtcccgcaggggccgctgatggccggtcccgaggaaaacgaaaccgaacgggcagggaacgacgaaaacacgggccaaagagagg

SEQ ID NO: 376612 - DNA, 931 bp, Homo sapiens
aatgcgcagcctgagagggggtgagggacactgtcccagctgccacctagactcggagctccatccaaacctccagcgaagacatcccagccatggccatgcagaaaatctttgcccgggaaatcttggactccaggggcaaccccacggtggaggtggacctgcacacggccaagggccgattccgagcagctgtgcccagtggggcttccacgggtatctatgaggctctggaactaagagacggagacaaaggccgctacctggggaaaggagtcctgaaggctgtggagaacatcaacagtactctgggccctgctctgctgcaaaagaaactaagcgttgcggatcaagaaaaagttgacaaatttatgattgagctagatgggaccgagaataagtccaagtttggggccaatgccatcctgggcgtgtccttggccgtgtgtaaggcgggagcagctgagaagggggtccccctgtaccgccacatcgcagatctcgctgggaaccctgacctcatactcccagtgccagtgagtgcagctacccgcccttcccagatctcgcctggacagagccaaccccgcccagccagggttggcccccctggaaaatccacctttcagaccagctcctaagaagcagtttcctgaaattgaatctctcctgctgtggtcccacccctccctctcttccacaatccaaaccttccctgaaggctctatgtgcttccttccctgccatataacccagttccttcccattccaatcctaggctcgataactccagcctcgttccaaccccacaccctacacccaaatcatattgagagtttctttgaggcaaagatcttggcatttctttgtatcttcttgagtccttcttaaaccagtgccttcttgatgaaaaaaaactctttgaatttaa

SEQ ID NO: 376613 - DNA, 836 bp, Homo sapiens
acagcaccttgttagtagaatcttttttattcagaaaaaaaaaaccccaaaaaacaaaagttttccaaccacacacgggagggatatgggtagggggaggtgtctgtccatccagccctggcccccagcccatgtggttttggcagcaataaggggtatggggtaatggcccaaaaaataaaatggtttgtgtgtgtatggggaggaaaggggtgcaaagctgtggggagcggtgaaggggaagggacagacgaggtcagtactgggaacgccgaaggtgggaggccatttcataacatttcttgttgatcaaaccaccgtggacaccttctttgcccatcagcaggactagcgtcttgtcagtcttggtgacagtgacattgaaggtgggggccccaccggtgctcttggtacgaagatccatgctaaattccccatcctgcagcagtgagtcccggatcaaggccggacccaccgccagccccggtaactcatcctacgagcctactcccaaagggggctaccagaaacgtggcctcccaggccccaaaagagcctccgggccatctctcagcctccgaagccagcaccagggctacatggggagccagcaagtctccatgggctacagccttacaacttgcggaatctcatgagcaccctccgaagccaaggatgggtctctggacaccccagagagccataagtggggggcaagcacgccatgttgccagcaattgcaccccctgtgggggcccgcaagaagagcccccggggcccagaaccgagggccagggccgcggcaaaggcacaaggccagtcatactcgagtgcag

SEQ ID NO: 376614 - DNA, 754 bp, Homo sapiens
acagcaccttgttagtagaatcttttttattcagaaaaaaaaaaccccaaaaaacaaaagttttccaaccacacacgggagggatatgggtagggggaggtgtctgtccatccagccctggcccccagcccatgtggttttggcagcaataaggggtatggggtaatggcccaaaaaataaaatggtttgtgtgtgtatggggaggaaaggggtgcaaagctgtggggagcggtgaaggggaagggacagacgaggtcagtactgggaacgccgaaggtgggaggccatttcataacatttcttgttgatcaaaccaccgtggacaccttctttgcccatcagcaggactagcgtcttgtcagtcttggtgacagtgacattgaaggtgggggccccaccggtgctcttggtacgaagatccatgctaaattccccatcctgcagcagtgagtcccggatcaccgaacatttctggcccccaagtgtcagcccattcacgtaaaaacttgaccgcccggggacggcggcccagacggagggcgagtccttgtagcccacgatggccgcgtcctgacaggtcccgtccgccatgaggttgtcgatgtaggcgttccacccggccatggcgctgctactggggctgctctcggcgctgctgctggggccgcggactgggctcgagctgcctcggctggcgggcggggggaggcggagagctcggggcacgcgctgccgtccggaccgcggctccgc

SEQ ID NO: 376615 - DNA, 259 bp, Homo sapiens
cttccaacgtggaaccagagctggaagctaggagaagcaggagtctctctctgcactgcctcctgtccctgagctcagagaggacacctcagccctttgagaggccgattccgagcagctgtgcccagtggggcttccacgggtatctatgaggctctggaaagtttctttgaggcaaagatcttggcatttctttgtatcttcttgagtccttcttaaaccagtgccttcttgatgaaaaaaaactctttgaatttaa

SEQ ID NO: 376616 - DNA, 2022 bp, Homo sapiens
acagcaccttgttagtagaatcttttttattcagaaaaaaaaaaccccaaaaaacaaaagttttccaaccacacacgggagggatatgggtagggggaggtgtctgtccatccagccctggcccccagcccatgtggttttggcagcaataaggggtatggggtaatggcccaaaaaataaaatggtttgtgtgtgtatggggaggaaaggggtgcaaagctgtggggagcggtgaaggggaagggacagacgaggtcagtactgggaacgccgaaggtgggaggccatttcataacatttcttgttgatcaaaccaccgtggacaccttctttgcccatcagcaggactagcgtcttgtcagtcttggtgacagtgacattgaaggtgggggccccaccggtgctcttggtacgaagatccatgctaaattccccatcctgcagcagtgagtcccggatcaccgaacatttctggcccccaagtgtcagcccattcacgtaaaaacttgaccggtctttgccaaccaggacacccacctcagctggcgtgatgttgacgaacgttttcccggggacggcggcccagacggagggcgagtccttgtagcccacgatggccgcgtcctgacagccatggccatgcagaaaatctttgcccgggaaatcttggactccaggggcaaccccacggtggaggtggacctgcacacggccaagggccgattccgagcagctgtgcccagtggggcttccacgggtatctatgaggctctggaactaagagacggagacaaaggccgctacctggggaaaggagtcctgaaggctgtggagaacatcaacagtactctgggccctgctctgctgcaaaagaaactaagcgttgcggatcaagaaaaagttgacaaatttatgattgagctagatgggaccgagaataagtccaagtttggggccaatgccatcctgggcgtgtccttggccgtgtgtaaggcgggagcagctgagaagggggtccccctgtaccgccacatcgcagatctcgctgggaaccctgacctcatactcccagtgccagccttcaatgtgatcaacgggggctcccatgctggaaacaagctggccatgcaggagttcatgattctgcctgtgggagccagctccttcaaggaagccatgcgcattggcgccgaggtctaccaccacctcaagggggtcatcaaggccaagtatgggaaggatgccaccaatgtgggtgatgaaggtggcttcgcacccaacatcctggagaacaatgaggccctggagctgctgaagacggccatccaggcggctggttacccagacaaggtggtgatcggcatggatgtggcagcatctgagttctatcgcaatgggaagtacgatcttgacttcaagtcgcctgatgatcccgcacggcacatcactggggagaagctcggagagctgtataagagctttatcaagaactatcctgtggtctccatcgaagacccctttgaccaggatgactgggccactttggacctccttcctctcgggggtgaacatccagattgtgggggatgacttgacagtcaccaaccccaagaggattgcccaggccgttgagaagaaggcctgcaactgtctgctgctgaaggtcaaccagatcggctcggtgaccgaatcgatccaggcgtgcaaactggctcagtctaatggctggggggtgatggtgagccaccgctctggggagactgaggacacattcattgctgaccttgtggtggggctctgcacaggacagatcaagactggcgccccctgccgctcggagcgtctggccaaatacaaccaactcatgaggatcgaggaggctcttggggacaaggcaatctttgctggacgcaagttccgtaacccgaaggccaagtgagaagctggaggctccaggactccactggacagacccaggtcttccagacctgcttcctgaaataaacactggtgccaaccaa

SEQ ID NO: 376617 - DNA, 1646 bp, Homo sapiens
cgggcaactgagggacccactcacgtgcagccgccattcgcgccgcttccagggcaagcacccagtcagggcctctcgctgcgcgccctagaccgcgcccgcccccacccaagtccctccctcagggtccaaaccggagcagtgccccggaccgcgcaggcctcgcagtaccgtgatgttgacgaacgttttcccggggacggcggcccagacggagggcgagtccttgtagcccacgatggccgcgtcctgacagccatggccatgcagaaaatctttgcccgggaaatcttggactccaggggcaaccccacggtggaggtggacctgcacacggccaagggccgattccgagcagctgtgcccagtggggcttccacgggtatctatgaggctctggaactaagagacggagacaaaggccgctacctggggaaaggagtcctgaaggctgtggagaacatcaacagtactctgggccctgctctgctgcaaaagaaactaagcgttgcggatcaagaaaaagttgacaaatttatgattgagctagatgggaccgagaataagtccaagtttggggccaatgccatcctgggcgtgtccttggccgtgtgtaaggcgggagcagctgagaagggggtccccctgtaccgccacatcgcagatctcgctgggaaccctgacctcatactcccagtgccagccttcaatgtgatcaacgggggctcccatgctggaaacaagctggccatgcaggagttcatgattctgcctgtgggagccagctccttcaaggaagccatgcgcattggcgccgaggtctaccaccacctcaagggggtcatcaaggccaagtatgggaaggatgccaccaatgtgggtgatgaaggtggcttcgcacccaacatcctggagaacaatgaggccctggagctgctgaagacggccatccaggcggctggttacccagacaaggtggtgatcggcatggatgtggcagcatctgagttctatcgcaatgggaagtacgatcttgacttcaagtcgcctgatgatcccgcacggcacatcactggggagaagctcggagagctgtataagagctttatcaagaactatcctgtggtctccatcgaagacccctttgaccaggatgactgggccactttggacctccttcctctcgggggtgaacatccagattgtgggggatgacttgacagtcaccaaccccaagaggattgcccaggccgttgagaagaaggcctgcaactgtctgctgctgaaggtcaaccagatcggctcggtgaccgaatcgatccaggcgtgcaaactggctcagtctaatggctggggggtgatggtgagccaccgctctggggagactgaggacacattcattgctgaccttgtggtggggctctgcacaggacagatcaagactggcgccccctgccgctcggagcgtctggccaaatacaaccaactcatgaggatcgaggaggctcttggggacaaggcaatctttgctggacgcaagttccgtaacccgaaggccaagtgagaagctggaggctccaggactccactggacagacccaggtcttccagacctgcttcctgaaataaacactggtgccaaccaa

SEQ ID NO: 376618 - DNA, 1522 bp, Homo sapiens
aatgcgcagcctgagagggggtgagggacactgtcccagctgccacctagactcggagctccatccaaacctccagcgaagacatcccaggttgggtgaatcttccagccctgggggtggaggtagtaaaggccatggccatgcagaaaatctttgcccgggaaatcttggactccaggggcaaccccacggtggaggtggacctgcacacggccaagggccgattccgagcagctgtgcccagtggggcttccacgggtatctatgaggctctggaactaagagacggagacaaaggccgctacctggggaaaggagtcctgaaggctgtggagaacatcaacagtactctgggccctgctctgctgcaaaagaaactaagcgttgcggatcaagaaaaagttgacaaatttatgattgagctagatgggaccgagaataagtccaagtttggggccaatgccatcctgggcgtgtccttggccgtgtgtaaggcgggagcagctgagaagggggtccccctgtaccgccacatcgcagatctcgctgggaaccctgacctcatactcccagtgccagccttcaatgtgatcaacgggggctcccatgctggaaacaagctggccatgcaggagttcatgattctgcctgtgggagccagctccttcaaggaagccatgcgcattggcgccgaggtctaccaccacctcaagggggtcatcaaggccaagtatgggaaggatgccaccaatgtgggtgatgaaggtggcttcgcacccaacatcctggagaacaatgaggccctggagctgctgaagacggccatccaggcggctggttacccagacaaggtggtgatcggcatggatgtggcagcatctgagttctatcgcaatgggaagtacgatcttgacttcaagtcgcctgatgatcccgcacggcacatcactggggagaagctcggagagctgtataagagctttatcaagaactatcctgtggtctccatcgaagacccctttgaccaggatgactgggccactttggacctccttcctctcgggggtgaacatccagattgtgggggatgacttgacagtcaccaaccccaagaggattgcccaggccgttgagaagaaggcctgcaactgtctgctgctgaaggtcaaccagatcggctcggtgaccgaatcgatccaggcgtgcaaactggctcagtctaatggctggggggtgatggtgagccaccgctctggggagactgaggacacattcattgctgaccttgtggtggggctctgcacaggacagatcaagactggcgccccctgccgctcggagcgtctggccaaatacaaccaactcatgaggatcgaggaggctcttggggacaaggcaatctttgctggacgcaagttccgtaacccgaaggccaagtgagaagctggaggctccaggactccactggacagacccaggtcttccagacctgcttcctgaaataaacactggtgccaaccaa

SEQ ID NO: 376619 - DNA, 1817 bp, Homo sapiens
aatgcgcagcctgagagggggtgagggacactgtcccagctgccacctagactcggagctccatccaaacctccagcgaagacatcccagccatggccatgcagaaaatctttgcccgggaaatcttggactccaggggcaaccccacggtggaggtggacctgcacacggccaagggccgattccgagcagctgtgcccagtggggcttccacgggtatctatgaggctctggaactaagagacggagacaaaggccgctacctggggaaaggagtcctgaaggctgtggagaacatcaacagtactctgggccctgctctgctgcaaaagaaactaagcgttgcggatcaagaaaaagttgacaaatttatgattgagctagatgggaccgagaataagtccaagtttggggccaatgccatcctgggcgtgtccttggccgtgtgtaaggcgggagcagctgagaagggggtccccctgtaccgccacatcgcagatctcgctgggaaccctgacctcatactcccagtgccagccttcaatgtgatcaacgggggctcccatgctggaaacaagctggccatgcaggagttcatgattctgcctgtgggagccagctccttcaaggaagccatgcgcattggcgccgaggtctaccaccacctcaagggggtcatcaaggccaagtatgggaaggatgccaccaatgtgggtgatgaaggtggcttcgcacccaacatcctggagaacaatgaggccctggagctgctgaagacggccatccaggcggctggttacccagacaaggtggtgatcggcatggatgtggcagcatctgagttctatcgcaatgggaagtacgatcttgacttcaagtcgcctgatgatcccgcacggcacatcactggggagaagctcggagagctgtataagagctttatcaagaactatcctggtgaggcgttcgggtgtcccagtgttcctgcccgaatcccgtgcagctgcctaatatactgatttcagtgacctgctttgccatcgacttggatccttccaattcttagccccattaaaatccccatttaagctcttctgccctgtcacccctccatgaggctccttctgacctctagccgtgtctctgccctgtctctgccttgtctctgccctgtctctgctctgtctctgccctgtctctgccctgtctctgccctgtctctgccctgtctctgccctgtctctgccctgtctctgctctgtctctgccctgtctctgctccaaaccccaccagtggtctccatcgaagacccctttgaccaggatgactgggccactttggacctccttcctctcgggggtgaacatccagattgtgggggatgacttgacagtcaccaaccccaagaggattgcccaggccgttgagaagaaggcctgcaactgtctgctgctgaaggtcaaccagatcggctcggtgaccgaatcgatccaggcgtgcaaactggctcagtctaatggctggggggtgatggtgagccaccgctctggggagactgaggacacattcattgctgaccttgtggtggggctctgcacaggacagatcaagactggcgccccctgccgctcggagcgtctggccaaatacaaccaactcatgaggatcgaggaggctcttggggacaaggcaatctttgctggacgcaagttccgtaacccgaaggccaagtgagaagctggaggctccaggactccactggacagacccaggtcttccagacctgcttcctgaaataaacactggtgccaaccaa

SEQ ID NO: 376620 - DNA, 1470 bp, Homo sapiens
taactcatcccggcgctggctggcctggagagggtaggatggggcggcgccgagaatggccgttatgaggaccctaagagccatggccatgcagaaaatctttgcccgggaaatcttggactccaggggcaaccccacggtggaggtggacctgcacacggccaagggccgattccgagcagctgtgcccagtggggcttccacgggtatctatgaggctctggaactaagagacggagacaaaggccgctacctggggaaaggagtcctgaaggctgtggagaacatcaacagtactctgggccctgctctgctgcaaaagaaactaagcgttgcggatcaagaaaaagttgacaaatttatgattgagctagatgggaccgagaataagtccaagtttggggccaatgccatcctgggcgtgtccttggccgtgtgtaaggcgggagcagctgagaagggggtccccctgtaccgccacatcgcagatctcgctgggaaccctgacctcatactcccagtgccagccttcaatgtgatcaacgggggctcccatgctggaaacaagctggccatgcaggagttcatgattctgcctgtgggagccagctccttcaaggaagccatgcgcattggcgccgaggtctaccaccacctcaagggggtcatcaaggccaagtatgggaaggatgccaccaatgtgggtgatgaaggtggcttcgcacccaacatcctggagaacaatgaggccctggagctgctgaagacggccatccaggcggctggttacccagacaaggtggtgatcggcatggatgtggcagcatctgagttctatcgcaatgggaagtacgatcttgacttcaagtcgcctgatgatcccgcacggcacatcactggggagaagctcggagagctgtataagagctttatcaagaactatcctgtggtctccatcgaagacccctttgaccaggatgactgggccactttggacctccttcctctcgggggtgaacatccagattgtgggggatgacttgacagtcaccaaccccaagaggattgcccaggccgttgagaagaaggcctgcaactgtctgctgctgaaggtcaaccagatcggctcggtgaccgaatcgatccaggcgtgcaaactggctcagtctaatggctggggggtgatggtgagccaccgctctggggagactgaggacacattcattgctgaccttgtggtggggctctgcacaggacagatcaagactggcgccccctgccgctcggagcgtctggccaaatacaaccaactcatgaggatcgaggaggctcttggggacaaggcaatctttgctggacgcaagttccgtaacccgaaggccaagtgagaagctggaggctccaggactccactggacagacccaggtcttccagacctgcttcctgaaataaacactggtgccaaccaa

SEQ ID NO: 376621 - DNA, 1609 bp, Homo sapiens
aatgcgcagcctgagagggggtgagggacactgtcccagctgccacctagactcggagctccatccaaacctccagcgaagacatcccagccatggccatgcagaaaatctttgcccgggaaatcttggactccaggggcaaccccacggtggaggtggacctgcacacggccaagggccgattccgagcagctgtgcccagtggggcttccacgggtatctatgaggctctggaactaagagacggagacaaaggccgctacctggggaaaggagtcctgaaggctgtggagaacatcaacagtactctgggccctgctctgctgcaaaagaaactaagcgttgcggatcaagaaaaagttgacaaatttatgattgagctagatgggaccgagaataagtccaagtttggggccaatgccatcctgggcgtgtccttggccgtgtgtaaggcgggagcagctgagaagggggtccccctgtaccgccacatcgcagatctcgctgggaaccctgacctcatactcccagtgccagccttcaatgtgatcaacgggggctcccatgctggaaacaagctggccatgcaggagttcatgattctgcctgtgggagccagctccttcaaggaagccatgcgcattggcgccgaggtctaccaccacctcaagggggtcatcaaggccaagtatgggaaggatgccaccaatgtgggtgatgaaggtggcttcgcacccaacatcctggagaacaatgaggccctggagctgctgaagacggccatccaggcggctggttacccagacaaggtggtgatcggcatggatgtggcagcatctgagttctatcgcaatgggaagtacgatcttgacttcaagtcgcctgatgatcccgcacggcacatcactggggagaagctcggagagctgtataagagctttatcaagaactatcctgtggtctccatcgaagacccctttgaccaggatgactgggccactttggacctccttcctctcgggggtgaacatccagattgtgggggatgacttgacagtcaccaaccccaagaggattgcccaggccgttgagaagaaggcctgcaactgtctgctgctgaaggtcaaccagatcggctcggtgaccgaatcgatccaggcgtgcaaactggctcagtctaatggctggggggtgatggtgagccaccgctctggggagactgaggacacattcattgctgaccttgtggtggggctctgcacaggacagatcaagactggcgccccctgccgctcggagcgtctggccaaatacaaccaactcatgaggatcgaggaggctcttggggacaaggcaatctttgctggacgcaagttccgtaacccgaaggccaagtgagaagctggaggctccaggactccactggacagacccaggtcttccagacctgcttcctgaaataaacactggtgccaaccaaaaaatgaatatgattaaatattcttgagggggggcccggtacccaattccccctaataggagtcgtttaaaaataaattggccgtcgttttttacacgtccgtgactgggaaaaaccactgccgtaacc

SEQ ID NO: 376622 - DNA, 1910 bp, Homo sapiens
aatgcgcagcctgagagggggtgagggacactgtcccagctgccacctagactcggagctccatccaaacctccagcgaagacatcccagccatggccatgcagaaaatctttgcccgggaaatcttggactccaggggcaaccccacggtggaggtggacctgcacacggccaagggccgattccgagcagctgtgcccagtggggcttccacgggtatctatgaggctctggaactaagagacggagacaaaggccgctacctggggaaaggagtcctgaaggctgtggagaacatcaacagtactctgggccctgctctgctgcaaaagaaactaagcgttgcggatcaagaaaaagttgacaaatttatgattgagctagatgggaccgagaataagtccaagtttggggccaatgccatcctgggcgtgtccttggccgtgtgtaaggcgggagcagctgagaagggggtccccctgtaccgccacatcgcagatctcgctgggaaccctgacctcatactcccagtgccagccttcaatgtgatcaacgggggctcccatgctggaaacaagctggccatgcaggagttcatgattctgcctgtgggagccagctccttcaaggaagccatgcgcattggcgccgaggtctaccaccacctcaagggggtcatcaaggccaagtatgggaaggatgccaccaatgtgggtgatgaaggtggcttcgcacccaacatcctggagaacaatgaggccctggagctgctgaagacggccatccaggcggctggttacccagacaaggtggtgatcggcatggatgtggcagcatctgagttctatcgcaatgggaagtacgatcttgacttcaagtcgcctgatgatcccgcacggcacatcactggggagaagctcggagagctgtataagagctttatcaagaactatcctgtggtctccatcgaagacccctttgaccaggatgactgggccactttggacctccttcctctcgggggtgaacatccagattgtgggggatgacttgacagtcaccaaccccaagaggattgcccaggccgttgagaagaaggcctgcaactgtctgctgctgaaggtcaaccagatcggctcggtgaccgaatcgatccaggcgtgagtgcctcctgaccctgaggctcaccatagcctgcctctgccccagctctgcccactccagctacagtcttacccaccaactccaagcttacctttcccctggcacctgacttacccacaccttgatctcaagactttgtttgactaatccttggcctgactccaagagctttgcccctgtggctctgtcatgaccccccacccccagcccacaccattcctctctcagattccgctgttctcagcagcatctcaagagcccgaaatcaagataagtcttttcctctcctacttcccaaagaacttagtcactgccctccctgcagagtgcttgctacccaaaacagaagggagaggccccacccaacccctgctttcccactgagggaggttctagaaggccacatcaaatgtcctctccactcaggtgcaaactggctcagtctaatggctggggggtgatggtgagccaccgctctggggagactgaggacacattcattgctgaccttgtggtggggctctgcacaggacagatcaagactggcgccccctgccgctcggagcgtctggccaaatacaaccaactcatgaggatcgaggaggctcttggggacaaggcaatctttgctggacgcaagttccgtaacccgaaggccaagtgagaagctggaggctccaggactccactggacagacccaggtcttccagacctgcttcctgaaataaacactggtgccaaccaa

SEQ ID NO: 376623 - DNA, 1629 bp, Homo sapiens
aatgcgcagcctgagagggggtgagggacactgtcccagctgccacctagactcggagctccatccaaacctccagcgaagacatcccagccatggccatgcagaaaatctttgcccgggaaatcttggactccaggggcaaccccacggtggaggtggacctgcacacggccaagggccgattccgagcagctgtgcccagtggggcttccacgggtatctatgaggctctggaactaagagacggagacaaaggccgctacctggggaaaggagtcctgaaggctgtggagaacatcaacagtactctgggccctgctctgctgcaaaagaaactaagcgttgcggatcaagaaaaagttgacaaatttatgattgagctagatgggaccgagaataagtccaagtttggggccaatgccatcctgggcgtgtccttggccgtgtgtaaggcgggagcagctgagaagggggtccccctgtaccgccacatcgcagatctcgctgggaaccctgacctcatactcccagtgccagccttcaatgtgatcaacgggggctcccatgctggaaacaagctggccatgcaggagttcatgattctgcctgtgggagccagctccttcaaggaagccatgcgcattggcgccgaggtctaccaccacctcaagggggtcatcaaggccaagtatgggaaggatgccaccaatgtgggtgatgaaggtggcttcgcacccaacatcctggagaacaatgaggccctggagctgctgaagacggccatccaggcggctggttacccagacaaggtggtgatcggcatggatgtggcagcatctgagttctatcgcaatgggaagtacgatcttgacttcaagtcgcctgatgatcccgcacggcacatcactggggagaagctcggagagctgtataagagctttatcaagaactatcctgtggtctccatcgaagacccctttgaccaggatgactgggccactttggacctccttcctctcgggggtgaacatccagattgtgggggatgacttgacagtcaccaaccccaagaggattgcccaggccgttgagaagaaggcctgcaactgtctgctgctgaaggtcaaccagatcggctcggtgaccgaatcgatccaggcgtgcaaactggctcagtctaatggctggggggtgatggtgagccaccgctctggggagactgaggacacattcattgctgaccttgtggtggggctctgcacaggacaggtacttgtagcttctctctactgagtgtctcaccaagttttcttggggtccctggcctcctgcctttgaggttaatgctcccttggggccaggtccaacccctcctttccagcctcacctaaccctccaaattcttcttccctcatcagatcaagactggcgccccctgccgctcggagcgtctggccaaatacaaccaactcatgaggatcgaggaggctcttggggacaaggcaatctttgctggacgcaagttccgtaacccgaaggccaagtgagaagctggaggctccaggactccactggacagacccaggtcttccagacctgcttcctgaaataaacactggtgccaaccaa

SEQ ID NO: 376624 - DNA, 1524 bp, Homo sapiens
aatgcgcagcctgagagggggtgagggacactgtcccagctgccacctagactcggagctccatccaaacctccagcgaagacatcccagccatggccatgcagaaaatctttgcccgggaaatcttggactccaggggcaaccccacggtggaggtggacctgcacacggccaagggccgattccgagcagctgtgcccagtggggcttccacgggtatctatgaggctctggaactaagagacggagacaaaggccgctacctggggaaaggagtcctgaaggctgtggagaacatcaacagtactctgggccctgctctgctgcaaaagaaactaagcgttgcggatcaagaaaaagttgacaaatttatgattgagctagatgggaccgagaataagtccaagtttggggccaatgccatcctgggcgtgtccttggccgtgtgtaaggcgggagcagctgagaagggggtccccctgtaccgccacatcgcagatctcgctgggaaccctgacctcatactcccagtgccagccttcaatgtgatcaacgggggctcccatgctggaaacaagctggccatgcaggagttcatgattctgcctgtgggagccagctccttcaaggaagccatgcgcattggcgccgaggtctaccaccacctcaagggggtcatcaaggccaagtatgggaaggatgccaccaatgtgggtgatgaaggtggcttcgcacccaacatcctggagaacaatgaggccctggagctgctgaagacggccatccaggcggctggttacccagacaaggtggtgatcggcatggatgtggcagcatctgagttctatcgcaatgggaagtacgatcttgacttcaagtcgcctgatgatcccgcacggcacatcactggggagaagctcggagagctgtataagagctttatcaagaactatcctggggatgacttgacagtcaccaaccccaagaggattgcccaggccgttgagaagaaggcctgcaactgtctgctgctgaaggtcaaccagatcggctcggtgaccgaatcgatccaggcgtgcaaactggctcagtctaatggctggggggtgatggtgagccaccgctctggggagactgaggacacattcattgctgaccttgtggtggggctctgcacaggacagatcaagactggcgccccctgccgctcggagcgtctggccaaatacaaccaactcatgaggatcgaggaggctcttggggacaaggcaatctttgctggacgcaagttccgtaacccgaaggccaagtgagaagctggaggctccaggactccactggacagacccaggtcttccagacctgcttcctgaaataaacactggtgccaaccaaaaaatgaatatgattaaatattcttgagggggggcccggtacccaattccccctaataggagtcgtttaaaaataaattggccgtcgttttttacacgtccgtgactgggaaaaaccactgccgtaacc

SEQ ID NO: 376625 - DNA, 824 bp, Homo sapiens
acagcaccttgttagtagaatcttttttattcagaaaaaaaaaaccccaaaaaacaaaagttttccaaccacacacgggagggatatgggtagggggaggtgtctgtccatccagccctggcccccagcccatgtggttttggcagcaataaggggtatggggtaatggcccaaaaaataaaatggtttgtgtgtgtatggggaggaaaggggtgcaaagctgtggggagcggtgaaggggaagggacagacgaggtcagtactgggaacgccgaaggtgggaggccatttcataacatttcttgttgatcaaaccaccgtggacaccttctttgcccatcagcaggactagcgtcttgtcagtcttggtgacagtgacattgaaggtgggggccccaccggtgctcttggtacgaagatccatgctaaattccccatcctgcagcagtgagtcccggatcaccgaacatttctggcccccaagtgtcagcccattcacgtaaaaacttgaccggtctttgccaaccaggacacccacctcagctggctggaagaggaaccaagcgcccatcaagttagtcagtgcaccaagattcccaccgtgttctccaaagacccacctgtcttccacttctgagaaccaccccgccgtgggggctaagtataaattatatactcagtacacatcaatgaactgtgagaaactctgaggactgtgggacgttagtgcagaaaaagatcatgattctgaaacttagaatatggaaccagggaggaagggatgacatactcctctagagatttagatgtcagtgttaatgggg

SEQ ID NO: 376626 - DNA, 794 bp, Homo sapiens
aatgcgcagcctgagagggggtgagggacactgtcccagctgccacctagactcggagctccatccaaacctccagcgaagacatcccagccatggccatgcagaaaatctttgcccgggaaatcttggactccaggggcaaccccacggtggaggtggacctgcacacggccaagggccgattccgagcagctgtgcccagtggggcttccacgggtatctatgaggctctggaactaagagacggagacaaaggccgctacctggggaaaggagtcctgaaggctgtggagaacatcaacagtactctgggccctgctctgctgcaaaagaaactaagcgttgcggatcaagaagggatgacttgacagtcaccaaccccaagaggattgcccaggccgttgagaagaaggcctgcaactgtctgctgctgaaggtcaaccagatcggctcggtgaccgaatcgatccaggcgtgcaaactggctcagtctaatggctggggggtgatggtgagccaccgctctggggagactgaggacacattcattgctgaccttgtggtggggctctgcacaggacagatcaagactggcgccccctgccgctcggagcgtctggccaaatacaaccaactcatgaggatcgaggaggctcttggggacaaggcaatctttgctggacgcaagttccgtaacccgaaggccaagtgagaagctggaggctccaggactccactggacagacccaggtcttccagacctgcttcctgaaataaacactggtgccaaccaa

SEQ ID NO: 376627 - DNA, 929 bp, Homo sapiens
aatgcgcagcctgagagggggtgagggacactgtcccagctgccacctagactcggagctccatccaaacctccagcgaagacatcccagccatggccatgcagaaaatctttgcccgggaaatcttggactccaggggcaaccccacggtggaggtggacctgcacacggccaagggccgattccgagcagctgtgcccagtggggcttccacgggtatctatgaggctctggaactaagagacggagacaaaggccgctacctggggaaaggagtcctgaaggctgtggagaacatcaacagtactctgggccctgctctgctgcaaaagaaactaagcgttgcggatcaagaaaaagttgacaaatttatgattgagctagatgggaccgagaataagtccaagtttggggccaatgccatcctgggcgtgtccttggccgtgtgtaaggcgggagcagctgagaagggggtccccctgtaccgccacatcgcagatctcgctgggaaccctgacctcatactcccagtgccagccttcaatgtgatcaacgggggctcccatgctggaaacaagctggccatgcaggagttcatgattctgcctgtgggagccagctccttcaaggaagccatgcgcattggcgccgaggtctaccaccacctcaagggggtcatcaaggccaagtatgggaaggatgccaccaatgtgggtgatgaaggtggcttcgcacccaacatcctggagaacaatgaggccctggagctgctgaagacggccatccaggcggctggttacccagacaaggtggtgatcggcatggttgggccctggttcttcgcggaggcggtggtcctcgtgggcacgccgggcacgggagcggacgcttgcttggaccctggccgacttgcggggcgggcacctggg

SEQ ID NO: 376628 - DNA, 368 bp, Homo sapiens
attctgactgctgtgtgaggcaccagacggctcggtgccgaacgaccagtgcaaactggctcagtctaatggctggggggtgatggtgagccaccgctctggggagactgaggacacattcattgctgaccttgtggtggggctctgcacaggacagatcaagactggcgccccctgccgctcggagcgtctggccaaatacaaccaactcatgaggatcgaggaggctcttggggacaaggcaatctttgctggacgcaagttccgtaacccgaaggccaagtgagaagctggaggctccaggactccactggacagacccaggtcttccagacctgcttcctgaaataaacactggtgccaaccaa

SEQ ID NO: 376629 - DNA, 808 bp, Homo sapiens
acagcaccttgttagtagaatcttttttattcagaaaaaaaaaaccccaaaaaacaaaagttttccaaccacacacgggagggatatgggtagggggaggtgtctgtccatccagccctggcccccagcccatgtggttttggcagcaataaggggtatggggtaatggcccaaaaaataaaatggtttgtgtgtgtatggggaggaaaggggtgcaaagctgtggggagcggtgaaggggaagggacagacgaggtcagtactgggaacgccgaaggtgggaggccatttcataacatttcttgttgatcaaaccaccgtggacaccttctttgcccatcagcaggactagcgtcttgtcagtcttggtgacagtgacattgaaggtgggggccccaccggtgctcttggtacgaagatccatgctaaattccccatcctgcagcagtgagtcccggatcaccgaacatttctggcccccaagtgtcagcccattcacgtaaaaacttgaccggtctttgccaaccaggacacccacctcagctggcgtgatgttgacgaacgttttcccggggacggcggcccagacggagggcgagtccttgtagcccacgatggccgcgtcctgacaggtcccgtccgccatgaggttgtcgatgtaggcgttccacccggccatggcgctgctactggggctgctctcggcgctgctgctggggccgcggactgggctcgagctgcctcggctggcgggcggggggaggcggagagctcggggcacgcgctgccgtccggaccgcggctccgc

SEQ ID NO: 376630 - DNA, 1480 bp, Homo sapiens
aatgcgcagcctgagagggggtgagggacactgtcccagctgccacctagactcggagctccatccaaacctccagcgaagacatcccagccatggccatgcagaaaatctttgcccgggaaatcttggactccaggggcaaccccacggtggaggtggacctgcacacggccaagggccgattccgagcagctgtgcccagtggggcttccacgggtatctatgaggctctggaactaagagacggagacaaaggccgctacctggggaaaggagtcctgaaggctgtggagaacatcaacagtactctgggccctgctctgctgcaaaagaaactaagcgttgcggatcaagaaaaagttgacaaatttatgattgagctagatgggaccgagaataagtccaagtttggggccaatgccatcctgggcgtgtccttggccgtgtgtaaggcgggagcagctgagaagggggtccccctgtaccgccacatcgcagatctcgctgggaaccctgacctcatactcccagtgccagccttcaatgtgatcaacgggggctcccatgctggaaacaagctggccatgcaggagttcatgattctgcctgtgggagccagctccttcaaggaagccatgcgcattggcgccgaggtctaccaccacctcaagggggtcatcaaggccaagtatgggaaggatgccaccaatgtgggtgatgaaggtggcttcgcacccaacatcctggagaacaatgaggccctggagctgctgaagacggccatccaggcggctggttacccagacaaggtggtgatcggcatggatgtggcagcatctgagttctatcgcaatgggaagtacgatcttgacttcaagtcgcctgatgatcccgcacggcacatcactggggagaagctcggagagctgtataagagctttatcaagaactatcctgtggtctccatcgaagacccctttgaccaggatgactgggccactttggacctccttcctctcgggggtgaacatccagattgtgggggatgacttgacagtcaccaaccccaagaggattgcccaggccgttgagaagaaggcctgcaactgtctgctgctgaaggtcaaccagatcggctcggtgaccgaatcgatccaggcgtgcaaactggctcagtctaatggctggggggtgatggtgagccaccgctctggggagactgaggacacattcattgctgaccttgtggtggggctctgcacaggacagatcaagactggcgccccctgccgctcggagcgtctggccaaatacaaccaactcatgaggatcgaggaggctcttggggacaaggcaatctttgctggacgcaagttccgtaacccgaaggccaagtgagaagctggaggctccaggactccactggacagacccaggtcttccagacctgcttcctgaaataaacactggtgccaaccaa

SEQ ID NO: 376631 - DNA, 1797 bp, Homo sapiens
aatgcgcagcctgagagggggtgagggacactgtcccagctgccacctagactcggagctccatccaaacctccagcgaagacatcccagccatggccatgcagaaaatctttgcccgggaaatcttggactccaggggcaaccccacggtggaggtggacctgcacacggccaagggccgattccgagcagctgtgcccagtggggcttccacgggtatctatgaggctctggaactaagagacggagacaaaggccgctacctggggaaaggagtcctgaaggctgtggagaacatcaacagtactctgggccctgctctgctgcaaaagaaactaagcgttgcggatcaagaaaaagttgacaaatttatgattgagctagatgggaccgagaataagtccaagtttggggccaatgccatcctgggcgtgtccttggccgtgtgtaaggcgggagcagctgagaagggggtccccctgtaccgccacatcgcagatctcgctgggaaccctgacctcatactcccagtgccagccttcaatgtgatcaacgggggctcccatgctggaaacaagctggccatgcaggagttcatgattctgcctgtgggagccagctccttcaaggaagccatgcgcattggcgccgaggtctaccaccacctcaagggggtcatcaaggccaagtatgggaaggatgccaccaatgtgggtgatgaaggtggcttcgcacccaacatcctggagaacaatgaggccctggagctgctgaagacggccatccaggcggctggttacccagacaaggtggtgatcggcatggatgtggcagcatctgagttctatcgcaatgggaagtacgatcttgacttcaagtcgcctgatgatcccgcacggcacatcactggggagaagctcggagagctgtataagagctttatcaagaactatcctggtgaggcgttcgggtgtcccagtgttcctgcccgaatcccgtgcagctgcctaatatactgatttcagtgacctgctttgccatcgacttggatccttccaattcttagccccattaaaatccccatttaagctcttctgccctgtcacccctccatgaggctccttctgacctctagccgtgtctctgccctgtctctgccttctgtctctgccctgtctctgccctgtctctgccctgtctctgccctgtctctgccctgtctctgccctgtctctgctctgtctctgccctgtctctgctccaaaccccaccagtggtctccatcgaagacccctttgaccaggatgactgggccactttggacctccttcctctcgggggtgaacatccagattgtgggggatgacttgacagtcaccaaccccaagaggattgcccaggccgttgagaagaaggcctgcaactgtctgctgctgaaggtcaaccagatcggctcggtgaccgaatcgatccaggcgtgcaaactggctcagtctaatggctggggggtgatggtgagccaccgctctggggagactgaggacacattcattgctgaccttgtggtggggctctgcacaggacagatcaagactggcgccccctgccgctcggagcgtctggccaaatacaaccaactcatgaggatcgaggaggctcttggggacaaggcaatctttgctggacgcaagttccgtaacccgaaggccaagtgagaagctggaggctccaggactccactggacagacccaggtcttccagacctgcttcctgaaataaacactggtgccaaccaa

SEQ ID NO: 376632 - DNA, 1367 bp, Homo sapiens
aatgcgcagcctgagagggggtgagggacactgtcccagctgccacctagactcggagctccatccaaacctccagcgaagacatcccaggttgggtgaatcttccagccctgggggtggaggtagtaaaggccatggccatgcagaaaatctttgcccgggaaatcttggactccaggggcaaccccacggtggaggtggacctgcacacggccaaggaaactaagcgttgcggatcaagaaaaagttgacaaatttatgattgagctagatgggaccgagaataagtccaagtttggggccaatgccatcctgggcgtgtccttggccgtgtgtaaggcgggagcagctgagaagggggtccccctgtaccgccacatcgcagatctcgctgggaaccctgacctcatactcccagtgccagccttcaatgtgatcaacgggggctcccatgctggaaacaagctggccatgcaggagttcatgattctgcctgtgggagccagctccttcaaggaagccatgcgcattggcgccgaggtctaccaccacctcaagggggtcatcaaggccaagtatgggaaggatgccaccaatgtgggtgatgaaggtggcttcgcacccaacatcctggagaacaatgaggccctggagctgctgaagacggccatccaggcggctggttacccagacaaggtggtgatcggcatggatgtggcagcatctgagttctatcgcaatgggaagtacgatcttgacttcaagtcgcctgatgatcccgcacggcacatcactggggagaagctcggagagctgtataagagctttatcaagaactatcctgtggtctccatcgaagacccctttgaccaggatgactgggccactttggacctccttcctctcgggggtgaacatccagattgtgggggatgacttgacagtcaccaaccccaagaggattgcccaggccgttgagaagaaggcctgcaactgtctgctgctgaaggtcaaccagatcggctcggtgaccgaatcgatccaggcgtgcaaactggctcagtctaatggctggggggtgatggtgagccaccgctctggggagactgaggacacattcattgctgaccttgtggtggggctctgcacaggacagatcaagactggcgccccctgccgctcggagcgtctggccaaatacaaccaactcatgaggatcgaggaggctcttggggacaaggcaatctttgctggacgcaagttccgtaacccgaaggccaagtgagaagctggaggctccaggactccactggacagacccaggtcttccagacctgcttcctgaaataaacactggtgccaaccaa

SEQ ID NO: 376633 - DNA, 1351 bp, Homo sapiens
aatgcgcagcctgagagggggtgagggacactgtcccagctgccacctagactcggagctccatccaaacctccagcgaagacatcccagccatggccatgcagaaaatctttgcccgggaaatcttggactccaggggcaaccccacggtggaggtggacctgcacacggccaagggccgattccgagcagctgtgcccagtggggcttccacgggtatctatgaggctctggaactaagagacggagacaaaggccgctacctggggaaagccaagtttggggccaatgccatcctgggcgtgtccttggccgtgtgtaaggcgggagcagctgagaagggggtccccctgtaccgccacatcgcagatctcgctgggaaccctgacctcatactcccagtgccagccttcaatgtgatcaacgggggctcccatgctggaaacaagctggccatgcaggagttcatgattctgcctgtgggagccagctccttcaaggaagccatgcgcattggcgccgaggtctaccaccacctcaagggggtcatcaaggccaagtatgggaaggatgccaccaatgtgggtgatgaaggtggcttcgcacccaacatcctggagaacaatgaggccctggagctgctgaagacggccatccaggcggctggttacccagacaaggtggtgatcggcatggatgtggcagcatctgagttctatcgcaatgggaagtacgatcttgacttcaagtcgcctgatgatcccgcacggcacatcactggggagaagctcggagagctgtataagagctttatcaagaactatcctgtggtctccatcgaagacccctttgaccaggatgactgggccactttggacctccttcctctcgggggtgaacatccagattgtgggggatgacttgacagtcaccaaccccaagaggattgcccaggccgttgagaagaaggcctgcaactgtctgctgctgaaggtcaaccagatcggctcggtgaccgaatcgatccaggcgtgcaaactggctcagtctaatggctggggggtgatggtgagccaccgctctggggagactgaggacacattcattgctgaccttgtggtggggctctgcacaggacagatcaagactggcgccccctgccgctcggagcgtctggccaaatacaaccaactcatgaggatcgaggaggctcttggggacaaggcaatctttgctggacgcaagttccgtaacccgaaggccaagtgagaagctggaggctccaggactccactggacagacccaggtcttccagacctgcttcctgaaataaacactggtgccaaccaa

SEQ ID NO: 376634 - DNA, 2059 bp, Homo sapiens
aatgcgcagcctgagagggggtgagggacactgtcccagctgccacctagactcggagctccatccaaacctccagcgaagacatcccagccatggccatgcagaaaatctttgcccgggaaatcttggactccaggggcaaccccacggtggaggtggacctgcacacggccaagggccgattccgagcagctgtgcccagtggggcttccacgggtatctatgaggctctggaactaagagacggagacaaaggccgctacctggggaaaggagtcctgaaggctgtggagaacatcaacagtactctgggccctgctctgctgcaaaagaaactaagcgttgcggatcaagaaaaagttgacaaatttatgattgagctagatgggaccgagaataagtccaagtttggggccaatgccatcctgggcgtgtccttggccgtgtgtaaggcgggagcagctgagaagggggtccccctgtaccgccacatcgcagatctcgctgggaaccctgacctcatactcccagtgccagccttcaatgtgatcaacgggggctcccatgctggaaacaagctggccatgcaggagttcatgattctgcctgtgggagccagctccttcaaggaagccatgcgcattggcgccgaggtctaccaccacctcaagggggtcatcaaggccaagtatgggaaggatgccaccaatgtgggtgatgaaggtggcttcgcacccaacatcctggagaacaatgaggccctggagctgctgaagacggccatccaggcggctggttacccagacaaggtggtgatcggcatggatgtggcagcatctgagttctatcgcaatgggaagtacgatcttgacttcaagtcgcctgatgatcccgcacggcacatcactggggagaagctcggagagctgtataagagctttatcaagaactatcctgtggtctccatcgaagacccctttgaccaggatgactgggccactttggacctccttcctctcgggggtgaacatccagattgtgggggatgacttgacagtcaccaaccccaagaggattgcccaggccgttgagaagaaggcctgcaactgtctgctgctgaaggtcaaccagatcggctcggtgaccgaatcgatccaggcgtgagtgcctcctgaccctgaggctcaccatagcctgcctctgccccagctctgcccactccagctacagtcttacccaccaactccaagcttacctttcccctggcacctgacttacccacaccttgatctcaagactttgtttgactaatccttggcctgactccaagagctttgcccctgtggctctgtcatgaccccccacccccagcccacaccattcctctctcagattccgctgttctcagcagcatctcaagagcccgaaatcaagataagtcttttcctctcctacttcccaaagaacttagtcactgccctccctgcagagtgcttgctacccaaaacagaagggagaggccccacccaacccctgctttcccactgagggaggttctagaaggccacatcaaatgtcctctccactcaggtgcaaactggctcagtctaatggctggggggtgatggtgagccaccgctctggggagactgaggacacattcattgctgaccttgtggtggggctctgcacaggacaggtacttgtagcttctctctactgagtgtctcaccaagttttcttggggtccctggcctcctgcctttgaggttaatgctcccttggggccaggtccaacccctcctttccagcctcacctaaccctccaaattcttcttccctcatcagatcaagactggcgccccctgccgctcggagcgtctggccaaatacaaccaactcatgaggatcgaggaggctcttggggacaaggcaatctttgctggacgcaagttccgtaacccgaaggccaagtgagaagctggaggctccaggactccactggacagacccaggtcttccagacctgcttcctgaaataaacactggtgccaaccaa

SEQ ID NO: 376635 - DNA, 428 bp, Homo sapiens
gttatgattgagctagatgggaccgagaataagtccaagtttggggccaatgccatccaagggccgattccgagcagctgtgcccagtggggcttccacgggtatctatgaggctctggaactaagagacggagacaaaggccgctacctggggaaaggagtcctgaaggctgtggagaacatcaacagtactctgggccctgctctgctgcaaaagatcaagactggcgccccctgccgctcggagcgtctggccaaatacaaccaactcatgaggatcgaggaggctcttggggacaaggcaatctttgctggacgcaagttccgtaacccgaaggccaagtgagaagctggaggctccaggactccactggacagacccaggtcttccagacctgcttcctgaaataaacactggtgccaaccaa

SEQ ID NO: 376636 - DNA, 2414 bp, Homo sapiens
cctgttctcgcgggatctaaaggcgggactgccacgtccaagcaaaccgggaaaggagaggatcccggagccggtgagaattctctgttttttctctaccatcctttccaggccttttcctcacctaatgagtcgtagagacgagggcccagagagtctgtaaagtggctggtgaaagattagtgtcccagggccctacatccgggaggtggttcgggataaagagaactagtcttgggaacaatgtaggtgggaacttaagggaatgggagagcggcccatagaggtggacggagggcgcgattggagtaaagcggaccctgtgtaggtatagagttgagtcaagtggagtcactgcctctgtccctctggtcagcgtgatggccagaggcctgggggccccccactgggtggccgtgggactgctgacctgggcgaccttggggcttctggtggctggactcgggggtcatgacgacctgcacgacgatctgcaagaggacttccatggccacagccacaggcactcacatgaagatttccaccatggccacagccatgcccatggccatggccacactcacgagagcatctggcatggacatacccacgatcacgaccatggacattcacatgaggatttacaccatggccatagccatggctactcccatgagagcctctaccacagaggacatggacatgaccatgagcatagccatggaggctatggggagtctggggctccaggcatcaagcaggacctggatgctgtcactctctgggcttatgcactgggggccacagtgctgatctcagcagctccattttttgtcctcttccttatccccgtggagtcgaactctccccggcatcgctctctacttcagatcttgctcagttttgcttccggtgggctcctgggagatgctttcctgcacctcattcctcatgctcttgaacctcattctcaccacactctggagcaacccggacatggacactcccacagtggccagggccccattctgtctgtgggactgtgggttctcagtggaattgttgcctttcttgtcgtggagaaatttgtgagacatgtgaaaggaggacatggtcacagtcatggacatggacacgctcacagtcatacacgtggaagtcatggacatggaagacaagagcgttctaccaaggagaagcagagctcagaggaagaagaaaaggaaacaagaggggttcagaagaggcgaggagggagcacagtacccaaagatgggccagtgagacctcagaacgctgaagaagaaaaaagaggcttagacctgcgtgtgtcggggtacctgaatctggctgctgacttggcacacaacttcactgatggtctggccattggggcttcctttcgagggggccggggactagggatcctgaccacaatgactgtcctgctacatgaagtgccccacgaggtcggagactttgccatcttggtccagtctggctgcagcaaaaagcaggcgatgcgtctgcaactactgacagcagtaggggcactggcaggcacagcctgtgcccttctcactgaaggaggagcagtgggcagtgaaattgcaggtggtgcaggtcctggctgggtcctgccatttactgcaggtggctttatctacgtagcaacagtgtctgtgttgcccgagctgctgagggaggcatcaccattgcaatcacttctggaggtgctggggctgctggggggagttatcatgatggtgctgattgcccaccttgagtgaggggtggataaactacccctgccccaaacctctacccctaactccaggtcaggggtgcgtagaggttgggggccctggccagggacatctgccaaaggaaggaactgtagcctgggagaatggttactttggcattagggccttcaagggctggcagtcttacagaggctggagcggtgagaatgagaggccagagggaccatagtgttgggcactgtctgaccatgttgcatttggaaggctaaatggggccatgaagaaggctggaagggacagggggtgatggcagcctacctggtgtcccctaccccacctgttctcggagaaccaagttgctacacaggaagttctccaaggtccagtttcctttctcccaccagttggtggaggcttcagggaagaccagagtcctggacagagagggtaacaggaggagtcggggataaacatcaaacatcaatcgtgtgtcctgatttgggagtgattggggggatggggtgggagagggttagttggtattctcatggcctgattttttttgtttctattccttttatatcactgtgtttgaatcgagggggaggggtggtaaccggaaataaagacctccgatcttccgcccca

SEQ ID NO: 376637 - DNA, 2154 bp, Homo sapiens
  misc_feature (2141)..(2141): n is a, c, g, or t
cctgttctcgcgggatctaaaggcgggactgccacgtccaagcaaaccgggaaaggagaggatcccggagccgcgtgatggccagaggcctgggggccccccactgggtggccgtgggactgctgacctgggcgaccttggggcttctggtggctggactcgggggtcatgacgacctgcacgacgatctgcaagaggacttccatggccacagccacaggcactcacatgaagatttccaccatggccacagccatgcccatggccatggccacactcacgagagcatctggcatggacatacccacgatcacgaccatggacattcacatgaggatttacaccatggccatagccatggctactcccatgagagcctctaccacagaggacatggacatgaccatgagcatagccatggaggctatggggagtctggggctccaggcatcaagcaggacctggatgctgtcactctctgggcttatgcactgggggccacagtgctgatctcagcagctccattttttgtcctcttccttatccccgtggagtcgaactctccccggcatcgctctctacttcagatcttgctcagttttgcttccggtgggctcctgggagatgctttcctgcacctcattcctcatgctcttgaacctcattctcaccacactctggagcaacccggacatggacactcccacagtggccagggccccattctgtctgtgggactgtgggttctcagtggaattgttgcctttcttgtcgtggagaaatttgtgagacatgtgaaaggaggacatggtcacagtcatggacatggacacgctcacagtcatacacgtggaagtcatggacatggaagacaagagcgttctaccaaggagaagcagagctcagaggaagaagaaaaggaaacaagaggggttcagaagaggcgaggagggagcacagtacccaaagatgggccagtgagacctcagaacgctgaagaagaaaaaagaggcttagacctgcgtgtgtcggggtacctgaatctggctgctgacttggcacacaacttcactgatggtctggccattggggcttcctttcgagggggccggggactagggatcctgaccacaatgactgtcctgctacatgaagtgccccacgaggtcggagactttgccatcttggtccagtctggctgcagcaaaaagcaggcgatgcgtctgcaactactgacagcagtaggggcactggcaggcacagcctgtgcccttctcactgaaggaggagcagtgggcagtgaaattgcaggtggtgcaggtcctggctgggtcctgccatttactgcaggtggctttatctacgtagcaacagtgtctgtgttgcccgagctgctgagggaggcatcaccattgcaatcacttctggaggtgctggggctgctggggggagttatcatgatggtgctgattgcccaccttgagtgaggggtggataaactacccctgccccaaacctctacccctaactccaggtcaggggtgcgtagaggttgggggccctggccagggacatctgccaaaggaaggaactgtagcctgggagaatggttactttggcattagggccttcaagggctggcagtcttacagaggctggagcggtgagaatgagaggccagagggaccatagtgttgggcactgtctgaccatgttgcatttggaaggctaaatggggccatgaagaaggctggaagggacagggggtgatggcagcctacctggtgtcccctaccccacctgttctcggagaaccaagttgctacacaggaagttctccaaggtccagtttcctttctcccaccagttggtggaggcttcagggaagaccagagtcctggacagagagggtaacaggaggagtcggggataaacatcaaacatcaatcgtgtgtcctgatttgggagtgattggggggatggggtgggagagggttagttggtattctcatggcctgattttttttgtttctattccttttatatcactgtgtttgaatcgagggggaggggtggtaaccggaaataaagacctccgatcttccgccccaaaaaaaaaaaaaaaaaaaaaaaaaaaaagnaaaagaaaaagaa

SEQ ID NO: 376638 - DNA, 2131 bp, Homo sapiens
cctgttctcgcgggatctaaaggcgggactgccacgtccaagcaaaccgggaaaggagaggatcccggagccgcgtgatggccagaggcctgggggccccccactgggtggccgtgggactgctgacctgggcgaccttggggcttctggtggctggactcgggggtcatgacgacctgcacgacgatctgcaagaggacttccatggccacagccacaggcactcacatgaagatttccaccatggccacagccatgcccatggccatggccacactcacgagagcatctggcatggacatacccacgatcacgaccatggacattcacatgaggatttacaccatggccatagccatggctactcccatgagagcctctaccacagaggacatggacatgaccatgagcatagccatggaggctatggggagtctggggctccaggcatcaagcaggacctggatgctgtcactctctgggcttatgcactgggggccacagtgctgatctcagcagctccattttttgtcctcttccttatccccgtggagtcgaactctccccggcatcgctctctacttcagatcttgctcagttttgcttccggtgggctcctgggagatgctttcctgcacctcattcctcatgctcttgaacctcattctcaccacactctggagcaacccggacatggacactcccacagtggccagggccccattctgtctgtgggactgtgggttctcagtggaattgttgcctttcttgtcgtggagaaatttgtgagacatgtgaaaggaggacatggtcacagtcatggacatggacacgctcacagtcatacacgtggaagtcatggacatggaagacaagagcgttctaccaaggagaagcagagctcagaggaagaagaaaaggaaacaagaggggttcagaagaggcgaggagggagcacagtacccaaagatgggccagtgagacctcagaacgctgaagaagaaaaaagaggcttagacctgcgtgtgtcggggtacctgaatctggctgctgacttggcacacaacttcactgatggtctggccattggggcttcctttcgagggggccggggactagggatcctgaccacaatgactgtcctgctacatgaagtgccccacgaggtcggagactttgccatcttggtccagtctggctgcagcaaaaagcaggcgatgcgtctgcaactactgacagcagtaggggcactggcaggcacagcctgtgcccttctcactgaaggaggagcagtgggcagtgaaattgcaggtggtgcaggtcctggctgggtcctgccatttactgcaggtggctttatctacgtagcaacagtgtctgtgttgcccgagctgctgagggaggcatcaccattgcaatcacttctggaggtgctggggctgctggggggagttatcatgatggtgctgattgcccaccttgagtgaggggtggataaactacccctgccccaaacctctacccctaactccaggtcaggggtgcgtagaggttgggggccctggccagggacatctgccaaaggaaggaactgtagcctgggagaatggttactttggcattagggccttcaagggctggcagtcttacagaggctggagcggtgagaatgagaggccagagggaccatagtgttgggcactgtctgaccatgttgcatttggaaggctaaatggggccatgaagaaggctggaagggacagggggtgatggcagcctacctggtgtcccctaccccacctgttctcggagaaccaagttgctacacaggaagttctccaaggtccagtttcctttctcccaccagttggtggaggcttcagggaagaccagagtcctggacagagagggtaacaggaggagtcggggataaacatcaaacatcaatcgtgtgtcctgatggggagcaagatgcgccatcttctcccatcagagtataatcatgttcatttcagtttacaatccttgcagtcccatcgatttgtgagattatacccaggtcatccacagtggaggtctgaaaatgttcttagttgtactctaatttcactaactgatgggacgaagactg

SEQ ID NO: 376639 - DNA, 2033 bp, Homo sapiens
tgcgccctgggattgccgttgtagatctgctaagcacagggtgaacgtattggcttctgctgtctggactcaggggtgttgtagatcgagagagataccgaggcgtcgacttcataatcttgatcatcactgttatcagtgctagtcaaaatgaagatttccaccatggccacagccatgcccatggccatggccacactcacgagagcatctggcatggacatacccacgatcacgaccatggacattcacatgaggatttacaccatggccatagccatggctactcccatgagagcctctaccacagaggacatggacatgaccatgagcatagccatggaggctatggggagtctggggctccaggcatcaagcaggacctggatgctgtcactctctgggcttatgcactgggggccacagtgctgatctcagcagctccattttttgtcctcttccttatccccgtggagtcgaactctccccggcatcgctctctacttcagatcttgctcagttttgcttccggtgggctcctgggagatgctttcctgcacctcattcctcatgctcttgaacctcattctcaccacactctggagcaacccggacatggacactcccacagtggccagggccccattctgtctgtgggactgtgggttctcagtggaattgttgcctttcttgtcgtggagaaatttgtgagacatgtgaaaggaggacatggtcacagtcatggacatggacacgctcacagtcatacacgtggaagtcatggacatggaagacaagagcgttctaccaaggagaagcagagctcagaggaagaagaaaaggaaacaagaggggttcagaagaggcgaggagggagcacagtacccaaagatgggccagtgagacctcagaacgctgaagaagaaaaaagaggcttagacctgcgtgtgtcggggtacctgaatctggctgctgacttggcacacaacttcactgatggtctggccattggggcttcctttcgagggggccggggactagggatcctgaccacaatgactgtcctgctacatgaagtgccccacgaggtcggagactttgccatcttggtccagtctggctgcagcaaaaagcaggcgatgcgtctgcaactactgacagcagtaggggcactggcaggcacagcctgtgcccttctcactgaaggaggagcagtgggcagtgaaattgcaggtggtgcaggtcctggctgggtcctgccatttactgcaggtggctttatctacgtagcaacagtgtctgtgttgcccgagctgctgagggaggcatcaccattgcaatcacttctggaggtgctggggctgctggggggagttatcatgatggtgctgattgcccaccttgagtgaggggtggataaactacccctgccccaaacctctacccctaactccaggtcaggggtgcgtagaggttgggggccctggccagggacatctgccaaaggaaggaactgtagcctgggagaatggttactttggcattagggccttcaagggctggcagtcttacagaggctggagcggtgagaatgagaggccagagggaccatagtgttgggcactgtctgaccatgttgcatttggaaggctaaatggggccatgaagaaggctggaagggacagggggtgatggcagcctacctggtgtcccctaccccacctgttctcggagaaccaagttgctacacaggaagttctccaaggtccagtttcctttctcccaccagttggtggaggcttcagggaagaccagagtcctggacagagagggtaacaggaggagtcggggataaacatcaaacatcaatcgtgtgtcctgatttgggagtgattggggggatggggtgggagagggttagttggtattctcatggcctgattttttttgtttctattccttttatatcactgtgtttgaatcgagggggaggggtggtaaccggaaataaagacctccgatcttccgcccca

SEQ ID NO: 376640 - DNA, 2314 bp, Homo sapiens
cctgttctcgcgggatctaaaggcgggactgccacgtccaagcaaaccgggaaaggagaggatcccggagccggtgagaattctctgttttttctctaccatcctttccaggccttttcctcacctaatgagtcgtagagacgagggcccagagagtctgtaaagtggctggtgaaagattagtgtcccagggccctacatccgggaggtggttcgggataaagagaactagtcttgggaacaatgtaggtgggaacttaagggaatgggagagcggcccatagaggtggacggagggcgcgattggagtaaagcggaccctgtgtaggtatagagttgagtcaagtggagtcactgcctctgtccctctggtcagcgtgatggccagaggcctgggggccccccactgggtggccgtgggactgctgacctgggcgaccttggggcttctggtggctggactcgggggtcatgacgacctgcacgacgatctgcaagaggacttccatggccacagccacaggcactcacatgaagatttccaccatggccacagccatgcccatggccatggccacactcacgagagcatctggcatggacatacccacgatcacgaccatggacattcacatgaggatttacaccatggccatagccatggctactcccatgagagcctctaccacaggcactgggggccacagtgctgatctcagcagctccattttttgtcctcttccttatccccgtggagtcgaactctccccggcatcgctctctacttcagatcttgctcagttttgcttccggtgggctcctgggagatgctttcctgcacctcattcctcatgctcttgaacctcattctcaccacactctggagcaacccggacatggacactcccacagtggccagggccccattctgtctgtgggactgtgggttctcagtggaattgttgcctttcttgtcgtggagaaatttgtgagacatgtgaaaggaggacatggtcacagtcatggacatggacacgctcacagtcatacacgtggaagtcatggacatggaagacaagagcgttctaccaaggagaagcagagctcagaggaagaagaaaaggaaacaagaggggttcagaagaggcgaggagggagcacagtacccaaagatgggccagtgagacctcagaacgctgaagaagaaaaaagaggcttagacctgcgtgtgtcggggtacctgaatctggctgctgacttggcacacaacttcactgatggtctggccattggggcttcctttcgagggggccggggactagggatcctgaccacaatgactgtcctgctacatgaagtgccccacgaggtcggagactttgccatcttggtccagtctggctgcagcaaaaagcaggcgatgcgtctgcaactactgacagcagtaggggcactggcaggcacagcctgtgcccttctcactgaaggaggagcagtgggcagtgaaattgcaggtggtgcaggtcctggctgggtcctgccatttactgcaggtggctttatctacgtagcaacagtgtctgtgttgcccgagctgctgagggaggcatcaccattgcaatcacttctggaggtgctggggctgctggggggagttatcatgatggtgctgattgcccaccttgagtgaggggtggataaactacccctgccccaaacctctacccctaactccaggtcaggggtgcgtagaggttgggggccctggccagggacatctgccaaaggaaggaactgtagcctgggagaatggttactttggcattagggccttcaagggctggcagtcttacagaggctggagcggtgagaatgagaggccagagggaccatagtgttgggcactgtctgaccatgttgcatttggaaggctaaatggggccatgaagaaggctggaagggacagggggtgatggcagcctacctggtgtcccctaccccacctgttctcggagaaccaagttgctacacaggaagttctccaaggtccagtttcctttctcccaccagttggtggaggcttcagggaagaccagagtcctggacagagagggtaacaggaggagtcggggataaacatcaaacatcaatcgtgtgtcctgatttgggagtgattggggggatggggtgggagagggttagttggtattctcatggcctgattttttttgtttctattccttttatatcactgtgtttgaatcgagggggaggggtggtaaccggaaataaagacctccgatcttccgcccca

SEQ ID NO: 376641 - DNA, 1464 bp, Homo sapiens
cggtgactctacaggatcccggacatttcacgagtcgccccggacatggacactcccacaggtggccagggccccattctgtctgtgggactgtgggttctcagtggaattgttgcctttcttgtcgtggagaaatttgtgagacatgtgaaaggaggacatggtcacagtcatggacatggacacgctcacagtcatacacgtggaagtcatggacatggaagacaagagcgttctaccaaggagaagcagagctcagaggaagaagaaaaggaaacaagaggggttcagaagaggcgaggagggagcacagtacccaaagatgggccagtgagacctcagaacgctgaagaagaaaaaagaggcttagacctgcgtgtgtcggggtacctgaatctggctgctgacttggcacacaacttcactgatggtctggccattggggcttcctttcgagggggccggggactagggatcctgaccacaatgactgtcctgctacatgaagtgccccacgaggtcggagactttgccatcttggtccagtctggctgcagcaaaaagcaggcgatgcgtctgcaactactgacagcagtaggggcactggcaggcacagcctgtgcccttctcactgaaggaggagcagtgggcagtgaaattgcaggtggtgcaggtcctggctgggtcctgccatttactgcaggtggctttatctacgtagcaacagtgtctgtgttgcccgagctgctgagggaggcatcaccattgcaatcacttctggaggtgctggggctgctggggggagttatcatgatggtgctgattgcccaccttgagtgaggggtggataaactacccctgccccaaacctctacccctaactccaggtcaggggtgcgtagaggttgggggccctggccagggacatctgccaaaggaaggaactgtagcctgggagaatggttactttggcattagggccttcaagggctggcagtcttacagaggctggagcggtgagaatgagaggccagagggaccatagtgttgggcactgtctgaccatgttgcatttggaaggctaaatggggccatgaagaaggctggaagggacagggggtgatggcagcctacctggtgtcccctaccccacctgttctcggagaaccaagttgctacacaggaagttctccaaggtccagtttcctttctcccaccagttggtggaggcttcagggaagaccagagtcctggacagagagggtaacaggaggagtcggggataaacatcaaacatcaatcgtgtgtcctgatttgggagtgattggggggatggggtgggagagggttagttggtattctcatggcctgattttttttgtttctattccttttatatcactgtgtttgaatcgagggggaggggtggtaaccggaaataaagacctccgatcttccgcccca

SEQ ID NO: 376642 - DNA, 1485 bp, Homo sapiens
cctgttctcgcgggatctaaaggcgggactgccacgtccaagcaaaccgggaaaggagaggatcccggagccggtgagaattctctgttttttctctaccatcctttccaggccttttcctcacctaatgagtcgtagagacgagggcccagagagtctgtaaagtggctggtgaaagattagtgtcccagggccctacatccgggaggtggttcgggataaagagaactagtcttgggaacaatgtaggtgggaacttaagggaatgggagagcggcccatagaggtggacggagggcgcgattggagtaaagcggaccctgtgtaggtatagagttgagtcaagtggagtcactgcctctgtccctctggtcagcgtgatggccagaggcctgggggccccccactgggtggccgtgggactgctgacctgggcgaccttggggcttctggtggctggactcgggggtcatgacgacctgcacgacgatctgcaagaggacttccatggccacagccacaggcactcacatgaagatttccaccatggccacagccatgcccatggccatggccacactcacgagagcatctggcatggacatacccacgatcacgaccatggacattcacatgaggatttacaccatggccatagccatggctactcccatgagagcctctaccacagaggacatggacatgaccatgagcatagccatggaggctatggggagtctggggctccaggcatcaagcaggacctggatgctgtcactctctgggcttatgcactgggggccacagtgctgatctcagcagctccattttttgtcctcttccttatccccgtggagtcgaactctccccggcatcgctctctacttcagatcttgctcagttttgcttccggtgggctcctgggagatgctttcctgcacctcattcctcatgctcttgaacctcattctcaccacactctggagcaacccggacatggacactcccacagtggccagggccccattctgtctgtgggactgtgggttctcagtggaattgttgcctttcttgtctgtctgaccatgttgcatttggaaggctaaatggggccatgaagaaggctggaagggacagggggtgatggcagcctacctggtgtcccctaccccacctgttctcggagaaccaagttgctacacaggaagttctccaaggtccagtttcctttctcccaccagttggtggaggcttcagggaagaccagagtcctggacagagagggtaacaggaggagtcggggataaacatcaaacatcaatcgtgtgtcctgatttgggagtgattggggggatggggtgggagagggttagttggtattctcatggcctgattttttttgtttctattccttttatatcactgtgtttgaatcgagggggaggggtggtaaccggaaataaagacctccgatcttccgcccca

SEQ ID NO: 376643 - DNA, 1182 bp, Homo sapiens
  misc_feature (766)..(766): n is a, c, g, or t
  misc_feature (772)..(772): n is a, c, g, or t
cctgttctcgcgggatctaaaggcgggactgccacgtccaagcaaaccgggaaaggagaggatcccggagccgcgtgatggccagaggcctgggggccccccactgggtggccgtgggactgctgacctgggcgaccttggggcttctggtggctggactcgggggtcatgacgacctgcacgacgatctgcaagaggacttccatggccacagccacaggcactcacatgaagatttccaccatggccacagccatgcccatggccatggccacactcacgagagcatctggcatggacatacccacgatcacgaccatggacattcacatgaggatttacaccatggccatagccatggctactcccatgagagcctctaccacagaggacatggacatgaccatgagcatagccatggaggctatggggagtctggggctccaggcatcaagcaggacctggatgctgtcactctctgggcttatgcactgggggccacagtgctgatctcagcagctccattttttgtcctcttccttatccccgtggagtcgaactctccccggcatcgctctctacttcagatcttgctcagttttgcttccggtgggctcctgggagatgctttcctgcacctcattcctcatgctcttgaacctcattctcaccacactctggagcaacccggacatggacactcccacagtgccagggccccattctgtctgtgtgatcgtggggccctggccactgtgggagtttncatgtnctgtctgaccatgttgcatttggaaggctaaatggggccatgaagaaggctggaagggacagggggtgatggcagcctacctggtgtcccctaccccacctgttctcggagaaccaagttgctacacaggaagttctccaaggtccagtttcctttctcccaccagttggtggaggcttcagggaagaccagagtcctggacagagagggtaacaggaggagtcggggataaacatcaaacatcaatcgtgtgtcctgatttgggagtgattggggggatggggtgggagagggttagttggtattctcatggcctgattttttttgtttctattccttttatatcactgtgtttgaatcgagggggaggggtggtaaccggaaataaagacctccgatcttccgcccca

SEQ ID NO: 376644 - DNA, 526 bp, Homo sapiens
cagcctctgtaagactgccagcccttgaaggccctaatgccaaagtaaccattctcccaggctacagaggctggagcggtgagaatgagaggccagagggaccatagtgttgggcactgtctgaccatgttgcatttggaaggctaaatggggccatgaagaaggctggaagggacagggggtgatggcagcctacctggtgtcccctaccccacctgttctcggagaaccaagttgctacacaggaagttctccaaggtccagtttcctttctcccaccagttggtggaggcttcagggaagaccagagtcctggacagagagggtaacaggaggagtcggggataaacatcaaacatcaatcgtgtgtcctgatttgggagtgattggggggatggggtgggagagggttagttggtattctcatggcctgattttttttgtttctattccttttatatcactgtgtttgaatcgagggggaggggtggtaaccggaaataaagacctccgatcttccgcccca

SEQ ID NO: 376645 - DNA, 2111 bp, Homo sapiens
cctgttctcgcgggatctaaaggcgggactgccacgtccaagcaaaccgggaaaggagaggatcccggagccgcgtgatggccagaggcctgggggccccccactgggtggccgtgggactgctgacctgggcgaccttggggcttctggtggctggactcgggggtcatgacgacctgcacgacgatctgcaagaggacttccatggccacagccacaggcactcacatgaagatttccaccatggccacagccatgcccatggccatggccacactcacgagagcatctggcatggacatacccacgatcacgaccatggacattcacatgaggatttacaccatggccatagccatggctactcccatgagagcctctaccacagaggacatggacatgaccatgagcatagccatggaggctatggggagtctggggctccaggcatcaagcaggacctggatgctgtcactctctgggcttatgcactgggggccacagtgctgatctcagcagctccattttttgtcctcttccttatccccgtggagtcgaactctccccggcatcgctctctacttcagatcttgctcagttttgcttccggtgggctcctgggagatgctttcctgcacctcattcctcatgctcttgaacctcattctcaccacactctggagcaacccggacatggacactcccacagtggccagggccccattctgtctgtgggactgtgggttctcagtggaattgttgcctttcttgtcgtggagaaatttgtgagacatgtgaaaggaggacatggtcacagtcatggacatggacacgctcacagtcatacacgtggaagtcatggacatggaagacaagagcgttctaccaaggagaagcagagctcagaggaagaagaaaaggaaacaagaggggttcagaagaggcgaggagggagcacagtacccaaagatgggccagtgagacctcagaacgctgaagaagaaaaaagaggcttagacctgcgtgtgtcggggtacctgaatctggctgctgacttggcacacaacttcactgatggtctggccattggggcttcctttcgagggggccggggactagggatcctgaccacaatgactgtcctgctacatgaagtgccccacgaggtcggagactttgccatcttggtccagtctggctgcagcaaaaagcaggcgatgcgtctgcaactactgacagcagtaggggcactggcaggcacagcctgtgcccttctcactgaaggaggagcagtgggcagtgaaattgcaggtggtgcaggtcctggctgggtcctgccatttactgcaggtggctttatctacgtagcaacagtgtctgtgttgcccgagctgctgagggaggcatcaccattgcaatcacttctggaggtgctggggctgctggggggagttatcatgatggtgctgattgcccaccttgagtgaggggtggataaactacccctgccccaaacctctacccctaactccaggtcaggggtgcgtagaggttgggggccctggccagggacatctgccaaaggaaggaactgtagcctgggagaatggttactttggcattagggccttcaagggctggcagtcttacagaggctggagcggtgagaatgagaggccagagggaccatagtgttgggcactgtctgaccatgttgcatttggaaggctaaatggggccatgaagaaggctggaagggacagggggtgatggcagcctacctggtgtcccctaccccacctgttctcggagaaccaagttgctacacaggaagttctccaaggtccagtttcctttctcccaccagttggtggaggcttcagggaagaccagagtcctggacagagagggtaacaggaggagtcggggataaacatcaaacatcaatcgtgtgtcctgatttgggagtgattggggggatggggtgggagagggttagttggtattctcatggcctgattttttttgtttctattccttttatatcactgtgtttgaatcgagggggaggggtggtaaccggaaataaagacctccgatcttccgcccca

SEQ ID NO: 376646 - DNA, 2114 bp, Homo sapiens
cctgttctcgcgggatctaaaggcgggactgccacgtccaagcaaaccgggaaaggagaggatcccggagccgcgtgatggccagaggcctgggggccccccactgggtggccgtgggactgctgacctgggcgaccttggggcttctggtggctggactcgggggtcatgacgacctgcacgacgatctgcaagaggacttccatggccacagccacaggcactcacatgaagatttccaccatggccacagccatgcccatggccatggccacactcacgagagcatctggcatggacatacccacgatcacgaccatggacattcacatgaggatttacaccatggccatagccatggctactcccatgagagcctctaccacagaggacatggacatgaccatgagcatagccatggaggctatggggagtctggggctccaggcatcaagcaggacctggatgctgtcactctctgggcttatgcactgggggccacagtgctgatctcagcagctccattttttgtcctcttccttatccccgtggagtcgaactctccccggcatcgctctctacttcagatcttgctcagttttgcttccggtgggctcctgggagatgctttcctgcacctcattcctcatgctcttgaacctcattctcaccacactctggagcaacccggacatggacactcccacagtggccagggccccattctgtctgtgggactgtgggttctcagtggaattgttgcctttcttgtcgtggagaaatttgtgagacatgtgaaaggaggacatggtcacagtcatggacatggacacgctcacagtcatacacgtggaagtcatggacatggaagacaagagcgttctaccaaggagaagcagagctcagaggaagaagaaaaggaaacaagaggggttcagaagaggcgaggagggagcacagtacccaaagatgggccagtgagacctcagaacgctgaagaagaaaaaagaggcttagacctgcgtgtgtcggggtacctgaatctggctgctgacttggcacacaacttcactgatggtctggccattggggcttcctttcgagggggccggggactagggatcctgaccacaatgactgtcctgctacatgaagtgccccacgaggtcggagactttgccatcttggtccagtctggctgcagcaaaaagcaggcgatgcgtctgcaactactgacagcagtaggggcactggcaggcacagcctgtgcccttctcactgaaggaggagcagtgggcagtgaaattgcaggtggtgcaggtcctggctgggtcctgccatttactgcaggtggctttatctacgtagcaacagtgtctgtgttgcccgagctgctgagggaggcatcaccattgcaatcacttctggaggtgctggggctgctggggggagttatcatgatggtgctgattgcccaccttgagtgaggggtggataaactacccctgccccaaacctctacccctaactccaggtcaggggtgcgtagaggttgggggccctggccagggacatctgccaaaggaaggaactgtagcctgggagaatggttactttggcattagggccttcaagggctggcagtcttacagaggctggagcggtgagaatgagaggccagagggaccatagtgttgggcactgtctgaccatgttgcatttggaaggctaaatggggccatgaagaaggctggaagggacagggggtgatggcagcctacctggtgtcccctaccccacctgttctcggagaaccaagttgctacacaggaagttctccaaggtccagtttcctttctcccaccagttggtggaggcttcagggaagaccagagtcctggacagagagggtaacaggaggagtcggggataaacatcaaacatcaatcgtgtgtcctgatttgggagtgattggggggataattcttttcctgtacctatttatgttattacaggttctctgtctcgacaccgtgtttatactgatcatgatgtatgcttcatttatgcttccatttattattccttccccttatcttgaagattatttgtga

SEQ ID NO: 376647 - DNA, 1809 bp, Homo sapiens
tgtgtagtgttctagaggatcacccagatccgtcgactgagccatggccatagccatggctactcccatgagagcctctaccacagaggacatggacatgaccatgagcatagccatggaggctatggggagtctggggctccaggcatcaagcaggacctggatgctgtcactctctgggcttatgcactgggggccacagtgctgatctcagcagctccattttttgtcctcttccttatccccgtggagtcgaactctccccggcatcgctctctacttcagatcttgctcagttttgcttccggtgggctcctgggagatgctttcctgcacctcattcctcatgctcttgaacctcattctcaccacactctggagcaacccggacatggacactcccacagtggccagggccccattctgtctgtgggactgtgggttctcagtggaattgttgcctttcttgtcgtggagaaatttgtgagacatgtgaaaggaggacatggtcacagtcatggacatggacacgctcacagtcatacacgtggaagtcatggacatggaagacaagagcgttctaccaaggagaagcagagctcagaggaagaagaaaaggaaacaagaggggttcagaagaggcgaggagggagcacagtacccaaagatgggccagtgagacctcagaacgctgaagaagaaaaaagaggcttagacctgcgtgtgtcggggtacctgaatctggctgctgacttggcacacaacttcactgatggtctggccattggggcttcctttcgagggggccggggactagggatcctgaccacaatgactgtcctgctacatgaagtgccccacgaggtcggagactttgccatcttggtccagtctggctgcagcaaaaagcaggcgatgcgtctgcaactactgacagcagtaggggcactggcaggcacagcctgtgcccttctcactgaaggaggagcagtgggcagtgaaattgcaggtggtgcaggtcctggctgggtcctgccatttactgcaggtggctttatctacgtagcaacagtgtctgtgttgcccgagctgctgagggaggcatcaccattgcaatcacttctggaggtgctggggctgctggggggagttatcatgatggtgctgattgcccaccttgagtgaggggtggataaactacccctgccccaaacctctacccctaactccaggtcaggggtgcgtagaggttgggggccctggccagggacatctgccaaaggaaggaactgtagcctgggagaatggttactttggcattagggccttcaagggctggcagtcttacagaggctggagcggtgagaatgagaggccagagggaccatagtgttgggcactgtctgaccatgttgcatttggaaggctaaatggggccatgaagaaggctggaagggacagggggtgatggcagcctacctggtgtcccctaccccacctgttctcggagaaccaagttgctacacaggaagttctccaaggtccagtttcctttctcccaccagttggtggaggcttcagggaagaccagagtcctggacagagagggtaacaggaggagtcggggataaacatcaaacatcaatcgtgtgtcctgatttgggagtgattggggggatggggtgggagagggttagttggtattctcatggcctgattttttttgtttctattccttttatatcactgtgtttgaatcgagggggaggggtggtaaccggaaataaagacctccgatcttccgcccca

SEQ ID NO: 376648 - DNA, 1878 bp, Homo sapiens
attatacaattgagggagggcggtaagcagggaggtgtaagatatgttcttggagactactttgtctaccagaatctgtgaagcactcctttagtgttgaatgaggaatttaggcatgattggcctttgttgctgcccatcatggtgacgtggggtaggaggtacctcctaccccacgtgtttccttttcttcttcctctgagctctgcttctccttggtagaacgctcttgtcttccatgtccatgacttccacgtgtatgactgtgagcgtgtccatgtccatgactgtgaccatgtcctcttccttatccccgtggagtcgaactctccccggcatcgctctctacttcagatcttgctcagttttgcttccggtgggctcctgggagatgctttcctgcacctcattcctcatgctcttgaacctcattctcaccacactctggagcaacccggacatggacactcccacagtggccagggccccattctgtctgtgggactgtgggttctcagtggaattgttgcctttcttgtcgtggagaaatttgtgagacatgtgaaaggaggacatggtcacagtcatggacatggacacgctcacagtcatacacgtggaagtcatggacatggaagacaagagcgttctaccaaggagaagcagagctcagaggaagaagaaaaggaaacaagaggggttcagaagaggcgaggagggagcacagtacccaaagatgggccagtgagacctcagaacgctgaagaagaaaaaagaggcttagacctgcgtgtgtcggggtacctgaatctggctgctgacttggcacacaacttcactgatggtctggccattggggcttcctttcgagggggccggggactagggatcctgaccacaatgactgtcctgctacatgaagtgccccacgaggtcggagactttgccatcttggtccagtctggctgcagcaaaaagcaggcgatgcgtctgcaactactgacagcagtaggggcactggcaggcacagcctgtgcccttctcactgaaggaggagcagtgggcagtgaaattgcaggtggtgcaggtcctggctgggtcctgccatttactgcaggtggctttatctacgtagcaacagtgtctgtgttgcccgagctgctgagggaggcatcaccattgcaatcacttctggaggtgctggggctgctggggggagttatcatgatggtgctgattgcccaccttgagtgaggggtggataaactacccctgccccaaacctctacccctaactccaggtcaggggtgcgtagaggttgggggccctggccagggacatctgccaaaggaaggaactgtagcctgggagaatggttactttggcattagggccttcaagggctggcagtcttacagaggctggagcggtgagaatgagaggccagagggaccatagtgttgggcactgtctgaccatgttgcatttggaaggctaaatggggccatgaagaaggctggaagggacagggggtgatggcagcctacctggtgtcccctaccccacctgttctcggagaaccaagttgctacacaggaagttctccaaggtccagtttcctttctcccaccagttggtggaggcttcagggaagaccagagtcctggacagagagggtaacaggaggagtcggggataaacatcaaacatcaatcgtgtgtcctgatttgggagtgattggggggatggggtgggagagggttagttggtattctcatggcctgattttttttgtttctattccttttatatcactgtgtttgaatcgagggggaggggtggtaaccggaaataaagacctccgatcttccgcccca

SEQ ID NO: 376649 - DNA, 1043 bp, Homo sapiens
  misc_feature (1032)..(1032): n is a, c, g, or t
cctgttctcgcgggatctaaaggcgggactgccacgtccaagcaaaccgggaaaggagaggatcccggagccgcgtgatggccagaggcctgggggccccccactgggtggccgtgggactgctgacctgggcgaccttggggcttctggtggctggactcgggggtcatgacgacctgcacgacgatctgcaagaggacttccatggccacagccacaggcactcacatgaagatttccaccatggccacagccatgcccatggccatggccacactcacgagagcatctggcatggacatacccacgatcacgaccatggacattcacatgaggatttacaccatggccatagccatggctactcccatgagagcctctaccacagaggacatggacatgaccatgagcatagccatggaggctatggggagtctggggctccaggcatcaagcaggacctggatgctgtcactctctgggcttatgcactgggggccacagtgctgatctcagcagctccattttttgtcctcttccttatccccgtggagtcgaactctccccggcatcgctctctacttcagatcttgctcagttttgcttccggtgggctcctgggagatgctttcctgcacctcattcctcatgctcttgaacctcattctcaccacactctggagcaacccggacatggacactcccacagtggccagggccccattctgtctgtgggactgtgggttctcagtggaattgttgcctttcttgtcgtggagaaatttgtgagacatgtgaaaggaggacatggtcacagtcatggacatggacacgctcacagtcatacacgtggaagtcatggacatggaagacaagagcgttctaccaaggagaagcagagctcagaggaagaagaaaaggaaacaagaggggttcagaagaggcgaggagggagcacagaggaagagagtcattttttaatgtattttcgaggtagaactgacaggactggtttatggattggatgttggnagagagacggg

SEQ ID NO: 376650 - DNA, 1485 bp, Homo sapiens
  misc_feature (1069)..(1069): n is a, c, g, or t
  misc_feature (1075)..(1075): n is a, c, g, or t
cctgttctcgcgggatctaaaggcgggactgccacgtccaagcaaaccgggaaaggagaggatcccggagccggtgagaattctctgttttttctctaccatcctttccaggccttttcctcacctaatgagtcgtagagacgagggcccagagagtctgtaaagtggctggtgaaagattagtgtcccagggccctacatccgggaggtggttcgggataaagagaactagtcttgggaacaatgtaggtgggaacttaagggaatgggagagcggcccatagaggtggacggagggcgcgattggagtaaagcggaccctgtgtaggtatagagttgagtcaagtggagtcactgcctctgtccctctggtcagcgtgatggccagaggcctgggggccccccactgggtggccgtgggactgctgacctgggcgaccttggggcttctggtggctggactcgggggtcatgacgacctgcacgacgatctgcaagaggacttccatggccacagccacaggcactcacatgaagatttccaccatggccacagccatgcccatggccatggccacactcacgagagcatctggcatggacatacccacgatcacgaccatggacattcacatgaggatttacaccatggccatagccatggctactcccatgagagcctctaccacagaggacatggacatgaccatgagcatagccatggaggctatggggagtctggggctccaggcatcaagcaggacctggatgctgtcactctctgggcttatgcactgggggccacagtgctgatctcagcagctccattttttgtcctcttccttatccccgtggagtcgaactctccccggcatcgctctctacttcagatcttgctcagttttgcttccggtgggctcctgggagatgctttcctgcacctcattcctcatgctcttgaacctcattctcaccacactctggagcaacccggacatggacactcccacagtgccagggccccattctgtctgtgtgatcgtggggccctggccactgtgggagtttncatgtnctgtctgaccatgttgcatttggaaggctaaatggggccatgaagaaggctggaagggacagggggtgatggcagcctacctggtgtcccctaccccacctgttctcggagaaccaagttgctacacaggaagttctccaaggtccagtttcctttctcccaccagttggtggaggcttcagggaagaccagagtcctggacagagagggtaacaggaggagtcggggataaacatcaaacatcaatcgtgtgtcctgatttgggagtgattggggggatggggtgggagagggttagttggtattctcatggcctgattttttttgtttctattccttttatatcactgtgtttgaatcgagggggaggggtggtaaccggaaataaagacctccgatcttccgcccca

SEQ ID NO: 376651 - DNA, 1134 bp, Homo sapiens
ccccaccgactctcaggtctggaccagctcccctgaacgccaaggcttcaaggaaacaccaggatcccatatttcaggaccatctctccccggggctgctgtgcaaattaagcaagtcttaaagtggcctgtcctcttcaaagcaaagcctcctgaatttcaagcaatcatttcggaaagagactgctaagcacatgtgatgcaccttacagagaaatggcactaccagatttggaaaggctgcatgtgcgtgaggaaagattagcaaggatttcatctctgcccttaaatcaccaaagaaaacccaccatccccgcaattctcgaggcaggttgctggccacagtgagaagaccttggtggcacgttacacggtgaaatacaatcctcaccacattaaacatggatgtccccaaacctggaaggaacctcccagcttgcctcttcagtgactgtcaaccctggctgacatcagaaccgcctgggacatggagaaacctgtatgagttggtgtctcaggcctggcggctcagcacactgcctgggtgagagctcctcaggtgattcgactgtgtccccagggcagagagccactacatcatccagcatggagacgtgaggacatccaggctcccagagctcagcctacagtcggagcacactgtgtgctcagggcaggtgtttttctggcgcactctctgcctttcccacttgtggtcagttcaagcccccaccagccacacatgggctaatggtgctaagtggcatccccactcctctttccagaaagctgcttgtttgggcaagaagagagatgccccgtgatgccgaagagcaagttatggtggaggcctgagcatgagagctctggtcacaccacgccgaggaccggacggtgcccttgcttcctgtgagtggtctcttcgctttctggctggaacgataaccccaggggttgtgaggacagaacctccacctgccatccccatgggcaccgctggtctccagagcacgtcaaggtccttcccctcccagcttctgatcttggagagcgaggcctctcatgctcacatgcatgtgtttaggtgtatatgctgccatgccatgctttaaaaataaaaagtgttttgaataa

SEQ ID NO: 376652 - DNA, 530 bp, Homo sapiens
tctgacccaagaattaaggaaatgatttcagtgtttatataaacaaatagaatcctcaaacctatagaaccgatgtgttcagtgttgtcacctttgtttagtatatagttgctcagataatgtttattatatttattttgtgtatttttgttaaaagtataaaagcagacctggttctaatcctagctccatctttttatctctgtgaccctaaacaggttacttaatgcctcaaaaaaaatatttagatagccaggagtggtagcttacgcctgcagtcctggcactttgtgaggccaaggcaggtagattgcttgagcctgggagttcaagaccagtcggcaacctggcgaaaccccagctctataaaaatcagccagacatggtggcacatgcctgtagccccagctactcaggaagctgaggtaggaggatagtgtgagcccaggacaccatggttgctggggctgtgatcacgccactgcactccagcctgagaggcaagcaagactctgtctcaaaagacagac

SEQ ID NO: 376653 - DNA, 2342 bp, Homo sapiens
tctctagaaagttctgcaccccgccccctctgtctgcgctcccgctcctcccagcccctccctcgcggcggggcgggaccaatcgctccccgagccgctcctgacccacctaccccagctctcgcgccgcgtgcagaggtgctcaagcctcctcgcggtccgcagtcagtgccgccgcgcccggcctcccgcacgccccgcaggtagcgcccccgcccgcggcccagagtgcgctcgcgccggcaccagctcccggataaacggcgcgccgcgcggagatgacagccgaggagatgaaggcgaccgagagcggggcgcagtcggcgccgctgcccatggagggagtggacatcagccccaaacaggacgaaggcgtgctgaaggtcatcaagagagagggcacaggtacagagatgcccatgattggggaccgagtctttgtccactacactggctggctattagatggcacaaagtttgactccagtctggatcgcaaggacaaattctcctttgacctgggaaaaggggaggtcatcaaggcttgggacattgccatagccaccatgaaggtgggggaggtgtgccacatcacctgcaaaccagaatatgcctacggttcagcaggcagtcctccaaagattccccccaatgccacgcttgtatttgaggtggagttgtttgagtttaagggagaagatctgacggaagaggaagatggcggaatcattcgcagaatacagactcgcggtgaaggctatgctaagcccaatgagggtgctatcgtggaggttgcactggaagggtactacaaggacaagctctttgaccagcgggagctccgctttgagattggcgagggggagaacctggatctgccttatggtctggagagggccattcagcgcatggagaaaggagaacattccatcgtgtacctcaagcccagctatgcttttggcagtgttgggaaggaaaagttccaaatcccaccaaatgctgagctgaaatatgaattacacctcaagagttttgaaaaggccaaggagtcttgggagatgaattcagaagagaagctggaacagagcaccatagtgaaagagcggggcactgtgtacttcaaggaaggtaaatacaagcaagctttactacagtataagaagatcgtgtcttggctggaatatgagtctagtttttccaatgaggaagcacagaaagcacaggcccttcgactggcctctcacctcaacctggccatgtgtcatctgaaactacaggccttctctgctgccattgaaagctgtaacaaggccctagaactggacagcaacaacgagaagggcctcttccgccggggagaggcccacctggccgtgaatgactttgaactggcacgggctgatttccagaaggtcctgcagctctaccccaacaacaaagccgccaagacccagctggctgtgtgccagcagcggatccgaaggcagcttgcccgggagaagaagctctatgccaatatgtttgagaggctggctgaggaggagaacaaggccaaggcagaggcttcctcaggagaccatcccactgacacagagatgaaggaggagcagaagagcaacacggcagggagccagtctcaggtggagacagaagcatagcccctctccaccagccctactcctgcggctgcctgccccccagtctccccactccaccctgttagttttgtaaaaactgaagaattttgagtgaattagacctttatttttctatctggttggatggtggctttaggggaagggggaaaggtgtaggctgggggattgaggtggggaatcattttagctggtgtcagcccctcttcccttcctccattgcacatgaacatatgtccatccatatatattcatcagaatgttaatttattttgctccctctgttaggtccattttctaagggtagaagaggcaagtggtagggatgaggtctgataagaacccagggtggagagggagactcctgggcagccgttttcctcatcctttccctctcccagtccatttccaaatgtggcctccatgtgggtgctagggacatgggaaaaaccactgctatgccatttcttctctctgttcccttcctcacccccgacggtgtggctgatgatgtcttctggtgtcatggtgaccaccccctgttccctgttctggtatttcccctgtcagtttcccctctcggccaggttgtgtcccaaaatcccctcagcctcttctctgcacgttgctgaaggtccaggcttgcctcaagttccatgcttgagcaataaagtggaaacaataaaa

SEQ ID NO: 376654 - DNA, 487 bp, Homo sapiens
tctctagaaagttctgcaccccgccccctctgtctgcgctcccgctcctcccagcccctccctcgcggcggggcgggaccaatcgctccccgagccgctcctgacccacctaccccagctctcgcgccgcgtgcagaggtgctcaagcctcctcgcggtccgcagtcagtgccgccgcgcccggcctcccgcacgccccgcaggtagcgcccccgcccgcggcccagagtgcgctcgcgccggcaccagctcccggataaacggcgcgccgcgcggagatgacagccgaggagatgaaggcgaccgagagcggggcgcagtcggcgccgctgcccatggagggagtggacatcagccccaaacaggacgaaggcgtgctgaaggtgaggggcggcggggcctgcggaggcgtcggaacccggggccccgcgggccgcccttccgccgcgcccggagcccgcggccgggcacgggtcgaggcggccgc

SEQ ID NO: 376655 - DNA, 2345 bp, Homo sapiens
tctctagaaagttctgcaccccgccccctctgtctgcgctcccgctcctcccagcccctccctcgcggcggggcgggaccaatcgctccccgagccgctcctgacccacctaccccagctctcgcgccgcgtgcagaggtgctcaagcctcctcgcggtccgcagtcagtgccgccgcgcccggcctcccgcacgccccgcaggtagcgcccccgcccgcggcccagagtgcgctcgcgccggcaccagctcccggataaacggcgcgccgcgcggagatgacagccgaggagatgaaggcgaccgagagcggggcgcagtcggcgccgctgcccatggagggagtggacatcagccccaaacaggacgaaggcgtgctgaaggtcatcaagagagagggcacaggtacagagatgcccatgattggggaccgagtctttgtccactacactggctggctattagatggcacaaagtttgactccagtctggatcgcaaggacaaattctcctttgacctgggaaaaggaggggaggtcatcaaggcttgggacattgccatagccaccatgaaggtgggggaggtgtgccacatcacctgcaaaccagaatatgcctacggttcagcaggcagtcctccaaagattccccccaatgccacgcttgtatttgaggtggagttgtttgagtttaagggagaagatctgacggaagaggaagatggcggaatcattcgcagaatacagactcgcggtgaaggctatgctaagcccaatgagggtgctatcgtggaggttgcactggaagggtactacaaggacaagctctttgaccagcgggagctccgctttgagattggcgagggggagaacctggatctgccttatggtctggagagggccattcagcgcatggagaaaggagaacattccatcgtgtacctcaagcccagctatgcttttggcagtgttgggaaggaaaagttccaaatcccaccaaatgctgagctgaaatatgaattacacctcaagagttttgaaaaggccaaggagtcttgggagatgaattcagaagagaagctggaacagagcaccatagtgaaagagcggggcactgtgtacttcaaggaaggtaaatacaagcaagctttactacagtataagaagatcgtgtcttggctggaatatgagtctagtttttccaatgaggaagcacagaaagcacaggcccttcgactggcctctcacctcaacctggccatgtgtcatctgaaactacaggccttctctgctgccattgaaagctgtaacaaggccctagaactggacagcaacaacgagaagggcctcttccgccggggagaggcccacctggccgtgaatgactttgaactggcacgggctgatttccagaaggtcctgcagctctaccccaacaacaaagccgccaagacccagctggctgtgtgccagcagcggatccgaaggcagcttgcccgggagaagaagctctatgccaatatgtttgagaggctggctgaggaggagaacaaggccaaggcagaggcttcctcaggagaccatcccactgacacagagatgaaggaggagcagaagagcaacacggcagggagccagtctcaggtggagacagaagcatagcccctctccaccagccctactcctgcggctgcctgccccccagtctccccactccaccctgttagttttgtaaaaactgaagaattttgagtgaattagacctttatttttctatctggttggatggtggctttaggggaagggggaaaggtgtaggctgggggattgaggtggggaatcattttagctggtgtcagcccctcttcccttcctccattgcacatgaacatatgtccatccatatatattcatcagaatgttaatttattttgctccctctgttaggtccattttctaagggtagaagaggcaagtggtagggatgaggtctgataagaacccagggtggagagggagactcctgggcagccgttttcctcatcctttccctctcccagtccatttccaaatgtggcctccatgtgggtgctagggacatgggaaaaaccactgctatgccatttcttctctctgttcccttcctcacccccgacggtgtggctgatgatgtcttctggtgtcatggtgaccaccccctgttccctgttctggtatttcccctgtcagtttcccctctcggccaggttgtgtcccaaaatcccctcagcctcttctctgcacgttgctgaaggtccaggcttgcctcaagttccatgcttgagcaataaagtggaaacaataaaa

SEQ ID NO: 376656 - DNA, 2885 bp, Homo sapiens
tctctagaaagttctgcaccccgccccctctgtctgcgctcccgctcctcccagcccctccctcgcggcggggcgggaccaatcgctccccgagccgctcctgacccacctaccccagctctcgcgccgcgtgcagaggtgctcaagcctcctcgcggtccgcagtcagtgccgccgcgcccggcctcccgcacgccccgcaggtagcgcccccgcccgcggcccagagtgcgctcgcgccggcaccagctcccggataaacggcgcgccgcgcggagatgacagccgaggagatgaaggcgaccgagagcggggcgcagtcggcgccgctgcccatggagggagtggacatcagccccaaacaggacgaaggcgtgctgaaggtcatcaagagagagggcacaggtacagagatgcccatgattggggaccgagtctttgtccactacactggctggctattagatggcacaaagtttgactccagtctggatcgcaaggacaaattctcctttgacctgggaaaaggggaggtcatcaaggcttgggacattgccatagccaccatgaaggtgggggaggtgtgccacatcacctgcaaaccagaatatgcctacggttcagcaggcagtcctccaaagattccccccaatgccacgcttgtatttgaggtggagttgtttgagtttaagggagaagatctgacggaagaggaagatggcggaatcattcgcagaatacagactcgcggtgaaggctatgctaagcccaatgagggtgctatcgtggaggttgcactggaagggtactacaaggacaagctctttgaccagcgggagctccgctttgagattggcgagggggagaacctggatctgccttatggtctggagagggccattcagcgcatggagaaaggagaacattccatcgtgtacctcaagcccagctatgcttttggcagtgttgggaaggaaaagttccaaatcccaccaaatgctgagctgaaatatgaattacacctcaagagttttgaaaaggccaaggagtcttgggagatgaattcagaagagaagctggaacagagcaccatagtgaaagagcggggcactgtgtacttcaaggaaggtaaatacaagcaagctttactacagtataagaagatcgtgtcttggctggaatatgagtctagtttttccaatgaggaagcacagaaagcacaggcccttcgactggcctctcacctcaacctggccatgtgtcatctgaaactacaggccttctctgctgccattgaaagctgtaacaaggccctagaactggacagcaacaacgagaagggcctcttccgccggggagaggcccacctggccgtgaatgactttgaactggcacgggctgatttccagaaggtcctgcagctctaccccaacaacaaagccgccaagacccagctggctgtgtgccagcagcggatccgaaggcagcttgcccgggagaagaagctctatgccaatatgtttgagaggctggctgaggaggagaacaaggccaaggcagaggcttcctcaggagaccatcccactgacacagagatgaaggaggagcagaagagcaacacggcagggagccagtctcaggtggagacagaagcatagcccctctccaccagccctactcctgcggctgcctgccccccagtctccccactccaccctgttagttttgtaaaaactgaagaattttgagtgaattagacctttatttttctatctggttggatggtggctttaggggaagggggaaaggtgtaggctgggggattgaggtggggaatcattttagctggtgtcagcccctcttcccttcctccattgcacatgaacatatgtccatccatatatattcatcagaatgttaatttattttgctccctctgttaggtccattttctaagggtagaagaggcaagtggtagggatgaggtctgataagaacccagggtggagagggagactcctgggcagccgttttcctcatcctttccctctcccagtccatttccaaatgtggcctccatgtgggtgctagggacatgggaaaaaccactgctatgccatttcttctctctgttcccttcctcacccccgacggtgtggctgatgatgtcttctggtgtcatggtgaccaccccctgttccctgttctggtatttcccctgtcagtttcccctctcggccaggttgtgtcccaaaatcccctcagcctcttctctgcacgttgctgaaggtccaggcttgcctcaagttccatgcttgagcaataaagtggaaacaataaaaaaaaaaaaaaaaaaaaaaaaaaaaaaaaaaaaaaaaaaaaaaaaaaaaaaaaaaaaaaaaaaaaaaaaaaaaaaaaaaaaaaaaaaaaccatcaataaaaaaaacaacaaaacaaaaaaaacaaacaaatcacacacaaaaaaaaagaagaggggggggcgcgaaaaaaacaatcaccgcgggggggccaacaaacaacccaaccacatattttataagaaaagcaagcgcagccccataatagatgcattataaacaaactaacaacgaaccaagcccgacgagcgccgcaaaaaacacatgccctgcatagagaaacacaaccacacccactcctcagtaattctaagcaaacaacaaccccaccttctagggggaggagacagatataagacaacaaccacccacagaaagaatctgccgccgccagaaaaataaacaagcagaggagtagtgagaaccaccaacgccaacgtctgccagccaaagaaacccctgacgagagaatgaaaacaaacacaagcgcgagacataacaggagag

SEQ ID NO: 376657 - DNA, 2657 bp, Homo sapiens
tctctagaaagttctgcaccccgccccctctgtctgcgctcccgctcctcccagcccctccctcgcggcggggcgggaccaatcgctccccgagccgctcctgacccacctaccccagctctcgcgccgcgtgcagaggtgctcaagcctcctcgcggtccgcagtcagtgccgccgcgcccggcctcccgcacgccccgcaggtagcgcccccgcccgcggcccagagtgcgctcgcgccggcaccagctcccggataaacggcgcgccgcgcggagatgacagccgaggagatgaaggcgaccgagagcggggcgcagtcggcgccgctgcccatggagggagtggacatcagccccaaacaggacgaaggcgtgctgaaggtcatcaagagagagggcacaggtacagagatgcccatgattggggaccgagtctttgtccactacactggctggctattagatggcacaaagtttgactccagtctggatcgcaaggacaaattctcctttgacctgggaaaaggggaggtcatcaaggcttgggacattgccatagccaccatgaaggtgggggaggtgtgccacatcacctgcaaaccagaatatgcctacggttcagcaggcagtcctccaaagattccccccaatgccacgcttgtatttgaggtggagttgtttgagtttaagggagaagatctgacggaagaggaagatggcggaatcattcgcagaatacagactcgcggtgaaggctatgctaagcccaatgagggtgctatcgtggaggttgcactggaagggtactacaaggacaagctctttgaccagcgggagctccgctttgagattggcgagggggagaacctggatctgccttatggtctggagagggccattcagcgcatggagaaaggagaacattccatcgtgtacctcaagcccagctatgcttttggcagtgttgggaaggaaaagttccaaatcccaccaaatgctgagctgaaatatgaattacacctcaagagttttgaaaaggccaaggagtcttgggagatgaattcagaagagaagctggaacagagcaccatagtgaaagagcggggcactgtgtacttcaaggaaggtaaatacaagcaagctttactacagtataagaagatcgtgtcttggctggaatatgagtctagtttttccaatgaggaagcacagaaagcacaggcccttcgactggcctctcacctcaacctggccatgtgtcatctgaaactacaggccttctctgctgccattgaaagctgtaacaaggccctagaactggacagcaacaacgagaagggcctcttccgccggggagaggcccacctggccgtgaatgactttgaactggcacgggctgatttccagaaggtcctgcagctctaccccaacaacaaagccgccaagacccagctggctgtgtgccagcagcggatccgaaggcagcttgcccgggagaagaagctctatgccaatatgtttgagaggctggctgaggaggagaacaaggccaaggcagaggcttcctcaggagaccatcccactgacacagagatgaaggaggagcagaagagcaacacggcagggagccagtctcaggtggagacagaagcatagcccctctccaccagccctactcctgcggctgcctgccccccagtctccccactccaccctgttagttttgtaaaaactgaagaattttgagtgaattagacctttatttttctatctggttggatggtggctttaggggaagggggaaaggtgtaggctgggggattgaggtggggaatcattttagctggtgtcagcccctcttcccttcctccattgcacatgaacatatgtccatccatatatattcatcagaatgttaatttattttgctccctctgttaggtccattttctaagggtagaagaggcaagtggtagggatgaggtctgataagaacccagggtggagagggagactcctgggcagccgttttcctcatcctttccctctcccagtccatttccaaatgtggcctccatgtgggtgctagggacatgggaaaaaccactgctatgccatttcttctctctgttcccttcctcacccccgacggtgtggctgatgatgtcttctggtgtcatggtgaccaccccctgttccctgttctggtatttcccctgtcagtttcccctctcggccaggttgtgtcccaaaatcccctcagcctcttctctgcacgttgctgaaggtccaggcttgcctcaagttccatgcttgagcaataaagtggaaacaataaaaaaaaaaaaaaaaaaaaaaaaaaaaaaaaaaaaaaaaggggggggcgcaaaaaattccccccgggggcgcccagcgttttacgccgtgttcacccaagggtcttctttgttttaccaagggtggcgcccccataataggggagacgcctcgtatttaatatagtccgaaggcggcccgctgggcgccgccggttttacacaacggtctcgtcgacgtgggaagaaccctggcctacgttggcgaacccgttgtggggaagagagaaccccttacttctcgggcgggggcgccacattcggggcacaactcactcca

SEQ ID NO: 376658 - DNA, 2889 bp, Homo sapiens
tctctagaaagttctgcaccccgccccctctgtctgcgctcccgctcctcccagcccctccctcgcggcggggcgggaccaatcgctccccgagccgctcctgacccacctaccccagctctcgcgccgcgtgcagaggtgctcaagcctcctcgcggtccgcagtcagtgccgccgcgcccggcctcccgcacgccccgcaggtagcgcccccgcccgcggcccagagtgcgctcgcgccggcaccagctcccggataaacggcgcgccgcgcggagatgacagccgaggagatgaaggcgaccgagagcggggcgcagtcggcgccgctgcccatggagggagtggacatcagccccaaacaggacgaaggcgtgctgaaggtcatcaagagagagggcacaggtacagagatgcccatgattggggaccgagtctttgtccactacactggctggctattagatggcacaaagtttgactccagtctggatcgcaaggacaaattctcctttgacctgggaaaaggggaggtcatcaaggcttgggacattgccatagccaccatgaaggtgggggaggtgtgccacatcacctgcaaaccagaatatgcctacggttcagcaggcagtcctccaaagattccccccaatgccacgcttgtatttgaggtggagttgtttgagtttaagggagaagatctgacggaagaggaagatggcggaatcattcgcagaatacagactcgcggtgaaggctatgctaagcccaatgagggtgctatcgtggaggttgcactggaagggtactacaaggacaagctctttgaccagcgggagctccgctttgagattggcgagggggagaacctggatctgccttatggtctggagagggccattcagcgcatggagaaaggagaacattccatcgtgtacctcaagcccagctatgcttttggcagtgttgggaaggaaaagttccaaatcccaccaaatgctgagctgaaatatgaattacacctcaagagttttgaaaaggccaaggagtcttgggagatgaattcagaagagaagctggaacagagcaccatagtgaaagagcggggcactgtgtacttcaaggaaggtaaatacaagcaagctttactacagtataagaagatcgtgtcttggctggaatatgagtctagtttttccaatgaggaagcacagaaagcacaggcccttcgactggcctctcacctcaacctggccatgtgtcatctgaaactacaggccttctctgctgccattgaaagctgtaacaaggccctagaactggacagcaacaacgagaagggcctcttccgccggggagaggcccacctggccgtgaatgactttgaactggcacgggctgatttccagaaggtcctgcagctctaccccaacaacaaagccgccaagacccagctggctgtgtgccagcagcggatccgaaggcagcttgcccgggagaagaagctctatgccaatatgtttgagaggctggctgaggaggagaacaaggccaaggcagaggcttcctcaggagaccatcccactgacacagagatgaaggaggagcagaagagcaacacggcagggagccagtctcaggtggagacagaagcatagcccctctccaccagccctactcctgcggctgcctgccccccagtctccccactccaccctgttagttttgtaaaaactgaagaattttgagtgaattagacctttatttttctatctggttggatggtggctttaggggaagggggaaaggtgtaggctgggggattgaggtggggaatcattttagctggtgtcagcccctcttcccttcctccattgcacatgaacatatgtccatccatatatattcatcagaatgttaatttattttgctccctctgttaggtccattttctaagggtagaagaggcaagtggtagggatgaggtctgataagaacccagggtggagagggagactcctgggcagccgttttcctcatcctttccctctcccagtccatttccaaatgtggcctccatgtgggtgctagggacatgggaaaaaccactgctatgccatttcttctctctgttcccttcctcacccccgacggtgtggctgatgatgtcttctggtgtcatggtgaccaccccctgttccctgttctggtatttcccctgtcagtttcccctctcggccaggttgtgtcccaaaatcccctcagcctcttctctgcacgttgctgaaggtccaggcttgcctcaagttccatgcttgagcaataaagtggaaacaataaaaaaaaaaaaaaaaaaaaaaaaaaaaaaaaaaaaaaaaaaaaaaaaaaaaaaaaaaaaaaaaaaaaaaaaattaactggcgaaagttaaaaaagatacgcaatgggaaaaaccttgattttaccaaacttattaaacttaggaaaaacccccttatgcccgttcgaataaaactcaaaagcccctaccgaatgaacattcaaaaggtaaattaaactggatggcaaaagggtaaatttaaaggaaaaaaatatggtaaaaatccacataaaatactgtttagaaaattcttttttaaaaccataaagccaaaaaggataaaaccctttatggtaaataggttaaaccgttttaggcttgaagcaattatcatttaggaacagaggccccttaaaagggactaaacttctaacctagagggtggaaaaccccttaattagggaagaggccaaatattgaagcgctccgctgaaaaaatttttgagtttaaggctccaaagaacctttatttaaactttaatgggcccccctttctttggagaggcggtct

SEQ ID NO: 376659 - DNA, 1777 bp, Homo sapiens
ctgctccgccctctctgctgctccccccctctctgctgctccgcccctctctggttcagcaggcagtcctccaaagattccccccaatgccacgcttgtatttgaggtggagttgtttgagtttaagggagaagatctgacggaagaggaagatggcggaatcattcgcagaatacagactcgcggtgaaggctatgctaagcccaatgagggtgctatcgtggaggttgcactggaagggtactacaaggacaagctctttgaccagcgggagctccgctttgagattggcgagggggagaacctggatctgccttatggtctggagagggccattcagcgcatggagaaaggagaacattccatcgtgtacctcaagcccagctatgcttttggcagtgttgggaaggaaaagttccaaatcccaccaaatgctgagctgaaatatgaattacacctcaagagttttgaaaaggccaaggagtcttgggagatgaattcagaagagaagctggaacagagcaccatagtgaaagagcggggcactgtgtacttcaaggaaggtaaatacaagcaagctttactacagtataagaagatcgtgtcttggctggaatatgagtctagtttttccaatgaggaagcacagaaagcacaggcccttcgactggcctctcacctcaacctggccatgtgtcatctgaaactacaggccttctctgctgccattgaaagctgtaacaaggccctagaactggacagcaacaacgagaagggcctcttccgccggggagaggcccacctggccgtgaatgactttgaactggcacgggctgatttccagaaggtcctgcagctctaccccaacaacaaagccgccaagacccagctggctgtgtgccagcagcggatccgaaggcagcttgcccgggagaagaagctctatgccaatatgtttgagaggctggctgaggaggagaacaaggccaaggcagaggcttcctcaggagaccatcccactgacacagagatgaaggaggagcagaagagcaacacggcagggagccagtctcaggtggagacagaagcatagcccctctccaccagccctactcctgcggctgcctgccccccagtctccccactccaccctgttagttttgtaaaaactgaagaattttgagtgaattagacctttatttttctatctggttggatggtggctttaggggaagggggaaaggtgtaggctgggggattgaggtggggaatcattttagctggtgtcagcccctcttcccttcctccattgcacatgaacatatgtccatccatatatattcatcagaatgttaatttattttgctccctctgttaggtccattttctaagggtagaagaggcaagtggtagggatgaggtctgataagaacccagggtggagagggagactcctgggcagccgttttcctcatcctttccctctcccagtccatttccaaatgtggcctccatgtgggtgctagggacatgggaaaaaccactgctatgccatttcttctctctgttcccttcctcacccccgacggtgtggctgatgatgtcttctggtgtcatggtgaccaccccctgttccctgttctggtatttcccctgtcagtttcccctctcggccaggttgtgtcccaaaatcccctcagcctcttctctgcacgttgctgaaggtccaggcttgcctcaagttccatgcttgagcaataaagtggaaacaataaaa

SEQ ID NO: 376660 - DNA, 2363 bp, Homo sapiens
tctctagaaagttctgcaccccgccccctctgtctgcgctcccgctcctcccagcccctccctcgcggcggggcgggaccaatcgctccccgagccgctcctgacccacctaccccagctctcgcgccgcgtgcagaggtgctcaagcctcctcgcggtccgcagtcagtgccgccgcgcccggcctcccgcacgccccgcaggtagcgcccccgcccgcggcccagagtgcgctcgcgccggcaccagctcccggataaacggcgcgccgcgcggagatgacagccgaggagatgaaggcgaccgagagcggggcgcagtcggcgccgctgcccatggagggagtggacatcagccccaaacaggacgaaggcgtgctgaaggtcatcaagagagagggcacaggtacagagatgcccatgattggggaccgagtctttgtccactacactggctggctattagatggcacaaagtttgactccagtctggatcgcaaggacaaattctcctttgacctgggaaaaggggaggtcatcaaggcttgggacattgccatagccaccatgaaggtgggggaggtgtgccacatcacctgcaaaccagaatatgcctacggttcagcaggcagtcctccaaagattccccccaatgccacgcttgtatttgaggtggagttgtttgagtttaagggagaagatctgacggaagaggaagatggcggaatcattcgcagaatacagactcgcggtgaaggctatgctaagcccaatgagggtgctatcgtggaggttgcactggaagggtactacaaggacaagctctttgaccagcgggagctccgctttgagattggcgagggggagaacctggatctgccttatggtctggagagggccattcagcgcatggagaaaggagaacattccatcgtgtacctcaagcccagctatgcttttggcagtgttgggaaggaaaagttccaaatcccaccaaatgctgagctgaaatatgaattacacctcaagagttttgaaaaggccaaggagtcttgggagatgaattcagaagagaagctggaacagagcaccatagtgaaagagcggggcactgtgtacttcaaggaaggtaaatacaagcaagctttactacagtataagaagatcgtgtcttggctggaatatgagtctagtttttccaatgaggaagcacagaaagcacaggcccttcgactggcctctcacctcaacctggccatgtgtcatctgaaactacaggccttctctgctgccattgaaagctgtaacaaggccctagaactggacagcaacaacgagaagggcctcttccgccggggagaggcccacctggccgtgaatgactttgaactggcacgggctgatttccagaaggtcctgcagctctaccccaacaacaaagccgccaagacccagctggctgtgtgccagcagcggatccgaaggcagcttgcccgggagaagaagctctatgccaatatgtttgagaggctggctgaggaggagaacaaggccaaggcagaggcttcctcaggagaccatcccactgacacagagatgaaggaggagcagaagagcaacacggcagggagccagtctcaggtggagacagaagcatagcccctctccaccagccctactcctgcggctgcctgccccccagtctccccactccaccctgttagttttgtaaaaactgaagaattttgagtgaattagacctttatttttctatctggttggatggtggctttaggggaagggggaaaggtgtaggctgggggattgaggtggggaatcattttagctggtgtcagcccctcttcccttcctccattgcacatgaacatatgtccatccatatatattcatcagaatgttaatttattttgctccctctgttaggtccattttctaagggtagaagaggcaagtggtagggatgaggtctgataagaacccagggtggagagggagactcctgggcagccgttttcctcatcctttccctctcccagtccatttccaaatgtggcctccatgtgggtgctagggacatgggaaaaaccactgctatgccatttcttctctctgttcccttcctcacccccgacggtgtggctgatgatgtcttctggtgtcatggtgaccaccccctgttccctgttctggtatttcccctgtcagtttcccctctcggccaggttgtgtcccaaaatcccctcagcctcttctctgcacgttgctgaaggtccaggcttgcctcaagttccatgcttgagcaataaagtggaaacaataaaacctgggtgtcagacaaacctt

SEQ ID NO: 376661 - DNA, 2373 bp, Homo sapiens
tctctagaaagttctgcaccccgccccctctgtctgcgctcccgctcctcccagcccctccctcgcggcggggcgggaccaatcgctccccgagccgctcctgacccacctaccccagctctcgcgccgcgtgcagaggtgctcaagcctcctcgcggtccgcagtcagtgccgccgcgcccggcctcccgcacgccccgcaggtagcgcccccgcccgcggcccagagtgcgctcgcgccggcaccagctcccggataaacggcgcgccgcgcggagatgacagccgaggagatgaaggcgaccgagagcggggcgcagtcggcgccgctgcccatggagggagtggacatcagccccaaacaggacgaaggcgtgctgaaggtcatcaagagagagggcacaggtacagagatgcccatgattggggaccgagtctttgtccactacactggctggctattagatggcacaaagtttgactccagtctggatcgcaaggacaaattctcctttgacctgggaaaaggggaggtcatcaaggcttgggacattgccatagccaccatgaaggtgggggaggtgtgccacatcacctgcaaaccagaatatgcctacggttcagcaggcagtcctccaaagattccccccaatgccacgcttgtatttgaggtggagttgtttgagtttaagggagaagatctgacggaagaggaagatggcggaatcattcgcagaatacagactcgcggtgaaggctatgctaagcccaatgagggtgctatcgtggaggttgcactggaagggtactacaaggacaagctctttgaccagcgggagctccgctttgagattggcgagggggagaacctggatctgccttatggtctggagagggccattcagcgcatggagaaaggagaacattccatcgtgtacctcaagcccagctatgcttttggcagtgttgggaaggaaaagttccaaatcccaccaaatgctgagctgaaatatgaattacacctcaagagttttgaaaaggccaaggagtcttgggagatgaattcagaagagaagctggaacagagcaccatagtgaaagagcggggcactgtgtacttcaaggaaggtaaatacaagcaagctttactacagtataagaagatcgtgtcttggctggaatatgagtctagtttttccaatgaggaagcacagaaagcacaggcccttcgactggcctctcacctcaacctggccatgtgtcatctgaaactacaggccttctctgctgccattgaaagctgtaacaaggccctagaactggacagcaacaacgagaagggcctcttccgccggggagaggcccacctggccgtgaatgactttgaactggcacgggctgatttccagaaggtcctgcagctctaccccaacaacaaagccgccaagacccagctggctgtgtgccagcagcggatccgaaggcagcttgcccgggagaagaagctctatgccaatatgtttgagaggctggctgaggaggagaacaaggccaaggcagaggcttcctcaggagaccatcccactgacacagagatgaaggaggagcagaagagcaacacggcagggagccagtctcaggtggagacagaagcatagcccctctccaccagccctactcctgcggctgcctgccccccagtctccccactccaccctgttagttttgtaaaaactgaagaattttgagtgaattagacctttatttttctatctggttggatggtggctttaggggaagggggaaaggtgtaggctgggggattgaggtggggaatcattttagctggtgtcagcccctcttcccttcctccattgcacatgaacatatgtccatccatatatattcatcagaatgttaatttattttgctccctctgttaggtccattttctaagggtagaagaggcaagtggtagggatgaggtctgataagaacccagggtggagagggagactcctgggcagccgttttcctcatcctttccctctcccagtccatttccaaatgtggcctccatgtgggtgctagggacatgggaaaaaccactgctatgccatttcttctctctgttcccttcctcacccccgacggtgtggctgatgatgtcttctggtgtcatggtgaccaccccctgttccctgttctggtatttcccctgtcagtttcccctctcggccaggttgtgtcccaaaatcccctcagcctcttctctgcacgttgctgaaggtccaggcttgcctcaagttccatgcttgagcaataaagtggaaacaataaaattttaatttatttccccccaatctttccctt

SEQ ID NO: 376662 - DNA, 2286 bp, Homo sapiens
tctctagaaagttctgcaccccgccccctctgtctgcgctcccgctcctcccagcccctccctcgcggcggggcgggaccaatcgctccccgagccgctcctgacccacctaccccagctctcgcgccgcgtgcagaggtgctcaagcctcctcgcggtccgcagtcagtgccgccgcgcccggcctcccgcacgccccgcaggtagcgcccccgcccgcggcccagagtgcgctcgcgccggcaccagctcccggataaacggcgcgccgcgcggagatgacagccgaggagatgaaggcgaccgagagcggggcgcagtcggcgccgctgcccatggagggagtggacatcagccccaaacaggacgaaggcgtgctgaaggtcatcaagagagagggcacaggtacagagatgcccatgattggggaccgagtctttgtccactacactggctggctattagatggcacaaagtttgactccagtctggatcgcaaggacaaattctcctttgacctgggaaaaggggaggtcatcaaggcttgggacattgccatagccaccatgaaggtgggggaggtgtgccacatcacctgcaaaccagaatatgcctacggttcagcaggcagtcctccaaagattccccccaatgccacgcttgtatttgaggtggagttgtttgagtttaagggagaagatctgacggaagaggaagatggcggaatcattcgcagaatacagactcgcggtgaaggctatgctaagcccaatgagggtgctatcgtggaggttgcactggaagggtactacaaggacaagctctttgaccagcgggagctccgctttgagattggcgagggggagaacctggatctgccttatggtctggagagggccattcagcgcatggagaaaggagaacattccatcgtgtacctcaagcccagctatgcttttggcagtgttgggaaggaaaagttccaaatcccaccaaatgctgagctgaaatatgaattacacctcaagagttttgaaaaggccaaggagtcttgggagatgaattcagaagagaagctggaacagagcaccatagtgaaagagcggggcactgtgtacttcaaggaaggtaaatacaagcaagctttactacagtataagaagatcgtgtcttggctggaatatgagtctagtttttccaatgaggaagcacagaaagcacaggcccttcgactggcctctcacctcaacctggccatgtgtcatctgaaactacaggccttctctgctgccattgaaagctgtaacaaggccctagaactggacagcaacaacgagaagggcctcttccgccggggagaggcccacctggccgtgaatgactttgaactggcacgggctgatttccagaaggtcctgcagctctaccccaacaacaaagccgccaagacccagctggctgtgtgccagcagcggatccgaaggcagcttgcccgggagaagaagctctatgccaatatgtttgagaggctggctgaggaggagaacaaggccaaggcagaggcttcctcaggagaccatcccactgacacagagatgaaggaggagcagaagagcaacacggcagggagccagtctcaggtggagacagaagcatagcccctctccaccagccctactcctgcggctgcctgccccccagtctccccactccaccctgttagttttgtaaaaactgaagaattttgagtgaattagacctttatttttctatctggttggatggtggctttaggggaagggggaaaggtgtaggctgggggattgaggtggggaatcattttagctggtgtcagcccctcttcccttcctccattgcacatgaacatatgtccatccatatatattcatcagaatgttaatttattttgctccctctgttaggtccattttctaagggtagaagaggcaagtggtagggatgaggtctgataagaacccagggtggagagggagactcctgggcagccgttttcctcatcctttccctctcccagtccatttccaaatgtggcctccatgtgggtgctagggacatgggaaaaaccactgctatgccatttcttctctctgttcccttcctcacccccgacggtgtggctgatgatgtcttctggtgtcatggtgaccaccccctgttccctgttctggtatttcccctgtcagtttcccctctcggccaggttgtgtcccaaaatcccctcagcataatcctcggacgttgcta

SEQ ID NO: 376663 - DNA, 1640 bp, Homo sapiens
  misc_feature (15)..(15): n is a, c, g, or t
atttcgcattcgagnctcggtaccccaagcagttaatacagactcacggtgaaggctatgctaagcccaatgagggtgctatcgtggaggttgcactggaagggtactacaaggacaagctctttgaccagcgggagctccgctttgagattggcgagggggagaacctggatctgccttatggtctggagagggccattcagcgcatggagaaaggagaacattccatcgtgtacctcaagcccagctatgcttttggcagtgttgggaaggaaaagttccaaatcccaccaaatgctgagctgaaatatgaattacacctcaagagttttgaaaaggccaaggagtcttgggagatgaattcagaagagaagctggaacagagcaccatagtgaaagagcggggcactgtgtacttcaaggaaggtaaatacaagcaagctttactacagtataagaagatcgtgtcttggctggaatatgagtctagtttttccaatgaggaagcacagaaagcacaggcccttcgactggcctctcacctcaacctggccatgtgtcatctgaaactacaggccttctctgctgccattgaaagctgtaacaaggccctagaactggacagcaacaacgagaagggcctcttccgccggggagaggcccacctggccgtgaatgactttgaactggcacgggctgatttccagaaggtcctgcagctctaccccaacaacaaagccgccaagacccagctggctgtgtgccagcagcggatccgaaggcagcttgcccgggagaagaagctctatgccaatatgtttgagaggctggctgaggaggagaacaaggccaaggcagaggcttcctcaggagaccatcccactgacacagagatgaaggaggagcagaagagcaacacggcagggagccagtctcaggtggagacagaagcatagcccctctccaccagccctactcctgcggctgcctgccccccagtctccccactccaccctgttagttttgtaaaaactgaagaattttgagtgaattagacctttatttttctatctggttggatggtggctttaggggaagggggaaaggtgtaggctgggggattgaggtggggaatcattttagctggtgtcagcccctcttcccttcctccattgcacatgaacatatgtccatccatatatattcatcagaatgttaatttattttgctccctctgttaggtccattttctaagggtagaagaggcaagtggtagggatgaggtctgataagaacccagggtggagagggagactcctgggcagccgttttcctcatcctttccctctcccagtccatttccaaatgtggcctccatgtgggtgctagggacatgggaaaaaccactgctatgccatttcttctctctgttcccttcctcacccccgacggtgtggctgatgatgtcttctggtgtcatggtgaccaccccctgttccctgttctggtatttcccctgtcagtttcccctctcggccaggttgtgtcccaaaatcccctcagcctcttctctgcacgttgctgaaggtccaggcttgcctcaagttccatgcttgagcaataaagtggaaacaataaaa

SEQ ID NO: 376664 - DNA, 1625 bp, Homo sapiens
  misc_feature (22)..(22): n is a, c, g, or t
  misc_feature (27)..(27): n is a, c, g, or t
ctccgtaacccagcacggttanacagnctcacggtgaaggctatgctaagcccaatgagggtgctatcgtggaggttgcactggaagggtactacaaggacaagctctttgaccagcgggagctccgctttgagattggcgagggggagaacctggatctgccttatggtctggagagggccattcagcgcatggagaaaggagaacattccatcgtgtacctcaagcccagctatgcttttggcagtgttgggaaggaaaagttccaaatcccaccaaatgctgagctgaaatatgaattacacctcaagagttttgaaaaggccaaggagtcttgggagatgaattcagaagagaagctggaacagagcaccatagtgaaagagcggggcactgtgtacttcaaggaaggtaaatacaagcaagctttactacagtataagaagatcgtgtcttggctggaatatgagtctagtttttccaatgaggaagcacagaaagcacaggcccttcgactggcctctcacctcaacctggccatgtgtcatctgaaactacaggccttctctgctgccattgaaagctgtaacaaggccctagaactggacagcaacaacgagaagggcctcttccgccggggagaggcccacctggccgtgaatgactttgaactggcacgggctgatttccagaaggtcctgcagctctaccccaacaacaaagccgccaagacccagctggctgtgtgccagcagcggatccgaaggcagcttgcccgggagaagaagctctatgccaatatgtttgagaggctggctgaggaggagaacaaggccaaggcagaggcttcctcaggagaccatcccactgacacagagatgaaggaggagcagaagagcaacacggcagggagccagtctcaggtggagacagaagcatagcccctctccaccagccctactcctgcggctgcctgccccccagtctccccactccaccctgttagttttgtaaaaactgaagaattttgagtgaattagacctttatttttctatctggttggatggtggctttaggggaagggggaaaggtgtaggctgggggattgaggtggggaatcattttagctggtgtcagcccctcttcccttcctccattgcacatgaacatatgtccatccatatatattcatcagaatgttaatttattttgctccctctgttaggtccattttctaagggtagaagaggcaagtggtagggatgaggtctgataagaacccagggtggagagggagactcctgggcagccgttttcctcatcctttccctctcccagtccatttccaaatgtggcctccatgtgggtgctagggacatgggaaaaaccactgctatgccatttcttctctctgttcccttcctcacccccgacggtgtggctgatgatgtcttctggtgtcatggtgaccaccccctgttccctgttctggtatttcccctgtcagtttcccctctcggccaggttgtgtcccaaaatcccctcagcctcttctctgcacgttgctgaaggtccaggcttgcctcaagttccatgcttgagcaataaagtggaaacaataaaa

SEQ ID NO: 376665 - DNA, 2000 bp, Homo sapiens
tctctagaaagttctgcaccccgccccctctgtctgcgctcccgctcctcccagcccctccctcgcggcggggcgggaccaatcgctccccgagccgctcctgacccacctaccccagctctcgcgccgcgtgcagaggtgctcaagcctcctcgcggtccgcagtcagtgccgccgcgcccggcctcccgcacgccccgcaggtagcgcccccgcccgcggcccagagtgcgctcgcgccggcaccagctcccggataaacggcgcgccgcgcggagatgacagccgaggagatgaaggcgaccgagagcggggcgcagtcggcgccgctgcccatggagggagtggacatcagccccaaacaggacgaaggcgtgctgaaggtcatcaagagagagggcacaggtacagagatgcccatgattggggaccgagtctttgtccactacactggctggctattagatggcacaaagtttgactccagtctggatcgcaaggacaaattctcctttgacctgggaaaaggggaggtcatcaaggcttgggacattgccatagccaccatgaaggtgggggaggtgtgccacatcacctgcaaaccagaatatgcctacggttcagcaggcagtcctccaaagattccccccaatgccacgcttgtatttgaggtggagttgtttgagtttaagggagaagatctgacggaagaggaagatggcggaatcattcgcagaatacagactcgcggtgaaggctatgctaagcccaatgagggtgctatcgtggaggttgcactggaagggtactacaaggacaagctctttgaccagcgggagctccgctttgagattggcgagggggagaacctggatctgccttatggtctggagagggccattcagcgcatggagaaaggagaacattccatcgtgtacctcaagcccagctatgcttttggcagtgttgggaaggaaaagttccaaatcccaccaaatgctgagctgaaatatgaattacacctcaagagttttgaaaaggccaaggagtcttgggagatgaattcagaagagaagctggaacagagcaccatagtgaaagagcggggcactgtgtacttcaaggaaggtaaatacaagcaagctttactacagtataagaagctctatgccaatatgtttgagaggctggctgaggaggagaacaaggccaaggcagaggcttcctcaggagaccatcccactgacacagagatgaaggaggagcagaagagcaacacggcagggagccagtctcaggtggagacagaagcatagcccctctccaccagccctactcctgcggctgcctgccccccagtctccccactccaccctgttagttttgtaaaaactgaagaattttgagtgaattagacctttatttttctatctggttggatggtggctttaggggaagggggaaaggtgtaggctgggggattgaggtggggaatcattttagctggtgtcagcccctcttcccttcctccattgcacatgaacatatgtccatccatatatattcatcagaatgttaatttattttgctccctctgttaggtccattttctaagggtagaagaggcaagtggtagggatgaggtctgataagaacccagggtggagagggagactcctgggcagccgttttcctcatcctttccctctcccagtccatttccaaatgtggcctccatgtgggtgctagggacatgggaaaaaccactgctatgccatttcttctctctgttcccttcctcacccccgacggtgtggctgatgatgtcttctggtgtcatggtgaccaccccctgttccctgttctggtatttcccctgtcagtttcccctctcggccaggttgtgtcccaaaatcccctcagcctcttctctgcacgttgctgaaggtccaggcttgcctcaagttccatgcttgagcaataaagtggaaacaataaaa

SEQ ID NO: 376666 - DNA, 1757 bp, Homo sapiens
tctctagaaagttctgcaccccgccccctctgtctgcgctcccgctcctcccagcccctccctcgcggcggggcgggaccaatcgctccccgagccgctcctgacccacctaccccagctctcgcgccgcgtgcagaggtgctcaagcctcctcgcggtccgcagtcagtgccgccgcgcccggcctcccgcacgccccgcaggtagcgcccccgcccgcggcccagagtgcgctcgcgccggcaccagctcccggataaacggcgcgccgcgcggagatgacagccgaggagatgaaggcgaccgagagcggggcgcagtcggcgccgctgcccatggagggagtggacatcagccccaaacaggacgaaggcgtgctgaaggtcatcaagagagagggcacaggtacagagatgcccatgattggggaccgagtctttgtccactacactggctggctattagatggcacaaagtttgactccagtctggatcgcaaggacaaattctcctttgacctgggaaaaggggaggtcatcaaggcttgggacattgccatagccaccatgaaggtgggggaggtgtgccacatcacctgcaaaccagaatatgcctacggttcagcaggcagtcctccaaagattccccccaatgccacgcttgtatttgaggtggagttgtttgagtttaagggagaagatctgacggaagaggaagatggcggaatcattcgcagaatacagactcgcggtgaaggctatgctaagcccaatgagggtgctatcgtggaggttgcactggaagggtactacaaggacaagctctttgaccagcgggagctccgctttgagattggcgagggggagaacctggatctgccttatggtctggagagggccattcagcgcatggagaaaggagaacattccatcgtgtacctcaagcccagctatgcttttggcagtgttgggaaggaaaagttccaaatcccaccaaatgctgagctgaaatatgaattacacctcaagagttttgaaaaggccaaggagtcttgggagatgaattcagaagagaagctggaacagagcaccatagtgaaagagcggggcactgtgtacttcaaggaaggtaaatacaagcaagctttactacagtataagaagatcgtgtcttggctggaatatgagtctagtttttccaatgaggaagcacagaaagcacaggcccttcgactggcctctcacctcaacctggccatgtgtcatctgaaactacaggccttctctgctgccattgaaagctgtaacaaggccctagaactggacagcaacaacgagaagggcctcttccgccggggagaggcccacctggccgtgaatgactttgaactggcacgggctgatttccagaaggtcctgcagctctaccccaacaacaaagccgccaagacccagctggctgtgtgccagcagcggatccgaaggcagcttgcccgggagaagaagctctatgccaatatgtttgagaggctggctgaggaggagaacaaggccaaggcagaggcttcctcaggagaccatcccactgacacagagatgaaggaggagcagaagagcaacacggcagggagccagtctcaggtggagacagaagcatagcccctctccaccagccctactcctgcggctgcctgcccccccctctgtgctgtccagcctcttgtgctgtccagccccctgtgtcctcctctgtgctgt

SEQ ID NO: 376667 - DNA, 1925 bp, Homo sapiens
tctctagaaagttctgcaccccgccccctctgtctgcgctcccgctcctcccagcccctccctcgcggcggggcgggaccaatcgctccccgagccgctcctgacccacctaccccagctctcgcgccgcgtgcagaggtgctcaagcctcctcgcggtccgcagtcagtgccgccgcgcccggcctcccgcacgccccgcaggtagcgcccccgcccgcggcccagagtgcgctcgcgccggcaccagctcccggataaacggcgcgccgcgcggagatgacagccgaggagatgaaggcgaccgagagcggggcgcagtcggcgccgctgcccatggagggagtggacatcagccccaaacaggacgaaggcgtgctgaaggtcatcaagagagagggcacaggtacagagatgcccatgattggggaccgagtctttgtccactacactggctggctattagatggcacaaagtttgactccagtctggatcgcaaggacaaattctcctttgacctgggaaaaggggaggtcatcaaggcttgggacattgccatagccaccatgaaggtgggggaggtgtgccacatcacctgcaaaccagaatatgcctacggttcagcaggcagtcctccaaagattccccccaatgccacgcttgtatttgaggtggagttgtttgagtttaagggagaagatctgacggaagaggaagatggcggaatcattcgcagaatacagactcgcggtgaaggctatgctaagcccaatgagggtgctatcgtggaggttgcactggaagggtactacaaggacaagctctttgaccagcgggagctccgctttgagattggcgagggggagaacctggatctgccttatggtctggagagggccattcagcgcatggagaaaggagaacattccatcgtgtacctcaagcccagctatgcttttggcagtgttgggaaggaaaagttccaaatcccaccaaatgctgagctgaaatatgaattacacctcaagagttttgaaaaggccaaggagtcttgggagatgaattcagaagagaagctggaacagagcaccatagtgaaagagcggggcactgtgtacttcaaggaaggtaaatacaagcaagctttactacagtataagaagatcgtgtcttggctggaatatgagtctagtttttccaatgaggaagcacagaaagcacaggcccttcgactggcctctcacctcaacctggccatgtgtcatctgaaactacaggccttctctgctgccattgaaagctgtaacaaggccctagaactggacagcaacaacgagaagggcctcttccgccggggagaggcccacctggccgtgaatgactttgaactggcacgggctgatttccagaaggtcctgcagctctaccccaacaacaaagccgccaagacccagctggctgtgtgccagcagcggatccgaaggcagcttgcccgggagaagaagctctatgccaatatgtttgagaggctggctgaggaggagaacaaggccaaggcagaggcttcctcaggagaccatcccactgacacagagatgaaggaggagcagccgttttcctcatcctttccctctcccagtccatttccaaatgtggcctccatgtgggtgctagggacatgggaaaaaccactgctatgccatttcttctctctgttcccttcctcacccccgacggtgtggctgatgatgtcttctggtgtcatggtgaccaccccctgttccctgttctggtatttcccctgtcagtttcccctctcggccaggttgtgtcccaaaatcccctcagcctcttctctgcacgttgctgaaggtccaggcttgcctcaagttccatgcttgagcaataaagtggaaacaataaaa

SEQ ID NO: 376668 - DNA, 1281 bp, Homo sapiens
ctccctgccgtgttgctcttctgctcctccttcatccctgtgtcagtgggatggtctcctgaggaagcctctgccttggccttgttctcctcctcagccagcctctcaagcatattggaatatgagtctagtttttccaatgaggaagcacagaaagcacaggcccttcgactggcctctcacctcaacctggccatgtgtcatctgaaactacaggccttctctgctgccattgaaagctgtaacaaggccctagaactggacagcaacaacgagaagggcctcttccgccggggagaggcccacctggccgtgaatgactttgaactggcacgggctgatttccagaaggtcctgcagctctaccccaacaacaaagccgccaagacccagctggctgtgtgccagcagcggatccgaaggcagcttgcccgggagaagaagctctatgccaatatgtttgagaggctggctgaggaggagaacaaggccaaggcagaggcttcctcaggagaccatcccactgacacagagatgaaggaggagcagaagagcaacacggcagggagccagtctcaggtggagacagaagcatagcccctctccaccagccctactcctgcggctgcctgccccccagtctccccactccaccctgttagttttgtaaaaactgaagaattttgagtgaattagacctttatttttctatctggttggatggtggctttaggggaagggggaaaggtgtaggctgggggattgaggtggggaatcattttagctggtgtcagcccctcttcccttcctccattgcacatgaacatatgtccatccatatatattcatcagaatgttaatttattttgctccctctgttaggtccattttctaagggtagaagaggcaagtggtagggatgaggtctgataagaacccagggtggagagggagactcctgggcagccgttttcctcatcctttccctctcccagtccatttccaaatgtggcctccatgtgggtgctagggacatgggaaaaaccactgctatgccatttcttctctctgttcccttcctcacccccgacggtgtggctgatgatgtcttctggtgtcatggtgaccaccccctgttccctgttctggtatttcccctgtcagtttcccctctcggccaggttgtgtcccaaaatcccctcagcctcttctctgcacgttgctgaaggtccaggcttgcctcaagttccatgcttgagcaataaagtggaaacaataaaa

SEQ ID NO: 376669 - DNA, 1581 bp, Homo sapiens
tctctagaaagttctgcaccccgccccctctgtctgcgctcccgctcctcccagcccctccctcgcggcggggcgggaccaatcgctccccgagccgctcctgacccacctaccccagctctcgcgccgcgtgcagaggtgctcaagcctcctcgcggtccgcagtcagtgccgccgcgcccggcctcccgcacgccccgcaggtagcgcccccgcccgcggcccagagtgcgctcgcgccggcaccagctcccggataaacggcgcgccgcgcggagatgacagccgaggagatgaaggcgaccgagagcggggcgcagtcggcgccgctgcccatggagggagtggacatcagccccaaacaggacgaaggcgtgctgaaggtcatcaagagagagggcacaggtacagagatgcccatgattggggaccgagtctttgtccactacactggctggctattagatggcacaaagtttgactccagtctggatcgcaaggacaaattctcctttgacctgggaaaaggggaggtcatcaaggcttgggacattgccatagccaccatgaaggtgggggaggtgtgccacatcacctgcaaaccagaatatgcctacggttcagcaggcagtcctccaaagattccccccaatgccacgcttgtatttgaggtggagttgtttgagtttaagggagaagatctgacggaagaggaagatggcggaatcattcgcagaatacagactcgcggtgaaggctatgctaagcccaatgagggtgctatcgtggaggttgcactggaagggtactacaaggacaagctctttgaccagcgggagctccgctttgagattggcgagggggagaacctggatctgccttatggtctggagagggccattcagcgcatggagaaaggagaacattccatcgtgtacctcaagcccagctatgcttttggcagtgttgggaaggaaaagttccaaatcccaccaaatgctgagctgaaatatgaattacacctcaagagttttgaaaaggccaaggagtcttgggagatgaattcagaagagaagctggaacagagcaccatagtgaaagagcggggcactgtgtacttcaaggaaggtaaatacaagcaagctttactacagtataagaagatcgtgtcttggctggaatatgagtctagtttttccaatgaggaagcacagaaagcacaggcccttcgactggcctctcacctcaacctggccatgtgtcatctgaaactacaggccttctctgctgccattgaaagctgtaacaaggccctagaactggacagcaacaacgagaagggcctcttccgccggggagaggcccacctggccgtgaatgactttgaactggcacgggctgatttccagaaggtcctgcagctctaccccaacaacaaagccgccaagacccagctggctgtgtgccagcagcggatccgaaggcagcttgcccgggagaagaagctcttctctgcacgttgctgaaggtccaggcttgcctcaagttccatgcttgagcaataaagtggaaacaataaaa

SEQ ID NO: 376670 - DNA, 1353 bp, Homo sapiens
tctctagaaagttctgcaccccgccccctctgtctgcgctcccgctcctcccagcccctccctcgcggcggggcgggaccaatcgctccccgagccgctcctgacccacctaccccagctctcgcgccgcgtgcagaggtgctcaagcctcctcgcggtccgcagtcagtgccgccgcgcccggcctcccgcacgccccgcaggtagcgcccccgcccgcggcccagagtgcgctcgcgccggcaccagctcccggataaacggcgcgccgcgcggagatgacagccgaggagatgaaggcgaccgagagcggggcgcagtcggcgccgctgcccatggagggagtggacatcagccccaaacaggacgaaggcgtgctgaaggtcatcaagagagagggcacaggtacagagatgcccatgattggggaccgagtctttgtccactacactggctggctattagatggcacaaagtttgactccagtctggatcgcaaggacaaattctcctttgacctgggaaaaggggaggtcatcaaggcttgggacattgccatagccaccatgaaggtgggggaggtgtgccacatcacctgcaaaccagaatatgcctacggttcagcaggcagtcctccaaagattccccccaatgccacgcttgtatttgaggtggagttgtttgagtttaagggagaagatctgacggaagaggaagatggcggaatcattcgcagaatacagactcgcggtgaaggctatgctaagcccaatgagggtgctatcgtggaggttgcactggaagggtactacaaggacaagctctttgaccagcgggagctccgctttgagattggcgagggggagaacctggatctgccttatggtctggagagggccattcagcgcatggagaaaggagaacattccatcgtgtacctcaagcccagctatgcttttggcagtgttgggaaggaaaagttccaaatcccaccaaatgctgagctgaaatatgaattacacctcaagagttttgaaaaggccaaggagtcttgggagatgaattcagaagagaagctggaacagagcaccatagtgaaagagcggggcactgtgtacttcaaggaaggtaaatacaagcaagctttactacagtataagaagatcgtgtcttggctggaatatgagtctagtttttccaatgaggaagcacagaaagcacaggcccttcgactggcctctcacctcaacctggccatgtgtcatctgaaactacaggccttctctgctgccattgaaagctgtaacaaggccctagaacagacaagaacacacgccagccaagaacacaggt

SEQ ID NO: 376671 - DNA, 1312 bp, Homo sapiens
tctctagaaagttctgcaccccgccccctctgtctgcgctcccgctcctcccagcccctccctcgcggcggggcgggaccaatcgctccccgagccgctcctgacccacctaccccagctctcgcgccgcgtgcagaggtgctcaagcctcctcgcggtccgcagtcagtgccgccgcgcccggcctcccgcacgccccgcaggtagcgcccccgcccgcggcccagagtgcgctcgcgccggcaccagctcccggataaacggcgcgccgcgcggagatgacagccgaggagatgaaggcgaccgagagcggggcgcagtcggcgccgctgcccatggagggagtggacatcagccccaaacaggacgaaggcgtgctgaaggtcatcaagagagagggcacaggtacagagatgcccatgattggggaccgagtctttgtccactacactggctggctattagatggcacaaagtttgactccagtctggatcgcaaggacaaattctcctttgacctgggaaaaggggaggtcatcaaggcttgggacattgccatagccaccatgaaggtgggggaggtgtgccacatcacctgcaaaccagaatatgcctacggttcagcaggcagtcctccaaagattccccccaatgccacgcttgtatttgaggtggagttgtttgagtttaagggagaagatctgacggaagaggaagatggcggaatcattcgcagaatacagactcgcggtgaaggctatgctaagcccaatgagggtgctatcgtggaggttgcactggaagggtactacaaggacaagctctttgaccagcgggagctccgctttgagattggcgagggggagaacctggatctgccttatggtctggagagggccattcagcgcatggagaaaggagaacattccatcgtgtacctcaagcccagctatgcttttggcagtgttgggaaggaaaagttccaaatcccaccaaatgctgagctgaaatatgaattacacctcaagagttttgaaaaggccaaggagtcttgggagatgaattcagaagagaagctggaacagagcaccatagtgaaagagcggggcactgtgtacttcaaggaaggtaaatacaagcaagctttactacagtataagaagatcgtgtcttggctggaatatgagtctagtttttccaatgaggaagcacagaaagcacaggcccttcgactggcctctcacctcaacctggccatgtgtcatctgaaactacaggccttctctgctggataccgggaactctagtcacc

SEQ ID NO: 376672 - DNA, 1219 bp, Homo sapiens
tctctagaaagttctgcaccccgccccctctgtctgcgctcccgctcctcccagcccctccctcgcggcggggcgggaccaatcgctccccgagccgctcctgacccacctaccccagctctcgcgccgcgtgcagaggtgctcaagcctcctcgcggtccgcagtcagtgccgccgcgcccggcctcccgcacgccccgcaggtagcgcccccgcccgcggcccagagtgcgctcgcgccggcaccagctcccggataaacggcgcgccgcgcggagatgacagccgaggagatgaaggcgaccgagagcggggcgcagtcggcgccgctgcccatggagggagtggacatcagccccaaacaggacgaaggcgtgctgaaggtcatcaagagagagggcacaggtacagagatgcccatgattggggaccgagtctttgtccactacactggctggctattagatggcacaaagtttgactccagtctggatcgcaaggacaaattctcctttgacctgggaaaaggggaggtcatcaaggcttgggacattgccatagccaccatgaaggtgggggaggtgtgccacatcacctgcaaaccagaatatgcctacggttcagcaggcagtcctccaaagattccccccaatgccacgcttgtatttgaggtggagttgtttgagtttaagggagaagatctgacggaagaggaagatggcggaatcattcgcagaatacagactcgcggtgaaggctatgctaagcccaatgagggtgctatcgtggaggttgcactggaagggtactacaaggacaagctctttgaccagcgggagctccgctttgagattggcgagggggagaacctggatctgccttatggtctggagagggccattcagcgcatggagaaaggagaacattccatcgtgtacctcaagcccagctatgcttttggcagtgttgggaaggaaaagttccaaatcccaccaaatgctgagctgaaatatgaattacacctcaagagttttgaaaaggccaaggagtcttgggagatgaattcagaagagaagctggaacagagcaccatagtgaaagagcggggcactgtgtacttcaaggaaggtaaatacaagcaagctttactacagtataagaagatcgtgtcttggctggaatatgagtctgtaataactgcttgggtccactatttcct

SEQ ID NO: 376673 - DNA, 1219 bp, Homo sapiens
tctctagaaagttctgcaccccgccccctctgtctgcgctcccgctcctcccagcccctccctcgcggcggggcgggaccaatcgctccccgagccgctcctgacccacctaccccagctctcgcgccgcgtgcagaggtgctcaagcctcctcgcggtccgcagtcagtgccgccgcgcccggcctcccgcacgccccgcaggtagcgcccccgcccgcggcccagagtgcgctcgcgccggcaccagctcccggataaacggcgcgccgcgcggagatgacagccgaggagatgaaggcgaccgagagcggggcgcagtcggcgccgctgcccatggagggagtggacatcagccccaaacaggacgaaggcgtgctgaaggtcatcaagagagagggcacaggtacagagatgcccatgattggggaccgagtctttgtccactacactggctggctattagatggcacaaagtttgactccagtctggatcgcaaggacaaattctcctttgaccaccccctgttccctgttctggtatttcccctgtcagtttcccctctcggccaggttgtgtcccaaaatcccctcagcctcttctctgcacgttgctgaaggtccaggcttgcctcaagttccatgcttgagcaataaagtggaaacaataaaaaaaaaaaaaaaaaaaaaaaaaaaaaaaaaaaaaaaaaaaaaaaaaaaaaaaaaaaaaaaaaaaaaaaaattaactggcgaaagttaaaaaagatacgcaatgggaaaaaccttgattttaccaaacttattaaacttaggaaaaacccccttatgcccgttcgaataaaactcaaaagcccctaccgaatgaacattcaaaaggtaaattaaactggatggcaaaagggtaaatttaaaggaaaaaaatatggtaaaaatccacataaaatactgtttagaaaattcttttttaaaaccataaagccaaaaaggataaaaccctttatggtaaataggttaaaccgttttaggcttgaagcaattatcatttaggaacagaggccccttaaaagggactaaacttctaacctagagggtggaaaaccccttaattagggaagaggccaaatattgaagcgctccgctgaaaaaatttttgagtttaaggctccaaagaacctttatttaaactttaatgggcccccctttctttggagaggcggtct

SEQ ID NO: 376674 - DNA, 729 bp, Homo sapiens
tctctagaaagttctgcaccccgccccctctgtctgcgctcccgctcctcccagcccctccctcgcggcggggcgggaccaatcgctccccgagccgctcctgacccacctaccccagctctcgcgccgcgtgcagaggtgctcaagcctcctcgcggtccgcagtcagtgccgccgcgcccggcctcccgcacgccccgcaggtagcgcccccgcccgcggcccagagtgcgctcgcgccggcaccagctcccggataaacggcgcgccgcgcggagatgacagccgaggagatgaaggcgaccgagagcggggcgcagtcggcgccgctgcccatggagggagtggacatcagccccaaacaggacgaaggcgtgctgaagattattggggacctcaagcgtctgctccagcggctctcctgtggcatgtgacttccccttctcgctccagcgtcctgccgttttctacgagattgttattcaggtcatcaagagagagggcacaggtacagagatgcccatgattggggaccgagtctttgtccactacactggctggctattagatggcacaaagtttgactccagtctggatcgcaaggacaaattctcctttgacctgggaaaaggaggggaggtcatcaaggcttgggacattgccatagccaccatgaaggtgggggaggtagcactctgtttgtggagtagcactgacgactcctctaga

SEQ ID NO: 376675 - DNA, 1020 bp, Homo sapiens
cccagcggagctgccagccgcgggccgcctcgttggtggcggtgccagggctcgcccacccgggcggtggaacacgggccaggacggggagcgactccccacagtgctttcctggcccttcggcctttgtgcgacgcaggcgcgacagggttccggcgccctcccggggtcccctgccgacgccgggacccagcgaggtccccactcgccgcgcggcgccccctccctcggccccggggaggccgggcgcggggcatgccgggagctgtagtcccctcccccctccgccgcctcccggagccagggctgcggggtgtggggcggggaggaggcgctctgctgtggagcctgccgccgagtgaccgctcgactacaaatagcctggggagctgcggggagggcatcttgacctgggccaggacaacctgccttgggtcggagcaggttccagggagaatcagagatggtgaattcccagcctgcgtcttatgccttctccccatccgctgctgcgtcctcatcctggcttcccaccgctgagctccgcgtgtgcggcacccacctcagggggcctttacctggtccagaagtgcatctgtctttgcaccagattattggggacctcaagcgtctgctccagcggctctcctgtggcatgtgacttccccttctcgctccagcgtcctgccgttttctacgagattgttattccaggaaagctcatttcccctttgatccatcattccttcccttttacctttctactcctcaaagcccctgtctattcttcgtggaagctttcccttggagggtaaccacacacctaccaggtggcgctaaagaagcctttacgtttctgggaaatactccagccctggactaactaccagaggaatactcagctcccaagtcagagtttaaggtcccatggagagcctccgggttcacctataacctggtttcttccttacctgttttgaactgtttctattctcttcactcatactcctctcgctctcc

SEQ ID NO: 376676 - DNA, 2445 bp, Homo sapiens
tctctagaaagttctgcaccccgccccctctgtctgcgctcccgctcctcccagcccctccctcgcggcggggcgggaccaatcgctccccgagccgctcctgacccacctaccccagctctcgcgccgcgtgcagaggtgctcaagcctcctcgcggtccgcagtcagtgccgccgcgcccggcctcccgcacgccccgcaggtagcgcccccgcccgcggcccagagtgcgctcgcgccggcaccagctcccggataaacggcgcgccgcgcggagatgacagccgaggagatgaaggcgaccgagagcggggcgcagtcggcgccgctgcccatggagggagtggacatcagccccaaacaggacgaaggcgtgctgaagattattggggacctcaagcgtctgctccagcggctctcctgtggcatgtgacttccccttctcgctccagcgtcctgccgttttctacgagattgttattcaggtcatcaagagagagggcacaggtacagagatgcccatgattggggaccgagtctttgtccactacactggctggctattagatggcacaaagtttgactccagtctggatcgcaaggacaaattctcctttgacctgggaaaaggggaggtcatcaaggcttgggacattgccatagccaccatgaaggtgggggaggtgtgccacatcacctgcaaaccagaatatgcctacggttcagcaggcagtcctccaaagattccccccaatgccacgcttgtatttgaggtggagttgtttgagtttaagggagaagatctgacggaagaggaagatggcggaatcattcgcagaatacagactcgcggtgaaggctatgctaagcccaatgagggtgctatcgtggaggttgcactggaagggtactacaaggacaagctctttgaccagcgggagctccgctttgagattggcgagggggagaacctggatctgccttatggtctggagagggccattcagcgcatggagaaaggagaacattccatcgtgtacctcaagcccagctatgcttttggcagtgttgggaaggaaaagttccaaatcccaccaaatgctgagctgaaatatgaattacacctcaagagttttgaaaaggccaaggagtcttgggagatgaattcagaagagaagctggaacagagcaccatagtgaaagagcggggcactgtgtacttcaaggaaggtaaatacaagcaagctttactacagtataagaagatcgtgtcttggctggaatatgagtctagtttttccaatgaggaagcacagaaagcacaggcccttcgactggcctctcacctcaacctggccatgtgtcatctgaaactacaggccttctctgctgccattgaaagctgtaacaaggccctagaactggacagcaacaacgagaagggcctcttccgccggggagaggcccacctggccgtgaatgactttgaactggcacgggctgatttccagaaggtcctgcagctctaccccaacaacaaagccgccaagacccagctggctgtgtgccagcagcggatccgaaggcagcttgcccgggagaagaagctctatgccaatatgtttgagaggctggctgaggaggagaacaaggccaaggcagaggcttcctcaggagaccatcccactgacacagagatgaaggaggagcagaagagcaacacggcagggagccagtctcaggtggagacagaagcatagcccctctccaccagccctactcctgcggctgcctgccccccagtctccccactccaccctgttagttttgtaaaaactgaagaattttgagtgaattagacctttatttttctatctggttggatggtggctttaggggaagggggaaaggtgtaggctgggggattgaggtggggaatcattttagctggtgtcagcccctcttcccttcctccattgcacatgaacatatgtccatccatatatattcatcagaatgttaatttattttgctccctctgttaggtccattttctaagggtagaagaggcaagtggtagggatgaggtctgataagaacccagggtggagagggagactcctgggcagccgttttcctcatcctttccctctcccagtccatttccaaatgtggcctccatgtgggtgctagggacatgggaaaaaccactgctatgccatttcttctctctgttcccttcctcacccccgacggtgtggctgatgatgtcttctggtgtcatggtgaccaccccctgttccctgttctggtatttcccctgtcagtttcccctctcggccaggttgtgtcccaaaatcccctcagcctcttctctgcacgttgctgaaggtccaggcttgcctcaagttccatgcttgagcaataaagtggaaacaataaaa

SEQ ID NO: 376677 - DNA, 2243 bp, Homo sapiens
caaaccagaccttagtctgacgaccactggcatgaaggaagaaggaggaagtgtggcataaatacttccccctttgccgattataataataatctattattcaaccttttactggtctaatcttccaacaactgtaggagatagggattatcatcactgctttacaaataaagtgtggagaattttaaaaacttaccatacagcggaaacttgaactcagatctctcagccttttgtctcctttttcaaaccaagtcttgctgcacctcaagaaagacaagaaggtcatcaagagagagggcacaggtacagagatgcccatgattggggaccgagtctttgtccactacactggctggctattagatggcacaaagtttgactccagtctggatcgcaaggacaaattctcctttgacctgggaaaaggggaggtcatcaaggcttgggacattgccatagccaccatgaaggtgggggaggtgtgccacatcacctgcaaaccagaatatgcctacggttcagcaggcagtcctccaaagattccccccaatgccacgcttgtatttgaggtggagttgtttgagtttaagggagaagatctgacggaagaggaagatggcggaatcattcgcagaatacagactcgcggtgaaggctatgctaagcccaatgagggtgctatcgtggaggttgcactggaagggtactacaaggacaagctctttgaccagcgggagctccgctttgagattggcgagggggagaacctggatctgccttatggtctggagagggccattcagcgcatggagaaaggagaacattccatcgtgtacctcaagcccagctatgcttttggcagtgttgggaaggaaaagttccaaatcccaccaaatgctgagctgaaatatgaattacacctcaagagttttgaaaaggccaaggagtcttgggagatgaattcagaagagaagctggaacagagcaccatagtgaaagagcggggcactgtgtacttcaaggaaggtaaatacaagcaagctttactacagtataagaagatcgtgtcttggctggaatatgagtctagtttttccaatgaggaagcacagaaagcacaggcccttcgactggcctctcacctcaacctggccatgtgtcatctgaaactacaggccttctctgctgccattgaaagctgtaacaaggccctagaactggacagcaacaacgagaagggcctcttccgccggggagaggcccacctggccgtgaatgactttgaactggcacgggctgatttccagaaggtcctgcagctctaccccaacaacaaagccgccaagacccagctggctgtgtgccagcagcggatccgaaggcagcttgcccgggagaagaagctctatgccaatatgtttgagaggctggctgaggaggagaacaaggccaaggcagaggcttcctcaggagaccatcccactgacacagagatgaaggaggagcagaagagcaacacggcagggagccagtctcaggtggagacagaagcatagcccctctccaccagccctactcctgcggctgcctgccccccagtctccccactccaccctgttagttttgtaaaaactgaagaattttgagtgaattagacctttatttttctatctggttggatggtggctttaggggaagggggaaaggtgtaggctgggggattgaggtggggaatcattttagctggtgtcagcccctcttcccttcctccattgcacatgaacatatgtccatccatatatattcatcagaatgttaatttattttgctccctctgttaggtccattttctaagggtagaagaggcaagtggtagggatgaggtctgataagaacccagggtggagagggagactcctgggcagccgttttcctcatcctttccctctcccagtccatttccaaatgtggcctccatgtgggtgctagggacatgggaaaaaccactgctatgccatttcttctctctgttcccttcctcacccccgacggtgtggctgatgatgtcttctggtgtcatggtgaccaccccctgttccctgttctggtatttcccctgtcagtttcccctctcggccaggttgtgtcccaaaatcccctcagcctcttctctgcacgttgctgaaggtccaggcttgcctcaagttccatgcttgagcaataaagtggaaacaataaaa

SEQ ID NO: 376678 - DNA, 2603 bp, Homo sapiens
tctctagaaagttctgcaccccgccccctctgtctgcgctcccgctcctcccagcccctccctcgcggcggggcgggaccaatcgctccccgagccgctcctgacccacctaccccagctctcgcgccgcgtgcagaggtgctcaagcctcctcgcggtccgcagtcagtgccgccgcgcccggcctcccgcacgccccgcaggtagcgcccccgcccgcggcccagagtgcgctcgcgccggcaccagctcccggataaacggcgcgccgcgcggagatgacagccgaggagatgaaggcgaccgagagcggggcgcagtcggcgccgctgcccatggagggagtggacatcagccccaaacaggacgaaggcgtgctgaaggtcatcaagagagagggcacaggtacagagatgcccatgattggggaccgagtctttgtccactacactggctggctattagatggcacaaagtttgactccagtctggatcgcaaggacaaattctcctttgacctgggaaaaggggaggtcatcaaggcttgggacattgccatagccaccatgaaggtgggggaggtgtgccacatcacctgcaaaccagaatatgcctacggttcagcaggcagtcctccaaagattccccccaatgccacgcttgtatttgaggtggagttgtttgagtttaagggagaagatctgacggaagaggaagatggcggaatcattcgcagaatacagactcgcggtgaaggctatgctaagcccaatgagggtgctatcgtggagggtgagacagtacagtctgggctttcaattctcattctgatatttaggccttgtgtggctttgggcaagacacttccgttctccgagcctatcttcttgtccataaaatgaggggttggaccatattctcttcatatcactccagatttgagaacacaggagaatcttgggatgatgggggtgatgcagggaggctgatggcatccttcctcagtcacctgccctcttacaactctggtacactgcctctctttcatgccagttgcactggaagggtactacaaggacaagctctttgaccagcgggagctccgctttgagattggcgagggggagaacctggatctgccttatggtctggagagggccattcagcgcatggagaaaggagaacattccatcgtgtacctcaagcccagctatgcttttggcagtgttgggaaggaaaagttccaaatcccaccaaatgctgagctgaaatatgaattacacctcaagagttttgaaaaggccaaggagtcttgggagatgaattcagaagagaagctggaacagagcaccatagtgaaagagcggggcactgtgtacttcaaggaaggtaaatacaagcaagctttactacagtataagaagatcgtgtcttggctggaatatgagtctagtttttccaatgaggaagcacagaaagcacaggcccttcgactggcctctcacctcaacctggccatgtgtcatctgaaactacaggccttctctgctgccattgaaagctgtaacaaggccctagaactggacagcaacaacgagaagggcctcttccgccggggagaggcccacctggccgtgaatgactttgaactggcacgggctgatttccagaaggtcctgcagctctaccccaacaacaaagccgccaagacccagctggctgtgtgccagcagcggatccgaaggcagcttgcccgggagaagaagctctatgccaatatgtttgagaggctggctgaggaggagaacaaggccaaggcagaggcttcctcaggagaccatcccactgacacagagatgaaggaggagcagaagagcaacacggcagggagccagtctcaggtggagacagaagcatagcccctctccaccagccctactcctgcggctgcctgccccccagtctccccactccaccctgttagttttgtaaaaactgaagaattttgagtgaattagacctttatttttctatctggttggatggtggctttaggggaagggggaaaggtgtaggctgggggattgaggtggggaatcattttagctggtgtcagcccctcttcccttcctccattgcacatgaacatatgtccatccatatatattcatcagaatgttaatttattttgctccctctgttaggtccattttctaagggtagaagaggcaagtggtagggatgaggtctgataagaacccagggtggagagggagactcctgggcagccgttttcctcatcctttccctctcccagtccatttccaaatgtggcctccatgtgggtgctagggacatgggaaaaaccactgctatgccatttcttctctctgttcccttcctcacccccgacggtgtggctgatgatgtcttctggtgtcatggtgaccaccccctgttccctgttctggtatttcccctgtcagtttcccctctcggccaggttgtgtcccaaaatcccctcagcctcttctctgcacgttgctgaaggtccaggcttgcctcaagttccatgcttgagcaataaagtggaaacaataaaa

SEQ ID NO: 376679 - DNA, 2360 bp, Homo sapiens
tctctagaaagttctgcaccccgccccctctgtctgcgctcccgctcctcccagcccctccctcgcggcggggcgggaccaatcgctccccgagccgctcctgacccacctaccccagctctcgcgccgcgtgcagaggtgctcaagcctcctcgcggtccgcagtcagtgccgccgcgcccggcctcccgcacgccccgcaggtagcgcccccgcccgcggcccagagtgcgctcgcgccggcaccagctcccggataaacggcgcgccgcgcggagatgacagccgaggagatgaaggcgaccgagagcggggcgcagtcggcgccgctgcccatggagggagtggacatcagccccaaacaggacgaaggcgtgctgaaggtcatcaagagagagggcacaggtacagagatgcccatgattggggaccgagtctttgtccactacactggctggctattagatggcacaaagtttgactccagtctggatcgcaaggacaaattctcctttgacctgggaaaaggggaggtcatcaaggcttgggacattgccatagccaccatgaaggtgggggaggtgtgccacatcacctgcaaaccagaatatgcctacggttcagcaggcagtcctccaaagattccccccaatgccacgcttgtatttgaggtggagttgtttgagtttaagggagaagatctgacggaagaggaagatggcggaatcattcgcagaatacagactcgcggtgaaggctatgctaagcccaatgagggtgctatcgtggaggttgcactggaagggtactacaaggacaagctctttgaccagcgggagctccgctttgagattggcgagggggagaacctggatctgccttatggtctggagagggccattcagcgcatggagaaaggagaacattccatcgtgtacctcaagcccagctatgcttttggcagtgttgggaaggaaaagttccaaatcccaccaaatgctgagctgaaatatgaattacacctcaagagttttgaaaaggccaaggagtcttgggagatgaattcagaagagaagctggaacagagcaccatagtgaaagagcggggcactgtgtacttcaaggaaggtaaatacaagcaagctttactacagtataagaagatcgtgtcttggctggaatatgagtctagtttttccaatgaggaagcacagaaagcacaggcccttcgactggcctctcacctcaacctggccatgtgtcatctgaaactacaggccttctctgctgccattgaaagctgtaacaaggccctagaactggacagcaacaacgagaagggcctcttccgccggggagaggcccacctggccgtgaatgactttgaactggcacgggctgatttccagaaggtcctgcagctctaccccaacaacaaagccgccaagacccagctggctgtgtgccagcagcggatccgaaggcagcttgcccgggagaagaagctctatgccaatatgtttgagaggctggctgaggaggagaacaaggccaaggcagaggcttcctcaggagaccatcccactgacacagagatgaaggaggagcagaagagcaacacggcagggagccagtctcaggtggagacagaagcatagcccctctccaccagccctactcctgcggctgcctgccccccagtctccccactccaccctgttagttttgtaaaaactgaagaattttgagtgaattagacctttatttttctatctggttggatggtggctttaggggaagggggaaaggtgtaggctgggggattgaggtggggaatcattttagctggtgtcagcccctcttcccttcctccattgcacatgaacatatgtccatccatatatattcatcagaatgttaatttattttgctccctctgttaggtccattttctaagggtagaagaggcaagtggtagggatgaggtctgataagaacccagggtggagagggagactcctgggcagccgttttcctcatcctttccctctcccagtccatttccaaatgtggcctccatgtgggtgctagggacatgggaaaaaccactgctatgccatttcttctctctgttcccttcctcacccccgacggtgtggctgatgatgtcttctggtgtcatggtgaccaccccctgttccctcctcctcgccccacacctcccagctcccctgggcgtcctgtggcttgcctggatggaaggagacttaggaacctgccagttggccatgatgtctttttttctttttctttttttttacacaacagaacgaaaccaaaaaatgtccagaaaaaaaaaa

SEQ ID NO: 376680 - DNA, 1901 bp, Homo sapiens
  misc_feature (15)..(15): n is a, c, g, or t
atttcgcattcgagnctcggtaccccaagcagttaatacagactcacggtgaaggctatgctaagcccaatgagggtgctatcgtggagggtgagacagtacagtctgggctttcaattctcattctgatatttaggccttgtgtggctttgggcaagacacttccgttctccgagcctatcttcttgtccataaaatgaggggttggaccatattctcttcatatcactccagatttgagaacacaggagaatcttgggatgatgggggtgatgcagggaggctgatggcatccttcctcagtcacctgccctcttacaactctggtacactgcctctctttcatgccagttgcactggaagggtactacaaggacaagctctttgaccagcgggagctccgctttgagattggcgagggggagaacctggatctgccttatggtctggagagggccattcagcgcatggagaaaggagaacattccatcgtgtacctcaagcccagctatgcttttggcagtgttgggaaggaaaagttccaaatcccaccaaatgctgagctgaaatatgaattacacctcaagagttttgaaaaggccaaggagtcttgggagatgaattcagaagagaagctggaacagagcaccatagtgaaagagcggggcactgtgtacttcaaggaaggtaaatacaagcaagctttactacagtataagaagatcgtgtcttggctggaatatgagtctagtttttccaatgaggaagcacagaaagcacaggcccttcgactggcctctcacctcaacctggccatgtgtcatctgaaactacaggccttctctgctgccattgaaagctgtaacaaggccctagaactggacagcaacaacgagaagggcctcttccgccggggagaggcccacctggccgtgaatgactttgaactggcacgggctgatttccagaaggtcctgcagctctaccccaacaacaaagccgccaagacccagctggctgtgtgccagcagcggatccgaaggcagcttgcccgggagaagaagctctatgccaatatgtttgagaggctggctgaggaggagaacaaggccaaggcagaggcttcctcaggagaccatcccactgacacagagatgaaggaggagcagaagagcaacacggcagggagccagtctcaggtggagacagaagcatagcccctctccaccagccctactcctgcggctgcctgccccccagtctccccactccaccctgttagttttgtaaaaactgaagaattttgagtgaattagacctttatttttctatctggttggatggtggctttaggggaagggggaaaggtgtaggctgggggattgaggtggggaatcattttagctggtgtcagcccctcttcccttcctccattgcacatgaacatatgtccatccatatatattcatcagaatgttaatttattttgctccctctgttaggtccattttctaagggtagaagaggcaagtggtagggatgaggtctgataagaacccagggtggagagggagactcctgggcagccgttttcctcatcctttccctctcccagtccatttccaaatgtggcctccatgtgggtgctagggacatgggaaaaaccactgctatgccatttcttctctctgttcccttcctcacccccgacggtgtggctgatgatgtcttctggtgtcatggtgaccaccccctgttccctgttctggtatttcccctgtcagtttcccctctcggccaggttgtgtcccaaaatcccctcagcctcttctctgcacgttgctgaaggtccaggcttgcctcaagttccatgcttgagcaataaagtggaaacaataaaa

SEQ ID NO: 376681 - DNA, 1617 bp, Homo sapiens
  misc_feature (1583)..(1583): n is a, c, g, or t
tctctagaaagttctgcaccccgccccctctgtctgcgctcccgctcctcccagcccctccctcgcggcggggcgggaccaatcgctccccgagccgctcctgacccacctaccccagctctcgcgccgcgtgcagaggtgctcaagcctcctcgcggtccgcagtcagtgccgccgcgcccggcctcccgcacgccccgcaggtagcgcccccgcccgcggcccagagtgcgctcgcgccggcaccagctcccggataaacggcgcgccgcgcggagatgacagccgaggagatgaaggcgaccgagagcggggcgcagtcggcgccgctgcccatggagggagtggacatcagccccaaacaggacgaaggcgtgctgaaggtcatcaagagagagggcacaggtacagagatgcccatgattggggaccgagtctttgtccactacactggctggctattagatggcacaaagtttgactccagtctggatcgcaaggacaaattctcctttgacctgggaaaaggggaggtcatcaaggcttgggacattgccatagccaccatgaaggtgggggaggtgtgccacatcacctgcaaaccagaatatgcctacggttcagcaggcagtcctccaaagattccccccaatgccacgcttgtatttgaggtggagttgtttgagtttaagggagaagatctgacggaagaggaagatggcggaatcattcgcagaatacagactcgcggtgaaggctatgctaagcccaatgagggtgctatcgtggaggttgcactggaagggtactacaaggacaagctctttgaccagcgggagctccgctttgagattggcgagggggagaacctggatctgccttatggtctggagagggccattcagcgcatggagaaaggagaacattccatcgtgtacctcaagcccagctatgcttttggcagtgttgggaaggaaaagttccaaatcccaccaaatgctgagctgaaatatgaattacacctcaagagttttgaaaaggccaaggagtcttgggagatgaattcagaagagaagctggaacagagcaccatagtgaaagagcggggcactgtgtacttcaaggaaggtaaatacaagcaagctttactacagtataagaagatcgtgtcttggctggaatatgagtctagtttttccaatgaggaagcacagaaagcacaggcccttcgactggcctctcacctcaacctggccatgtgtcatctgaaactacaggccttctctgctgccattgaaagctgtaacaaggccctagaactggacagcaacaacgagaagggcctcttccgccggggagaggcccacctggccgtgaatgactttgaactggcacgggctgatttccagaaggtcctgcagctctaccccaacaacaaagccgccaagacccagctggctgtgtgccagcagcggatccgaaggcagcttgcccgggagaagaagctctatgccaatatgtttgagaggctggctgaggaggagaacaaggccaaggcagaggcttcctcattggaaaaactngactcatattccagccaagacacgatcttcttat

SEQ ID NO: 376682 - DNA, 1448 bp, Homo sapiens
tctctagaaagttctgcaccccgccccctctgtctgcgctcccgctcctcccagcccctccctcgcggcggggcgggaccaatcgctccccgagccgctcctgacccacctaccccagctctcgcgccgcgtgcagaggtgctcaagcctcctcgcggtccgcagtcagtgccgccgcgcccggcctcccgcacgccccgcaggtagcgcccccgcccgcggcccagagtgcgctcgcgccggcaccagctcccggataaacggcgcgccgcgcggagatgacagccgaggagatgaaggcgaccgagagcggggcgcagtcggcgccgctgcccatggagggagtggacatcagccccaaacaggacgaaggcgtgctgaaggtcatcaagagagagggcacaggtacagagatgcccatgattggggaccgagtctttgtccactacactggctggctattagatggcacaaagtttgactccagtctggatcgcaaggacaaattctcctttgacctgggaaaaggggaggtcatcaaggcttgggacattgccatagccaccatgaaggtgggggaggtgtgccacatcacctgcaaaccagaatatgcctacggttcagcaggcagtcctccaaagattccccccaatgccacgcttgtatttgaggtggagttgtttgagtttaagggagaagatctgacggaagaggaagatggcggaatcattcgcagaatacagactcgcggtgaaggctatgctaagcccaatgagggtgctatcgtggaggttgcactggaagggtactacaaggacaagctctttgaccagcgggagctccgctttgagattggcgagggggagaacctggatctgccttatggtctggagagggccattcagcgcatggagaaaggagaacattccatcgtgtacctcaagcccagctatgcttttggcagtgttgggaaggaaaagttccaaatcccaccaaatgctgagctgaaatatgaattacacctcaagagttttgaaaaggccaaggagtcttgggagatgaattcagaagagaagctggaacagagcaccatagtgaaagagcggggcactgtgtacttcaaggaaggtaaatacaagcaagctttactacagtataagaagatcgtgtcttggctggaatatgagtctagtttttccaatgaggaagcacagaaagcacaggcccttcgactggcctctcacctcaacctggccatgtgtcatctgaaactacaggccttctctgctgccattgaaagctgtaacaaggccctagaactggacagcaacaacgagaagggcctcttccgccggggagaggcccacctggccgtgaatgactttgaactggcacgggctgatttccagaaggtcctgcgaacctaagagggagcctctagatgacca

SEQ ID NO: 376683 - DNA, 1220 bp, Homo sapiens
tctctagaaagttctgcaccccgccccctctgtctgcgctcccgctcctcccagcccctccctcgcggcggggcgggaccaatcgctccccgagccgctcctgacccacctaccccagctctcgcgccgcgtgcagaggtgctcaagcctcctcgcggtccgcagtcagtgccgccgcgcccggcctcccgcacgccccgcaggtagcgcccccgcccgcggcccagagtgcgctcgcgccggcaccagctcccggataaacggcgcgccgcgcggagatgacagccgaggagatgaaggcgaccgagagcggggcgcagtcggcgccgctgcccatggagggagtggacatcagccccaaacaggacgaaggcgtgctgaaggtcatcaagagagagggcacaggtacagagatgcccatgattggggaccgagtctttgtccactacactggctggctattagatggcacaaagtttgactccagtctggatcgcaaggacaaattctcctttgacctgggaaaaggggaggtcatcaaggcttgggacattgccatagccaccatgaaggtgggggaggtgtgccacatcacctgcaaaccagaatatgcctacggttcagcaggcagtcctccaaagattccccccaatgccacgcttgtatttgaggtggagttgtttgagtttaagggagaagatctgacggaagaggaagatggcggaatcattcgcagaatacagactcgcggtgaaggctatgctaagcccaatgagggtgctatcgtggaggttgcactggaagggtactacaaggacaagctctttgaccagcgggagctccgctttgagattggcgagggggagaacctggatctgccttatggtctggagagggccattcagcgcatggagaaaggagaacattccatcgtgtacctcaagcccagctatgcttttggcagtgttgggaaggaaaagttccaaatcccaccaaatgctgagctgaaatatgaattacacctcaagagttttgaaaaggccaaggagtcttgggagatgaattcagaagagaagctggaacagagcaccatagtgaaagagcggggcactgtgtacttcaaggaaggtaaatacaagcaagctttactacagtataagaagatcgtgtcttggctggaatatgagtctgtattaactgcttggggatcctctaggtct

SEQ ID NO: 376684 - DNA, 1242 bp, Homo sapiens
tctctagaaagttctgcaccccgccccctctgtctgcgctcccgctcctcccagcccctccctcgcggcggggcgggaccaatcgctccccgagccgctcctgacccacctaccccagctctcgcgccgcgtgcagaggtgctcaagcctcctcgcggtccgcagtcagtgccgccgcgcccggcctcccgcacgccccgcaggtagcgcccccgcccgcggcccagagtgcgctcgcgccggcaccagctcccggataaacggcgcgccgcgcggagatgacagccgaggagatgaaggcgaccgagagcggggcgcagtcggcgccgctgcccatggagggagtggacatcagccccaaacaggacgaaggcgtgctgaaggtcatcaagagagagggcacaggtacagagatgcccatgattggggaccgagtctttgtccactacactggctggctattagatggcacaaagtttgactccagtctggatcgcaaggacaaattctcctttgacctgggaaaaggggaggtcatcaaggcttgggacattgccatagccaccatgaaggtgggggaggtgtgccacatcacctgcaaaccagaatatgcctacggttcagcaggcagtcctccaaagattccccccaatgccacgcttgtatttgaggtggagttgtttgagtttaagggagaagatctgacggaagaggaagatggcggaatcattcgcagaatacagactcgcggtgaaggctatgctaagcccaatgagggtgctatcgtggaggttgcactggaagggtactacaaggacaagctctttgaccagcgggagctccgctttgagattggcgagggggagaacctggatctgccttatggtctggagagggccattcagcgcatggagaaaggagaacattccatcgtgtacctcaagcccagctatgcttttggcagtgttgggaaggaaaagttccaaatcccaccaaatgctgagctgaaatatgaattacacctcaagagttttgaaaaggccaaggagtcttgggagatgaattcagaagagaagctggaacagagcaccatagtgaaagagcggggcactgtgtacttcaaggaaggtaaatacaagcaagctttactacagtataagaagatcgtgtcttggctggaatatgagtctatagtttttccaaggggggctcactagggctcacaggaggctcacagttgct

SEQ ID NO: 376685 - DNA, 672 bp, Homo sapiens
tctctagaaagttctgcaccccgccccctctgtctgcgctcccgctcctcccagcccctccctcgcggcggggcgggaccaatcgctccccgagccgctcctgacccacctaccccagctctcgcgccgcgtgcagaggtgctcaagcctcctcgcggtccgcagtcagtgccgccgcgcccggcctcccgcacgccccgcaggtagcgcccccgcccgcggcccagagtgcgctcgcgccggcaccagctcccggataaacggcgcgccgcgcggagatgacagccgaggagatgaaggcgaccgagagcggggcgcagtcggcgccgctgcccatggagggagtggacatcagccccaaacaggacgaaggcgtgctgaaggtcatcaagagagagggcacaggtacagagatgcccatgattggggaccgagtctttgtccactacactggctggctattagatggcacaaagtttgactccagtctggatcgcaaggacaaattctcctttgaccaccccctgttccctgttctggtatttcccctgtcagtttcccctctcggccaggttgtgtcccaaaatcccctcagcctcttctctgcacgttgctgaaggtccaggcttgcctcaagttccatgcttgagcaataaagtggaaacaataaaa

SEQ ID NO: 376686 - DNA, 619 bp, Homo sapiens
tagggtaacggcggtgcaggggatgcctaaggccctacccccacccccagcactctcggctccatgtctgacccttccacgcctgtctcaggtcttgcactgcacgggccaggtgaaagtctacaacaactgccctcctcacaatagtctgtgtggctacaaggagcccctgctgtcctgcctcatcatcatgtgtgaaccaatccagcacccatcccacatggacatccccctggatagcaagaccttcctgagccgccacagcatggacatgaagttcacctactgtgatgacaggtagggggccatgggtgtgtatgctgtgggcagagatgggtcttacctgtgtgtgtggggagttgtgcctgtattaaaggtgtggaactgaacatagacgtggtattgccgggtgcatgttcgtggacctgtgccactgtttcattgcatcagtgcccctcagaggttcccggtactgtatttggtggtctcccattgacagagcctcagggtccatctgcagagctttcctggtgtgcaactcttctcatcattgtggtgtgaacaacgtcaggggatactcaaggagacaaccagcaccaaagctacgatgcactgccct

SEQ ID NO: 376687 - DNA, 3662 bp, Homo sapiens
cggaccgccacacgggtccggtgcccgctgcgcttccgccccagcgctcctgaggcggccgtacaatcctcggcagtgtcctgagactgtatggtcagctcagcccggcctccgactccttccgactcccagcattcgagccacttttttttttctttgaaaactcagaaaagtgactccttttccagggaaaaaggaacttgggttcccttctctccgtcctcttttcgggtctgacagcctccacccactccttccccggaccccgcctccgcgcgcaggttcctcccagtcacctttctccacccccgcccccgcacctagcccgccgcgcgccaccttccacctgactgcgcggggcgctcgggacctgcgcgcacctcggaccttcaccacccgcccgggccgcggggagcggacgagggccacagccccccacccgccaggagcccaggtgctcggcgtctgaacgtctcaaagggccacagcgacaatgacagctgacaaggagaagaaaaggagtagctcggagaggaggaaggagaagtcccgggatgctgcgcggtgccggcggagcaaggagacggaggtgttctatgagctggcccatgagctgcctctgccccacagtgtgagctcccatctggacaaggcctccatcatgcgactggcaatcagcttcctgcgaacacacaagctcctctcctcagtttgctctgaaaacgagtccgaagccgaagctgaccagcagatggacaacttgtacctgaaagccttggagggtttcattgccgtggtgacccaagatggcgacatgatctttctgtcagaaaacatcagcaagttcatgggacttacacaggtggagctaacaggacatagtatctttgacttcactcatccctgcgaccatgaggagattcgtgagaacctgagtctcaaaaatggctctggttttgggaaaaaaagcaaagacatgtccacagagcgggacttcttcatgaggatgaagtgcacggtcaccaacagaggccgtactgtcaacctcaagtcagccacctggaaggtcttgcactgcacgggccaggtgaaagtctacaacaactgccctcctcacaatagtctgtgtggctacaaggagcccctgctgtcctgcctcatcatcatgtgtgaaccaatccagcacccatcccacatggacatccccctggatagcaagaccttcctgagccgccacagcatggacatgaagttcacctactgtgatgacagaatcacagaactgattggttaccaccctgaggagctgcttggccgctcagcctatgaattctaccatgcgctagactccgagaacatgaccaagagtcaccagaacttgtgcaccaagggtcaggtagtaagtggccagtaccggatgctcgcaaagcatgggggctacgtgtggctggagacccaggggacggtcatctacaaccctcgcaacctgcagccccagtgcatcatgtgtgtcaactacgtcctgagtgagattgagaagaatgacgtggtgttctccatggaccagactgaatccctgttcaagccccacctgatggccatgaacagcatctttgatagcagtggcaagggggctgtgtctgagaagagtaacttcctattcaccaagctaaaggaggagcccgaggagctggcccagctggctcccaccccaggagacgccatcatctctctggatttcgggaatcagaacttcgaggagtcctcagcctatggcaaggccatcctgcccccgagccagccatgggccacggagttgaggagccacagcacccagagcgaggctgggagcctgcctgccttcaccgtgccccaggcagctgccccgggcagcaccacccccagtgccaccagcagcagcagcagctgctccacgcccaatagccctgaagactattacacatctttggataacgacctgaagattgaagtgattgagaagctcttcgccatggacacagaggccaaggaccaatgcagtacccagacggatttcaatgagctggacttggagacactggcaccctatatccccatggacggggaagacttccagctaagccccatctgccccgaggagcggctcttggcggagaacccacagtccaccccccagcactgcttcagtgccatgacaaacatcttccagccactggcccctgtagccccgcacagtcccttcctcctggacaagtttcagcagcagctggagagcaagaagacagagcccgagcaccggcccatgtcctccatcttctttgatgccggaagcaaagcatccctgccaccgtgctgtggccaggccagcacccctctctcttccatggggggcagatccaatacccagtggcccccagatccaccattacattttgggcccacaaagtgggccgtcggggatcagcgcacagagttcttgggagcagcgccgttggggccccctgtctctccaccccatgtctccaccttcaagacaaggtctgcaaagggttttggggctcgaggcccagacgtgctgagtccggccatggtagccctctccaacaagctgaagctgaagcgacagctggagtatgaagagcaagccttccaggacctgagcgggggggacccacctggtggcagcacctcacatttgatgtggaaacggatgaagaacctcaggggtgggagctgccctttgatgccggacaagccactgagcgcaaatgtacccaatgataagttcacccaaaaccccatgaggggcctgggccatcccctgagacatctgccgctgccacagcctccatctgccatcagtcccggggagaacagcaagagcaggttccccccacagtgctacgccacccagtaccaggactacagcctgtcgtcagcccacaaggtgtcaggcatggcaagccggctgctcgggccctcatttgagtcctacctgctgcccgaactgaccagatatgactgtgaggtgaacgtgcccgtgctgggaagctccacgctcctgcaaggaggggacctcctcagagccctggaccaggccacctgagccaggccttctacctgggcagcacctctgccgacgccgtcccaccagcttcactctctccgtctgtttttgcaactaggtatttctaacgccagcacactatttacaagatggacttacctggcagacttgcccaggtcaccaagcagtggcctttttctgagatgctcactttattatccctatttttaaagtacacaattgttttacctgttctgaaatgttcttaaattttgtaggatttttttcctccccaccttcaatgacttctaatttatattatccataggtttctctccctccttctccttctcacacacaactgtccatactaacaagtttggtgcatgtctgttcttctgtagggagaagctttagcttcattttactaaaaagattcctcgttattgttgttgccaaagagaaacaaaaatgattttgctttccaagcttggtttgtggcgtctccctcgcagagcccttctcgtttcttttttaaactaatcaccatattgtaaatttcagggtttttttttttttgtttaagctgactctt

SEQ ID NO: 376688 - DNA, 3618 bp, Homo sapiens
cggaccgccacacgggtccggtgcccgctgcgcttccgccccagcgctcctgaggcggccgtacaatcctcggcagtgtcctgagactgtatggtcagctcagcccggcctccgactccttccgactcccagcattcgagccacttttttttttctttgaaaactcagaaaagtgactccttttccagggaaaaaggaacttgggttcccttctctccgtcctcttttcgggtctgacagcctccacccactccttccccggaccccgcctccgcgcgcaggttcctcccagtcacctttctccacccccgcccccgcacctagcccgccgcgcgccaccttccacctgactgcgcggggcgctcgggacctgcgcgcacctcggaccttcaccacccgcccgggccgcggggagcggacgagggccacagccccccacccgccaggagcccaggtgctcggcgtctgaacgtctcaaagggccacagcgacaatgacagctgacaaggagaagaaaaggagtagctcggagaggaggaaggagaagtcccgggatgctgcgcggtgccggcggagcaaggagacggaggtgttctatgagctggcccatgagctgcctctgccccacagtgtgagctcccatctggacaaggcctccatcatgcgactggcaatcagcttcctgcgaacacacaagctcctctcctcagtttgctctgaaaacgagtccgaagccgaagctgaccagcagatggacaacttgtacctgaaagccttggagggtttcattgccgtggtgacccaagatggcgacatgatctttctgtcagaaaacatcagcaagttcatgggacttacacaggtggagctaacaggacatagtatctttgacttcactcatccctgcgaccatgaggagattcgtgagaacctgagtctcaaaaatggctctggttttgggaaaaaaagcaaagacatgtccacagagcgggacttcttcatgaggatgaagtgcacggtcaccaacagaggccgtactgtcaacctcaagtcagccacctggaaggtcttgcactgcacgggccaggtgaaagtctacaacaactgccctcctcacaatagtctgtgtggctacaaggagcccctgctgtcctgcctcatcatcatgtgtgaaccaatccagcacccatcccacatggacatccccctggatagcaagaccttcctgagccgccacagcatggacatgaagttcacctactgtgatgacagaatcacagaactgattggttaccaccctgaggagctgcttggccgctcagcctatgaattctaccatgcgctagactccgagaacatgaccaagagtcaccagaacttgtgcaccaagggtcaggtagtaagtggccagtaccggatgctcgcaaagcatgggggctacgtgtggctggagacccaggggacggtcatctacaaccctcgcaacctgcagccccagtgcatcatgtgtgtcaactacgtcctgagtgagattgagaagaatgacgtggtgttctccatggaccagactgaatccctgttcaagccccacctgatggccatgaacagcatctttgatagcagtggcaagggggctgtgtctgagaagagtaacttcctattcaccaagctaaaggaggagcccgaggagctggcccagctggctcccaccccaggagacgccatcatctctctggatttcgggaatcagaacttcgaggagtcctcagcctatggcaaggccatcctgcccccgagccagccatgggccacggagttgaggagccacagcacccagagcgaggctgggagcctgcctgccttcaccgtgccccaggcagctgccccgggcagcaccacccccagtgccaccagcagcagcagcagctgctccacgcccaatagccctgaagactattacacatctttggataacgacctgaagattgaagtgattgagaagctcttcgccatggacacagaggccaaggaccaatgcagtacccagacggatttcaatgagctggacttggagacactggcaccctatatccccatggacggggaagacttccagctaagccccatctgccccgaggagcggctcttggcggagaacccacagtccaccccccagcactgcttcagtgccatgacaaacatcttccagccactggcccctgtagccccgcacagtcccttcctcctggacaagtttcagcagcagctggagagcaagaagacagagcccgagcaccggcccatgtcctccatcttctttgatgccggaagcaaagcatccctgccaccgtgctgtggccaggccagcacccctctctcttccatggggggcagatccaatacccagtggcccccagatccaccattacattttgggcccacaaagtgggccgtcggggatcagcgcacagagttcttgggagcagcgccgttggggccccctgtctctccaccccatgtctccaccttcaagacaaggtctgcaaagggttttggggctcgaggcccagacgtgctgagtccggccatggtagccctctccaacaagctgaagctgaagcgacagctggagtatgaagagcaagccttccaggacctgagcgggggggacccacctggtggcagcacctcacatttgatgtggaaacggatgaagaacctcaggggtgggagctgccctttgatgccggacaagccactgagcgcaaatgtacccaatgataagttcacccaaaaccccatgaggggcctgggccatcccctgagacatctgccgctgccacagcctccatctgccatcagtcccggggagaacagcaagagcaggttccccccacagtgctacgccacccagtaccaggactacagcctgtcgtcagcccacaaggtgtcaggcatggcaagccggctgctcgggccctcatttgagtcctacctgctgcccgaactgaccagatatgactgtgaggtgaacgtgcccgtgctgggaagctccacgctcctgcaaggaggggacctcctcagagccctggaccaggccacctgagccaggccttctacctgggcagcacctctgccgacgccgtcccaccagcttcactctctccgtctgtttttgcaactaggtatttctaacgccagcacactatttacaagatggacttacctggcagacttgcccaggtcaccaagcagtggcctttttctgagatgctcactttattatccctatttttaaagtacacaattgttttacctgttctgaaatgttcttaaattttgtaggatttttttcctccccaccttcaatgacttctaatttatattatccataggtttctctccctccttctccttctcacacacaactgtccatactaacaagtttggtgcatgtctgttcttctgtagggagaagctttagcttcattttactaaaaagattcctcgttattgttgttgccaaagagaaacgcagagcccttctcgtttcttttttaaactaatcaccatattgtaaatttcagggtttttttttttttgtttaagctgactctt

SEQ ID NO: 376689 - DNA, 2920 bp, Homo sapiens
  misc_feature (2886)..(2886): n is a, c, g, or t
cggaccgccacacgggtccggtgcccgctgcgcttccgccccagcgctcctgaggcggccgtacaatcctcggcagtgtcctgagactgtatggtcagctcagcccggcctccgactccttccgactcccagcattcgagccacttttttttttctttgaaaactcagaaaagtgactccttttccagggaaaaaggaacttgggttcccttctctccgtcctcttttcgggtctgacagcctccacccactccttccccggaccccgcctccgcgcgcaggttcctcccagtcacctttctccacccccgcccccgcacctagcccgccgcgcgccaccttccacctgactgcgcggggcgctcgggacctgcgcgcacctcggaccttcaccacccgcccgggccgcggggagcggacgagggccacagccccccacccgccaggagcccaggtgctcggcgtctgaacgtctcaaagggccacagcgacaatgacagctgacaaggagaagaaaaggagtagctcggagaggaggaaggagaagtcccgggatgctgcgcggtgccggcggagcaaggagacggaggtgttctatgagctggcccatgagctgcctctgccccacagtgtgagctcccatctggacaaggcctccatcatgcgactggcaatcagcttcctgcgaacacacaagctcctctcctcagtttgctctgaaaacgagtccgaagccgaagctgaccagcagatggacaacttgtacctgaaagccttggagggtttcattgccgtggtgacccaagatggcgacatgatctttctgtcagaaaacatcagcaagttcatgggacttacacaggtggagctaacaggacatagtatctttgacttcactcatccctgcgaccatgaggagattcgtgagaacctgagtctcaaaaatggctctggttttgggaaaaaaagcaaagacatgtccacagagcgggacttcttcatgaggatgaagtgcacggtcaccaacagaggccgtactgtcaacctcaagtcagccacctggaaggtcttgcactgcacgggccaggtgaaagtctacaacaactgccctcctcacaatagtctgtgtggctacaaggagcccctgctgtcctgcctcatcatcatgtgtgaaccaatccagcacccatcccacatggacatccccctggatagcaagaccttcctgagccgccacagcatggacatgaagttcacctactgtgatgacagaatcacagaactgattggttaccaccctgaggagctgcttggccgctcagcctatgaattctaccatgcgctagactccgagaacatgaccaagagtcaccagaacttgtgcaccaagggtcaggtagtaagtggccagtaccggatgctcgcaaagcatgggggctacgtgtggctggagacccaggggacggtcatctacaaccctcgcaacctgcagccccagtgcatcatgtgtgtcaactacgtcctgagtgagattgagaagaatgacgtggtgttctccatggaccagactgaatccctgttcaagccccacctgatggccatgaacagcatctttgatagcagtggcaagggggctgtgtctgagaagagtaacttcctattcaccaagctaaaggaggagcccgaggagctggcccagctggctcccaccccaggagacgccatcatctctctggatttcgggaatcagaacttcgaggagtcctcagcctatggcaaggccatcctgcccccgagccagccatgggccacggagttgaggagccacagcacccagagcgaggctgggagcctgcctgccttcaccgtgccccaggcagctgccccgggcagcaccacccccagtgccaccagcagcagcagcagctgctccacgcccaatagccctgaagactattacacatctttggataacgacctgaagattgaagtgattgagaagctcttcgccatggacacagaggccaaggaccaatgcagtacccagacggatttcaatgagctggacttggagacactggcaccctatatccccatggacggggaagacttccagctaagccccatctgccccgaggagcggctcttggcggagaacccacagtccaccccccagcactgcttcagtgccatgacaaacatcttccagccactggcccctgtagccccgcacagtcccttcctcctggacaagtttcagcagcagctggagagcaagaagacagagcccgagcaccggcccatgtcctccatcttctttgatgccggaagcaaagcatccctgccaccgtgctgtggccaggccagcacccctctctcttccatggggggcagatccaatacccagtggcccccagatccaccattacattttgggcccacaaagtgggccgtcggggatcagcgcacagagttcttgggagcagcgccgttggggccccctgtctctccaccccatgtctccaccttcaagacaaggtctgcaaagggttttggggctcgaggcccagacgtgctgagtccggccatggtagccctctccaacaagctgaagctgaagcgacagctggagtatgaagagcaagccttccaggacctgagcgggggggacccacctggtggcagcacctcacatttgatgtggaaacggatgaagaacctcaggggtgggagctgccctttgatgccggacaagccactgagcgcaaatgtacccaatgctgataagttcacccaataaccccatgtaggggcctggtgcctacaatataaacgccttgctctagcctggtggatccatctacgacgtctgaccttgcatggcantgcaatgcgttggcaccttggcctgtctgtttta

SEQ ID NO: 376690 - DNA, 1614 bp, Homo sapiens
cggaccgccacacgggtccggtgcccgctgcgcttccgccccagcgctcctgaggcggccgtacaatcctcggcagtgtcctgagactgtatggtcagctcagcccggcctccgactccttccgactcccagcattcgagccacttttttttttctttgaaaactcagaaaagtgactccttttccagggaaaaaggaacttgggttcccttctctccgtcctcttttcgggtctgacagcctccacccactccttccccggaccccgcctccgcgcgcaggttcctcccagtcacctttctccacccccgcccccgcacctagcccgccgcgcgccaccttccacctgactgcgcggggcgctcgggacctgcgcgcacctcggaccttcaccacccgcccgggccgcggggagcggacgagggccacagccccccacccgccaggagcccaggtgctcggcgtctgaacgtctcaaagggccacagcgacaatgacagctgacaaggagaagaaaaggagtagctcggagaggaggaaggagaagtcccgggatgctgcgcggtgccggcggagcaaggagacggaggtgttctatgagctggcccatgagctgcctctgccccacagtgtgagctcccatctggacaaggcctccatcatgcgactggcaatcagcttcctgcgaacacacaagctcctctcctcagtttgctctgaaaacgagtccgaagccgaagctgaccagcagatggacaacttgtacctgaaagccttggagggtttcattgccgtggtgacccaagatggcgacatgatctttctgtcagaaaacatcagcaagttcatgggacttacacaggtggagctaacaggacatagtatctttgacttcactcatccctgcgaccatgaggagattcgtgagaacctgagtctcaaaaatggctctggttttgggaaaaaaagcaaagacatgtccacagagcgggacttcttcatgaggatgaagtgcacggtcaccaacagaggccgtactgtcaacctcaagtcagccacctggaaggtcttgcactgcacgggccaggtgaaagtctacaacaactgccctcctcacaatagtctgtgtggctacaaggagcccctgctgtcctgcctcatcatcatgtgtgaaccaatccagcacccatcccacatggacatccccctggatagcaagaccttcctgagccgccacagcatggacatgaagttcacctactgtgatgacagaatcacagaactgattggttaccaccctgaggagctgcttggccgctcagcctatgaattctaccatgcgctagactccgagaacatgaccaagagtcaccagaacttgtgcaccaagggtcaggtagtaagtggccagtaccggatgctcgcaaagcatgggggctacgtgtggctggagacccaggggacggtcatctacaaccctcgcaacctgcagccccagtgcatcatgtgtgtcaactacgtcctgagtgaggtgtctccatctctgcctcaacttcatggtgcactgagctgtaacttcttccttccctattaaaattagaacctgagtataaa

SEQ ID NO: 376691 - DNA, 1672 bp, Homo sapiens
cggaccgccacacgggtccggtgcccgctgcgcttccgccccagcgctcctgaggcggccgtacaatcctcggcagtgtcctgagactgtatggtcagctcagcccggcctccgactccttccgactcccagcattcgagccacttttttttttctttgaaaactcagaaaagtgactccttttccagggaaaaaggaacttgggttcccttctctccgtcctcttttcgggtctgacagcctccacccactccttccccggaccccgcctccgcgcgcaggttcctcccagtcacctttctccacccccgcccccgcacctagcccgccgcgcgccaccttccacctgactgcgcggggcgctcgggacctgcgcgcacctcggaccttcaccacccgcccgggccgcggggagcggacgagggccacagccccccacccgccaggagcccaggtgctcggcgtctgaacgtctcaaagggccacagcgacaatgacagctgacaaggagaagaaaaggagtagctcggagaggaggaaggagaagtcccgggatgctgcgcggtgccggcggagcaaggagacggaggtgttctatgagctggcccatgagctgcctctgccccacagtgtgagctcccatctggacaaggcctccatcatgcgactggcaatcagcttcctgcgaacacacaagctcctctcctcagtttgctctgaaaacgagtccgaagccgaagctgaccagcagatggacaacttgtacctgaaagccttggagggtttcattgccgtggtgacccaagatggcgacatgatctttctgtcagaaaacatcagcaagttcatgggacttacacaggtggagctaacaggacatagtatctttgacttcactcatccctgcgaccatgaggagattcgtgagaacctgagtctcaaaaatggtatccttaattgtgtttacttccttcttgcccccactgggtgggaatctgcctcccctttgtctacgggtataagggagatagctcatggcccttgtgatgcaggaaaaatggatgtccttaatactcagaaatatctcctgctggccctgcatggtgcctggtgtcccactactaggggacacctttgggttaggacactgtctctaggaggtttcatcacccaagagtcaagcatctctgccaaatgacaccacccaaaccaatgaggaactagtctgtgccaaagtgctcatagtaactactgtagttatctattgctgtctaacaaaccacctataacatagggctttgatgattatctcccagggttctgtgggttcagtgggtgggtcttgtactccatgtgatgtcagctgggctgcagtcatctgggggccagactaggctggggtgatcaggatagctcacacacgtctgggaccttgtggcaggtggctggaaccctggactcagttggcatgctgggacaacaggactgttctctcactctatggagactcagagactctccctctccatatggtgtctctagggtagccagacatcttacgtggcagtttagggctcccagaagcactaaagtggaagctgccaggccttctgaaggctttgtccccagattggcagagcatcacttctgccccatcttgttggttagagca

SEQ ID NO: 376692 - DNA, 487 bp, Homo sapiens
tcagtctcctccctgcctccaaatctggaaggtggctcagcttactcttggagtcttttacttcactgttaggaataatgatgcctaaccttgtttttgaaacaggtggagctaacaggacatagtatctttgacttcactcatccctgcgaccatgaggagattcgtgagaacctgagtctcaaaaatggtatccttaattgtgtttacttccttcttgcccccactgggtgggaatctgcctcccctttgtctacgggtataagggagatagctcatggcccttgtgatgcaggaaaaatggatgtccttaaaaaatttaagtatgtagcctgtgagatgagattggggcattgagaggatccagtactcagaaatatctcctgctggccctgcatggtgcctggtgtcccactactaggggacacctttgggttaggacactgtctctaggaggtttcatcacccaagagtcaagcatctctgc

SEQ ID NO: 376693 - DNA, 461 bp, Homo sapiens
gcagcggccacaggcctgggcctcctgggggttctggtggaaggactggggctcgggagcccatcctggttcttccattcaccacaggccgtacctgcctctctgagccttgttagaatggggcgatgtcctctgtctctcccgcagtcccacacacccaacttttccatctccactctgacttagatgatgccatcagagggtcctgaaggttggctgtagttctggtgactctgagcaccttttataaaggaaagggatgctagggcttcctggcctctcccctccctcaggccaatgctaccgtcactctctgactttggtctttcagataagttcacccaaaaccccatgaggggcctgggccatcccctgagacatctgccgctgccacagcctccatctgccatcagtcccggggagaacagcaagagcaggttccccccacagtgctacgccac

SEQ ID NO: 376694 - DNA, 593 bp, Homo sapiens
gtcagcaaccccaggctcttcctgaagcttccacatacctgtgctgcagcccgcacctcacgctttcctctttcttgggtctcagcaccccacctgaggcagtggttctggaggcagacacgttccccgggcatgcagcaggccgtgggacagacaccactgaaggagcagagtgaaattagggctgctctattggtatcccccagtcacaaagaagtagacacttttccaaatgttcgatttaggcctttaagttatggtaccaacccttctttcaggcatggcaagccggctgctcgggccctcatttgagtcctacctgctgcccgaactgaccagatatgactgtgaggtgaacgtgcccgtgctgggaagctccacgctcctgcaaggaggggacctcctcagagccctggaccaggccacctgagccaggccttctacctgggcagcacctctgccgacgccgtcccaccagcttcactctctccgtctgtttttgcaactaggtatttctaacgccagcacactatttacaagatggacttacctggcagacttgcccaggtcaccaagcagtggcctttttctga

SEQ ID NO: 376695 - DNA, 607 bp, Homo sapiens
cggaccgccacacgggtccggtgcccgctgcgcttccgccccagcgctcctgaggcggccgtacaatcctcggcagtgtcctgagactgtatggtcagctcagcccggcctccgactccttccgactcccagcattcgagccacttttttttttctttgaaaactcagaaaagtgactccttttccagggaaaaaggaacttgggttcccttctctccgtcctcttttcgggtctgacagcctccacccactccttccccggaccccgcctccgcgcgcaggttcctcccagtcacctttctccacccccgcccccgcacctagcccgccgcgcgccaccttccacctgactgcgcggggcgctcgggacctgcgcgcacctcggaccttcaccacccgcccgggccgcggggagcggacgagggccacagccccccacccgccaggagcccaggtgctcggcgtctgaacgtctcaaagggccacagcgacaatgacagctgacaaggagaagaaaagggacacaatagaagaaagcagaaggctgccatactgcaaagtgagtacgctcgtgagcaggcaggaacggaggaagatccgcgggtat

SEQ ID NO: 376696 - DNA, 3597 bp, Homo sapiens
cggaccgccacacgggtccggtgcccgctgcgcttccgccccagcgctcctgaggcggccgtacaatcctcggcagtgtcctgagactgtatggtcagctcagcccggcctccgactccttccgactcccagcattcgagccacttttttttttctttgaaaactcagaaaagtgactccttttccagggaaaaaggaacttgggttcccttctctccgtcctcttttcgggtctgacagcctccacccactccttccccggaccccgcctccgcgcgcaggttcctcccagtcacctttctccacccccgcccccgcacctagcccgccgcgcgccaccttccacctgactgcgcggggcgctcgggacctgcgcgcacctcggaccttcaccacccgcccgggccgcggggagcggacgagggccacagccccccacccgccaggagcccaggtgctcggcgtctgaacgtctcaaagggccacagcgacaatgacagctgacaaggagaagaaaaggagtagctcggagaggaggaaggagaagtcccgggatgctgcgcggtgccggcggagcaaggagacggaggtgttctatgagctggcccatgagctgcctctgccccacagtgtgagctcccatctggacaaggcctccatcatgcgactggcaatcagcttcctgcgaacacacaagctcctctcctcagtttgctctgaaaacgagtccgaagccgaagctgaccagcagatggacaacttgtacctgaaagccttggagggtttcattgccgtggtgacccaagatggcgacatgatctttctgtcagaaaacatcagcaagttcatgggacttacacaggtggagctaacaggacatagtatctttgacttcactcatccctgcgaccatgaggagattcgtgagaacctgagtctcaaaaatggctctggttttgggaaaaaaagcaaagacatgtccacagagcgggacttcttcatgaggatgaagtgcacggtcaccaacagaggccgtactgtcaacctcaagtcagccacctggaaggtcttgcactgcacgggccaggtgaaagtctacaacaactgccctcctcacaatagtctgtgtggctacaaggagcccctgctgtcctgcctcatcatcatgtgtgaaccaatccagcacccatcccacatggacatccccctggatagcaagaccttcctgagccgccacagcatggacatgaagttcacctactgtgatgacagaatcacagaactgattggttaccaccctgaggagctgcttggccgctcagcctatgaattctaccatgcgctagactccgagaacatgaccaagagtcaccagaacttgtgcaccaagggtcaggtagtaagtggccagtaccggatgctcgcaaagcatgggggctacgtgtggctggagacccaggggacggtcatctacaaccctcgcaacctgcagccccagtgcatcatgtgtgtcaactacgtcctgagtgagattgagaagaatgacgtggtgttctccatggaccagactgaatccctgttcaagccccacctgatggccatgaacagcatctttgatagcagtggcaagggggctgtgtctgagaagagtaacttcctattcaccaagctaaaggaggagcccgaggagctggcccagctggctcccaccccaggagacgccatcatctctctggatttcgggaatcagaacttcgaggagtcctcagcctatggcaaggccatcctgcccccgagccagccatgggccacggagttgaggagccacagcacccagagcgaggctgggagcctgcctgccttcaccgtgccccaggcagctgccccgggcagcaccacccccagtgccaccagcagcagcagcagctgctccacgcccaatagccctgaagactattacacatctttggataacgacctgaagattgaagtgattgagaagctcttcgccatggacacagaggccaaggaccaatgcagtacccagacggatttcaatgagctggacttggagacactggcaccctatatccccatggacggggaagacttccagctaagccccatctgccccgaggagcggctcttggcggagaacccacagtccaccccccagcactgcttcagtgccatgacaaacatcttccagccactggcccctgtagccccgcacagtcccttcctcctggacaagtttcagcagcagctggagagcaagaagacagagcccgagcaccggcccatgtcctccatcttctttgatgccggaagcaaagcatccctgccaccgtgctgtggccaggccagcacccctctctcttccatggggggcagatccaatacccagtggcccccagatccaccattacattttgggcccacaaagtgggccgtcggggatcagcgcacagagttcttgggagcagcgccgttggggccccctgtctctccaccccatgtctccaccttcaagacaaggtctgcaaagggttttggggctcgaggcccagacgtgctgagtccggccatggtagccctctccaacaagctgaagctgaagcgacagctggagtatgaagagcaagccttccaggacctgagcgggggggacccacctggtggcagcacctcacatttgatgtggaaacggatgaagaacctcaggggtgggagctgccctttgatgccggacaagccactgagcgcaaatgtacccaatgcctccatctgccatcagtcccggggagaacagcaagagcaggttccccccacagtgctacgccacccagtaccaggactacagcctgtcgtcagcccacaaggtgtcaggcatggcaagccggctgctcgggccctcatttgagtcctacctgctgcccgaactgaccagatatgactgtgaggtgaacgtgcccgtgctgggaagctccacgctcctgcaaggaggggacctcctcagagccctggaccaggccacctgagccaggccttctacctgggcagcacctctgccgacgccgtcccaccagcttcactctctccgtctgtttttgcaactaggtatttctaacgccagcacactatttacaagatggacttacctggcagacttgcccaggtcaccaagcagtggcctttttctgagatgctcactttattatccctatttttaaagtacacaattgttttacctgttctgaaatgttcttaaattttgtaggatttttttcctccccaccttcaatgacttctaatttatattatccataggtttctctccctccttctccttctcacacacaactgtccatactaacaagtttggtgcatgtctgttcttctgtagggagaagctttagcttcattttactaaaaagattcctcgttattgttgttgccaaagagaaacaaaaatgattttgctttccaagcttggtttgtggcgtctccctcgcagagcccttctcgtttcttttttaaactaatcaccatattgtaaatttcagggtttttttttttttgtttaagctgactctt

SEQ ID NO: 376697 - DNA, 3375 bp, Homo sapiens
cggaccgccacacgggtccggtgcccgctgcgcttccgccccagcgctcctgaggcggccgtacaatcctcggcagtgtcctgagactgtatggtcagctcagcccggcctccgactccttccgactcccagcattcgagccacttttttttttctttgaaaactcagaaaagtgactccttttccagggaaaaaggaacttgggttcccttctctccgtcctcttttcgggtctgacagcctccacccactccttccccggaccccgcctccgcgcgcaggttcctcccagtcacctttctccacccccgcccccgcacctagcccgccgcgcgccaccttccacctgactgcgcggggcgctcgggacctgcgcgcacctcggaccttcaccacccgcccgggccgcggggagcggacgagggccacagccccccacccgccaggagcccaggtgctcggcgtctgaacgtctcaaagggccacagcgacaatgacagctgacaaggagaagaaaaggagtagctcggagaggaggaaggagaagtcccgggatgctgcgcggtgccggcggagcaaggagacggaggtgttctatgagctggcccatgagctgcctctgccccacagtgtgagctcccatctggacaaggcctccatcatgcgactggcaatcagcttcctgcgaacacacaagctcctctcctcagtttgctctgaaaacgagtccgaagccgaagctgaccagcagatggacaacttgtacctgaaagccttggagggtttcattgccgtggtgacccaagatggcgacatgatctttctgtcagaaaacatcagcaagttcatgggacttacacaggtggagctaacaggacatagtatctttgacttcactcatccctgcgaccatgaggagattcgtgagaacctgagtctcaaaaatggctctggttttgggaaaaaaagcaaagacatgtccacagagcgggacttcttcatgaggatgaagtgcacggtcaccaacagaggccgtactgtcaacctcaagtcagccacctggaaggtcttgcactgcacgggccaggtgaaagtctacaacaactgccctcctcacaatagtctgtgtggctacaaggagcccctgctgtcctgcctcatcatcatgtgtgaaccaatccagcacccatcccacatggacatccccctggatagcaagaccttcctgagccgccacagcatggacatgaagttcacctactgtgatgacagaatcacagaactgattggttaccaccctgaggagctgcttggccgctcagcctatgaattctaccatgcgctagactccgagaacatgaccaagagtcaccagaacttgtgcaccaagggtcaggtagtaagtggccagtaccggatgctcgcaaagcatgggggctacgtgtggctggagacccaggggacggtcatctacaaccctcgcaacctgcagccccagtgcatcatgtgtgtcaactacgtcctgagtgagattgagaagaatgacgtggtgttctccatggaccagactgaatccctgttcaagccccacctgatggccatgaacagcatctttgatagcagtggcaagggggctgtgtctgagaagagtaacttcctattcaccaagctaaaggaggagcccgaggagctggcccagctggctcccaccccaggagacgccatcatctctctggatttcgggaatcagaacttcgaggagtcctcagcctatggcaaggccatcctgcccccgagccagccatgggccacggagttgaggagccacagcacccagagcgaggctgggagcctgcctgccttcaccgtgccccaggcagctgccccgggcagcaccacccccagtgccaccagcagcagcagcagctgctccacgcccaatagccctgaagactattacacatctttggataacgacctgaagattgaagtgattgagaagctcttcgccatggacacagaggccaaggaccaatgcagtacccagacggatttcaatgagctggacttggagacactggcaccctatatccccatggacggggaagacttccagctaagccccatctgccccgaggagcggctcttggcggagaacccacagtccaccccccagcactgcttcagtgccatgacaaacatcttccagccactggcccctgtagccccgcacagtcccttcctcctggacaagtttcagcagcagctggagagcaagaagacagagcccgagcaccggcccatgtcctccatcttgtctgcaaagggttttggggctcgaggcccagacgtgctgagtccggccatggtagccctctccaacaagctgaagctgaagcgacagctggagtatgaagagcaagccttccaggacctgagcgggggggacccacctggtggcagcacctcacatttgatgtggaaacggatgaagaacctcaggggtgggagctgccctttgatgccggacaagccactgagcgcaaatgtacccaatgcctccatctgccatcagtcccggggagaacagcaagagcaggttccccccacagtgctacgccacccagtaccaggactacagcctgtcgtcagcccacaaggtgtcaggcatggcaagccggctgctcgggccctcatttgagtcctacctgctgcccgaactgaccagatatgactgtgaggtgaacgtgcccgtgctgggaagctccacgctcctgcaaggaggggacctcctcagagccctggaccaggccacctgagccaggccttctacctgggcagcacctctgccgacgccgtcccaccagcttcactctctccgtctgtttttgcaactaggtatttctaacgccagcacactatttacaagatggacttacctggcagacttgcccaggtcaccaagcagtggcctttttctgagatgctcactttattatccctatttttaaagtacacaattgttttacctgttctgaaatgttcttaaattttgtaggatttttttcctccccaccttcaatgacttctaatttatattatccataggtttctctccctccttctccttctcacacacaactgtccatactaacaagtttggtgcatgtctgttcttctgtagggagaagctttagcttcattttactaaaaagattcctcgttattgttgttgccaaagagaaacaaaaatgattttgctttccaagcttggtttgtggcgtctccctcgcagagcccttctcgtttcttttttaaactaatcaccatattgtaaatttcagggtttttttttttttgtttaagctgactctt

SEQ ID NO: 376698 - DNA, 1279 bp, Homo sapiens
ttgccaggctggagtgcagtggctattcacaggcgcgatcccactactgatcagcacgggagttttgacctgctccgtttccgacctgtccttgttattctgttgtgaccacacatttgactgctgtcaggatgtttatgctttgggtttcactggtcaaggtcatccttcatgttctcttcagagaggtttcatttgacacaaatgctaggtactccctaaaagctgaagctgaagcgacagctggagtatgaagagcaagccttccaggacctgagcgggggggacccacctggtggcagcacctcacatttgatgtggaaacggatgaagaacctcaggggtgggagctgccctttgatgccggacaagccactgagcgcaaatgtacccaatgataagttcacccaaaaccccatgaggggcctgggccatcccctgagacatctgccgctgccacagcctccatctgccatcagtcccggggagaacagcaagagcaggttccccccacagtgctacgccacccagtaccaggactacagcctgtcgtcagcccacaaggtgtcaggcatggcaagccggctgctcgggccctcatttgagtcctacctgctgcccgaactgaccagatatgactgtgaggtgaacgtgcccgtgctgggaagctccacgctcctgcaaggaggggacctcctcagagccctggaccaggccacctgagccaggccttctacctgggcagcacctctgccgacgccgtcccaccagcttcactctctccgtctgtttttgcaactaggtatttctaacgccagcacactatttacaagatggacttacctggcagacttgcccaggtcaccaagcagtggcctttttctgagatgctcactttattatccctatttttaaagtacacaattgttttacctgttctgaaatgttcttaaattttgtaggatttttttcctccccaccttcaatgacttctaatttatattatccataggtttctctccctccttctccttctcacacacaactgtccatactaacaagtttggtgcatgtctgttcttctgtagggagaagctttagcttcattttactaaaaagattcctcgttattgttgttgccaaagagaaacaaaaatgattttgctttccaagcttggtttgtggcgtctccctcgcagagcccttctcgtttcttttttaaactaatcaccatattgtaaatttcagggtttttttttttttgtttaagctgactctt

SEQ ID NO: 376699 - DNA, 1725 bp, Homo sapiens
cggaccgccacacgggtccggtgcccgctgcgcttccgccccagcgctcctgaggcggccgtacaatcctcggcagtgtcctgagactgtatggtcagctcagcccggcctccgactccttccgactcccagcattcgagccacttttttttttctttgaaaactcagaaaagtgactccttttccagggaaaaaggaacttgggttcccttctctccgtcctcttttcgggtctgacagcctccacccactccttccccggaccccgcctccgcgcgcaggttcctcccagtcacctttctccacccccgcccccgcacctagcccgccgcgcgccaccttccacctgactgcgcggggcgctcgggacctgcgcgcacctcggaccttcaccacccgcccgggccgcggggagcggacgagggccacagccccccacccgccaggagcccaggtgctcggcgtctgaacgtctcaaagggccacagcgacaatgacagctgacaaggagaagaaaaggagtagctcggagaggaggaaggagaagtcccgggatgctgcgcggtgccggcggagcaaggagacggaggtgttctatgagctggcccatgagctgcctctgccccacagtgtgagctcccatctggacaaggcctccatcatgcgactggcaatcagcttcctgcgaacacacaagctcctctcctcagtttgctctgaaaacgagtccgaagccgaagctgaccagcagatggacaacttgtacctgaaagccttggagggtttcattgccgtggtgacccaagatggcgacatgatctttctgtcagaaaacatcagcaagttcatgggacttacacaggtggagctaacaggacatagtatctttgacttcactcatccctgcgaccatgaggagattcgtgagaacctgagtctcaaaaatggtatccttaattgtgtttacttccttcttgcccccactgggtgggaatctgcctcccctttgtctacgggtataagggagatagctcatggcccttgtgatgcaggaaaaatggatgtccttaaaaaatttaagtatgtagcctgtgagatgagattggggcattgagaggatccagtactcagaaatatctcctgctggccctgcatggtgcctggtgtcccactactaggggacacctttgggttaggacactgtctctaggaggtttcatcacccaagagtcaagcatctctgccaaatgacaccacccaaaccaatgaggaactagtctgtgccaaagtgctcatagtaactactgtagttatctattgctgtctaacaaaccacctataacatagggctttgatgattatctcccagggttctgtgggttcagtgggtgggtcttgtactccatgtgatgtcagctgggctgcagtcatctgggggccagactaggctggggtgatcaggatagctcacacacgtctgggaccttgtggcaggtggctggaaccctggactcagttggcatgctgggacaacaggactgttctctcactctatggagactcagagactctccctctccatatggtgtctctagggtagccagacatcttacgtggcagtttagggctcccagaagcactaaagtggaagctgccaggccttctgaaggctttgtccccagattggcagagcatcacttctgccccatcttgttggttagagca

SEQ ID NO: 376700 - DNA, 1008 bp, Homo sapiens
cggaccgccacacgggtccggtgcccgctgcgcttccgccccagcgctcctgaggcggccgtacaatcctcggcagtgtcctgagactgtatggtcagctcagcccggcctccgactccttccgactcccagcattcgagccacttttttttttctttgaaaactcagaaaagtgactccttttccagggaaaaaggaacttgggttcccttctctccgtcctcttttcgggtctgacagcctccacccactccttccccggaccccgcctccgcgcgcaggttcctcccagtcacctttctccacccccgcccccgcacctagcccgccgcgcgccaccttccacctgactgcgcggggcgctcgggacctgcgcgcacctcggaccttcaccacccgcccgggccgcggggagcggacgagggccacagccccccacccgccaggagcccaggtgctcggcgtctgaacgtctcaaagggccacagcgacaatgacagctgacaaggagaagaaaaggagtagctcggagaggaggaaggagaagtcccgggatgctgcgcggtgccggcggagcaaggagacggaggtgttctatgagctggcccatgagctgcctctgccccacagtgtgagctcccatctggacaaggcctccatcatgcgactggcaatcagcttcctgcgaacacacaagctcctctcctcagcagtgacctttaccgtgaatccagctgtgagaggagggcagggacaggaccagggaagaacatgggcacccagaggctgtggagaacacgggctgggagaaccaaggacggcttttgctgacttctcaatttgttgccatctggccataagacccatcctccacactagattgagtccgcaggaagcattctaatccttaacttccagtgccttctccagaacagcaagaaggtgtgcccggatgatcttttccctctgagaagccagttaggccaagtaaatcatttagtctctctg

SEQ ID NO: 376701 - DNA, 372 bp, Homo sapiens
gtagttgagaccacagatgtaccccaccacactcagctaatttttgtatttttagtagagacgggggtttcaccatgtttcccaggctggtcttaaactcctgagctcaaacgatccccctacgttggcctcctaaagtgctgggactacaggtgtgagccactgtgcctggccttaattcagcaaacatttccatgaaaggttttcttcatgcctggtactgtgctcagactttgggatacaaaaacaaacaaacaaaaaaactcacagtcttggctttttttttttgagacggagtcactctctcttccccaggctggagtgcaatggtgcgatctctgctcaatgcaacctccacctcccaggctcaag

SEQ ID NO: 376702 - DNA, 460 bp, Homo sapiens
cgccatatatgaacatatgtgataacgaatggtgtggaaagtttggtgtttctgcatgatcatgattctcttacttaaaaagttaataccactaagtggtaaaaagacagataaggctaacgtccacagggaagtctattatggaaaagagaagagcaaggtgggtggatgaattaaaaattaaaatactacctcattctgagtattttttaaaatttaaaccacattatgcacttattcttgacttactactctgatccatttattaataactgaatgagatagccctgacatcttttcttctgtaaatacaaaatcaaatgaatcagacgttattcataaattaaaaacatgagactataatatctagtgcttatcacaataaacatggaacatgtttctgaaaattggaagtcagaatgatttgatcattaagccctaatttcagatggaaataaaa

SEQ ID NO: 376703 - DNA, 402 bp, Homo sapiens
actatagattatcttatttcctcctaagggtttaaaagtgaaaactccagccaaaggagtgattagtggattggcctcagacagggattcactaaggggtctgtgatccctggattctcagtcctcacatggccggaaccaacatagatgaggctggccttggcccctcccagtacgtatgaccaaacattttcccaaaggaaaatgagcccacagccaaataactggacagttgaggaggaaaagtctacacaagcagcacgtatcatctgatcacacatgttgaagcagaaggtcccaaaatctaataatgctccttaaataggagacaagagaaaatgttagcaatatgcagcaagaacaagatatcattaaaacaaactaagtgaaaatattaggtag

SEQ ID NO: 376704 - DNA, 519 bp, Homo sapiens
gtttttttctagttttttttttcctgctacaaacaatgctgcaacaaacactcttatgcataaacccttagaagccagtgcttttgttggatagattcccaggagtgtttattgctatgttaaatggtatgtgtacattttattctaatagatcttaccagattgtagacagtagattttaagtaagttgatttttaaaaaaataaaaagcagaatcccatagagctgctaaaattctcatttccttattcctttccagagaatctccttcattatctttgagacaaacatgagcaaaatccatttatttatttcaacagataatctatgatgaagaatttcaggaatttatttgccacaaagagatagcaattcacgggccaaacagttgagtaagtgccccttaaatcacaaagtaacccaagtaacctggcattttgtgcatatatcctcttacttctgttttgctagaggcagtaggactagggtggcatgctggtggccaaaccacaccactgg

SEQ ID NO: 376705 - DNA, 342 bp, Homo sapiens
ggttcaagcaattctctgcctcagcctcctgagtagctgggattacaggcacccaccaccatgcccagctaatttttgtatttttagtagagatggggtaacaccatcttggccaagctggtcttgaactcctgacctcataatctacccacctcggcctcccaaagtgccgagattacaggcatgagccaccacgcccggcctggagcaccattttttttttttttaaagcagaatacatactttattctttaaaatttcttctctctttttttttaaactttttttagtatttattgatcattcttgggtgtttctcgagagggggaatttggcagggtc

SEQ ID NO: 376706 - DNA, 170 bp, Homo sapiens
gcctacaagaaagtttgcctatctggggcgcctggctcacgaggttggctggaagtaccaggcagtgacagccaccctggaggagaagaggaaagagaaagccaagatccactaccggaagaagaaacagctcatgaggctacggaaacaggccgagaagaacatggaga

SEQ ID NO: 376707 - DNA, 210 bp, Homo sapiens
actagtccacggttggctactagtccacggttggctactagtccacggttggctactagtccacggttggctactagtccacggttggctggaagtaccaggcagtgacagccaccctggaggagaagaggaaagagaaagccaagatccactaccggaagaagaaacagctcatgaggctacggaaacaggccgagaagaacatggaga

SEQ ID NO: 376708 - DNA, 361 bp, Homo sapiens
catccccattgctgcctcctcaaaccagagcataaccatccctacgtcggttcatccagtacttcctagctggtcctcttgctctgttcactcttgcctctgttcaatctattctctccacagtactcagaattcttcaaatataagtcaaatcattcttaaagcactctaggaaattcttaatgctatttaaagtggaccataaagcctttcttgatctgctccctgcctgttttttcatcctctcttttgccctctctcctgccagggctgtcacacgtggtgtctcctttgtctgtggcattgttctcactgtgggttctcagctggttaattcatactaaaccttctggcctcaact

SEQ ID NO: 376709 - DNA, 1596 bp, Homo sapiens
agcggggtgctgggcgggaggcgcacgcgcagaactgttggccacccgaccgcccgccccttcctctggcgtccaaggtgatatcgcgcgaggttcgcagccaataaggaggcggatgtgacggcccgtttgcagccgccggcagctactgcaaggcaaaagccggagtggacgtgtcttttgaaactgctgctctttcacttctcaggcgtcaccgagagctcagcacccaggctgaactctgtaccatttggaagaatggaagctgatgcatctgttgacatgttttccaaagtcctggagcatcagctgcttcagactaccaaactggtggaagaacatttggattctgaaattcaaaaactggatcagatggatgaggatgaattggaacgccttaaagaaaagagactccaggcactaaggaaagctcaacagcagaaacaagaatggctttctaaaggacatggggaatacagagaaatccctagtgaaagagacttttttcaagaagtcaaggagagtgaaaatgtggtttgccatttctacagagactccacattcaggtgtaaaatactagacagacatctggcaatattgtccaagaaacacctcgagaccaaatttttgaagctgaatgtggaaaaagcacctttcctttgtgagagactgcatatcaaagtcattcccacactagcactgctaaaagatgggaaaacacaagattatgttgttgggtttactgacctaggaaatacagatgacttcaccacagaaactttagaatggaggctcggttcttctgacattcttaattacagtggaaatttaatggagccaccatttcagaaccaaaagaaatttggaacaaacttcacaaagctggaaaagaaaactatccgaggaaagaaatatgattcagactctgatgatgattagagctcaataattctttgtaaattgtctttttttttctgcttcagatttaaatgtgtttttaaaattctattaatgtctatacattggtcacctaaatactcatattctcgagttttatacagttgtatcacatcgaaaagtgtctttactgttttctgtgtggccatcatgtttaagttgaggaaaactcagttcttaaattatctgggaagggtctggattctctatttttgagattgactttatcacaatatgattcttacatctttataccatttacaattgtgttttagatctacagagttagaaattcgaaaactattccaggactaattcttaatcggcattatttatacaagaggtcaagtaacatttactagcgcaatactgcacttgtaaatgaattataaacgctcttctggaatatatttaaataaccattaaagaactgcttattcattctggacactgcatgttgatgttgaatcaactgatgccagcagaaagctattttgatttgtgaacatactgccttatttaaagggtcctgattgcttgtattttaagacattcattaaaaagaaaccaggaaacacttttgaaataacagcataaggaacttcactgtctctgctcaataaaatacctgtaactgga

SEQ ID NO: 376710 - DNA, 1634 bp, Homo sapiens
agcggggtgctgggcgggaggcgcacgcgcagaactgttggccacccgaccgcccgccccttcctctggcgtccaaggtgatatcgcgcgaggttcgcagccaataaggaggcggatgtgacggcccgtttgcagccgccggcagctactgcaaggcaaaagccggagtggacgtgtcttttgaaactgctgctctttcacttctcaggcgtcaccgagagctcagcacccaggctgaactctgtaccatttggaagaatggaagctgatgcatctgttgacatgttttccaaagtcctggagcatcagctgcttcagactaccaaactggtggaagaacatttggattctgaaattcaaaaactggatcagatggatgaggatgaattggaacgccttaaagaaaagagactccaggcactaaggaaagctcaacagcagaaacaagtaacctctctgccctgctttctgaaattgctataacagaatggctttctaaaggacatggggaatacagagaaatccctagtgaaagagacttttttcaagaagtcaaggagagtgaaaatgtggtttgccatttctacagagactccacattcaggtgtaaaatactagacagacatctggcaatattgtccaagaaacacctcgagaccaaatttttgaagctgaatgtggaaaaagcacctttcctttgtgagagactgcatatcaaagtcattcccacactagcactgctaaaagatgggaaaacacaagattatgttgttgggtttactgacctaggaaatacagatgacttcaccacagaaactttagaatggaggctcggttcttctgacattcttaattacagtggaaatttaatggagccaccatttcagaaccaaaagaaatttggaacaaacttcacaaagctggaaaagaaaactatccgaggaaagaaatatgattcagactctgatgatgattagagctcaataattctttgtaaattgtctttttttttctgcttcagatttaaatgtgtttttaaaattctattaatgtctatacattggtcacctaaatactcatattctcgagttttatacagttgtatcacatcgaaaagtgtctttactgttttctgtgtggccatcatgtttaagttgaggaaaactcagttcttaaattatctgggaagggtctggattctctatttttgagattgactttatcacaatatgattcttacatctttataccatttacaattgtgttttagatctacagagttagaaattcgaaaactattccaggactaattcttaatcggcattatttatacaagaggtcaagtaacatttactagcgcaatactgcacttgtaaatgaattataaacgctcttctggaatatatttaaataaccattaaagaactgcttattcattctggacactgcatgttgatgttgaatcaactgatgccagcagaaagctattttgatttgtgaacatactgccttatttaaagggtcctgattgcttgtattttaagacattcattaaaaagaaaccaggaaacacttttgaaataacagcataaggaacttcactgtctctgctcaataaaatacctgtaactgga

SEQ ID NO: 376711 - DNA, 1476 bp, Homo sapiens
agcggggtgctgggcgggaggcgcacgcgcagaactgttggccacccgaccgcccgccccttcctctggcgtccaaggtgatatcgcgcgaggttcgcagccaataaggaggcggatgtgacggcccgtttgcagccgccggcagctactgcaaggcaaaagccggagtggacgtgtcttttgaaactgctgcttcagactaccaaactggtggaagaacatttggattctgaaattcaaaaactggatcagatggatgaggatgaattggaacgccttaaagaaaagagactccaggcactaaggaaagctcaacagcagaaacaagaatggctttctaaaggacatggggaatacagagaaatccctagtgaaagagacttttttcaagaagtcaaggagagtgaaaatgtggtttgccatttctacagagactccacattcaggtgtaaaatactagacagacatctggcaatattgtccaagaaacacctcgagaccaaatttttgaagctgaatgtggaaaaagcacctttcctttgtgagagactgcatatcaaagtcattcccacactagcactgctaaaagatgggaaaacacaagattatgttgttgggtttactgacctaggaaatacagatgacttcaccacagaaactttagaatggaggctcggttcttctgacattcttaattacagtggaaatttaatggagccaccatttcagaaccaaaagaaatttggaacaaacttcacaaagctggaaaagaaaactatccgaggaaagaaatatgattcagactctgatgatgattagagctcaataattctttgtaaattgtctttttttttctgcttcagatttaaatgtgtttttaaaattctattaatgtctatacattggtcacctaaatactcatattctcgagttttatacagttgtatcacatcgaaaagtgtctttactgttttctgtgtggccatcatgtttaagttgaggaaaactcagttcttaaattatctgggaagggtctggattctctatttttgagattgactttatcacaatatgattcttacatctttataccatttacaattgtgttttagatctacagagttagaaattcgaaaactattccaggactaattcttaatcggcattatttatacaagaggtcaagtaacatttactagcgcaatactgcacttgtaaatgaattataaacgctcttctggaatatatttaaataaccattaaagaactgcttattcattctggacactgcatgttgatgttgaatcaactgatgccagcagaaagctattttgatttgtgaacatactgccttatttaaagggtcctgattgcttgtattttaagacattcattaaaaagaaaccaggaaacacttttgaaataacagcataaggaacttcactgtctctgctcaataaaatacctgtaactgga

SEQ ID NO: 376712 - DNA, 1539 bp, Homo sapiens
gggcactcgacgatacgtactgcaagggaaaacccggagtggactgtgtcattggtgaatactgcgtgcttccttatcgaacgtatctctagggtcgatgacctgaagtaggcctcgagactatcctcaaggccatagtaaactcatgtgaccccagtgttgggcaagcacatggcagatgtcttgaatgcaatactgctaggatcgagtaggttttctcgcagagatgctctctagcgtaggcaatctagtcagcttcagactaccaaactggtggaagaacatttggattctgaaattcaaaaactggatcagatggatgaggatgaattggaacgccttaaagaaaagagactccaggcactaaggaaagctcaacagcagaaacaagaatggctttctaaaggacatggggaatacagagaaatccctagtgaaagagacttttttcaagaagtcaaggagagtgaaaatgtggtttgccatttctacagagactccacattcaggtgtaaaatactagacagacatctggcaatattgtccaagaaacacctcgagaccaaatttttgaagctgaatgtggaaaaagcacctttcctttgtgagagactgcatatcaaagtcattcccacactagcactgctaaaagatgggaaaacacaagattatgttgttgggtttactgacctaggaaatacagatgacttcaccacagaaactttagaatggaggctcggttcttctgacattcttaattacagtggaaatttaatggagccaccatttcagaaccaaaagaaatttggaacaaacttcacaaagctggaaaagaaaactatccgaggaaagaaatatgattcagactctgatgatgattagagctcaataattctttgtaaattgtctttttttttctgcttcagatttaaatgtgtttttaaaattctattaatgtctatacattggtcacctaaatactcatattctcgagttttatacagttgtatcacatcgaaaagtgtctttactgttttctgtgtggccatcatgtttaagttgaggaaaactcagttcttaaattatctgggaagggtctggattctctatttttgagattgactttatcacaatatgattcttacatctttataccatttacaattgtgttttagatctacagagttagaaattcgaaaactattccaggactaattcttaatcggcattatttatacaagaggtcaagtaacatttactagcgcaatactgcacttgtaaatgaattataaacgctcttctggaatatatttaaataaccattaaagaactgcttattcattctggacactgcatgttgatgttgaatcaactgatgccagcagaaagctattttgatttgtgaacatactgccttatttaaagggtcctgattgcttgtattttaagacattcattaaaaagaaaccaggaaacacttttgaaataacagcataaggaacttcactgtctctgctcaataaaatacctgtaactgga

SEQ ID NO: 376713 - DNA, 1695 bp, Homo sapiens
agcggggtgctgggcgggaggcgcacgcgcagaactgttggccacccgaccgcccgccccttcctctggcgtccaaggtgatatcgcgcgaggttcgcagccaataaggaggcggatgtgacggcccgtttgcagccgccggcagctactgcaaggcaaaagccggagtggacgtgtcttttgaaactgctgctctttcacttctcaggcgtcaccgagagctcagcacccaggctgaactctgtaccatttggaagaatggaagctgatgcatctgttgacatgttttccaaagtcctggagcatcagctgcttcagactaccaaactggtggaagaacatttggattctgaaattcaaaaactggatcagatggatgaggatgaattggaacgccttaaagaaaagagactccaggcactaaggaaagctcaacagcagaaacaagaatggctttctaaaggacatggggaatacagagaaatccctagtgaaagagacttttttcaagaagtcaaggagagtgaaaatgtggtttgccatttctacagagactccacattcagcgttgcatatttaggagtaagaagtttttcctcggtaatgctgttcagtttttcttcatgacttccaaatatggcaccatgtgtgcacttctgattcttgtgtaaaatactagacagacatctggcaatattgtccaagaaacacctcgagaccaaatttttgaagctgaatgtggaaaaagcacctttcctttgtgagagactgcatatcaaagtcattcccacactagcactgctaaaagatgggaaaacacaagattatgttgttgggtttactgacctaggaaatacagatgacttcaccacagaaactttagaatggaggctcggttcttctgacattcttaattacagtggaaatttaatggagccaccatttcagaaccaaaagaaatttggaacaaacttcacaaagctggaaaagaaaactatccgaggaaagaaatatgattcagactctgatgatgattagagctcaataattctttgtaaattgtctttttttttctgcttcagatttaaatgtgtttttaaaattctattaatgtctatacattggtcacctaaatactcatattctcgagttttatacagttgtatcacatcgaaaagtgtctttactgttttctgtgtggccatcatgtttaagttgaggaaaactcagttcttaaattatctgggaagggtctggattctctatttttgagattgactttatcacaatatgattcttacatctttataccatttacaattgtgttttagatctacagagttagaaattcgaaaactattccaggactaattcttaatcggcattatttatacaagaggtcaagtaacatttactagcgcaatactgcacttgtaaatgaattataaacgctcttctggaatatatttaaataaccattaaagaactgcttattcattctggacactgcatgttgatgttgaatcaactgatgccagcagaaagctattttgatttgtgaacatactgccttatttaaagggtcctgattgcttgtattttaagacattcattaaaaagaaaccaggaaacacttttgaaataacagcataaggaacttcactgtctctgctcaataaaatacctgtaactgga

SEQ ID NO: 376714 - DNA, 636 bp, Homo sapiens
  misc_feature (572)..(572): n is a, c, g, or t
  misc_feature (619)..(619): n is a, c, g, or t
  misc_feature (633)..(633): n is a, c, g, or t
agcggggtgctgggcgggaggcgcacgcgcagaactgttggccacccgaccgcccgccccttcctctggcgtccaaggtgatatcgcgcgaggttcgcagccaataaggaggcggatgtgacggcccgtttgcagccgccggcagctactgcaaggcaaaagccggagtggacgtgtcttttgaaactgctgctctttcacttctcaggcgtcaccgagagctcagcacccaggctgaactctgtaccatttggaagaatggaagctgatgcatctgttgacatgttttccaaagtcctggagcatcagctgcttcagactaccaaactggtggaagaacatttggattctgaaattcaaaaactggatcagatggatgaggatgaattggaacgccttaaagaaaagagactccaggcactaaggaaagctcaacagcagaaacaagaatggctttctaaaggacatggggaatacagagaaatccctagtgaaagagacttttttcaagaagtcaaggagagtgaaaatgtggtttgccatttctacagagactccacattcagagacancatctggcatatgtccagaacactcggaccttttgagcgatgtggcncttccttttgaggnggc

SEQ ID NO: 376715 - DNA, 877 bp, Homo sapiens
agcggggtgctgggcgggaggcgcacgcgcagaactgttggccacccgaccgcccgccccttcctctggcgtccaaggtgatatcgcgcgaggttcgcagccaataaggaggcggatgtgacggcccgtttgcagccgccggcagctactgcaaggcaaaagccggagtggacgtgtcttttgaaactgctgctctttcacttctcaggcgtcaccgagagctcagcacccaggctgaactctgtaccatttggaagaatggaagctgatgcatctgttgacatgttttccaaagtcctggagcatcagctgcttcagactaccaaactggtggaagaacatttggattctgaaattcaaaaactggatcagatggatgaggatgaattggaacgccttaaagaaaagagactccaggcactaaggaaagctcaacagcagaaacaagaatggctttctaaaggacatggggaatacagagaaatccctagtgaaagagacttttttcaagaagtcaaggagagtgaaaatgtggtttgccatttctacagagactccacattcaggtgtaaaatactagacagacatctggcaatattgtccaagaaacacctcgagaccaaatttttgaagctgaatgtggaaaaagcacctttcctttgtgagagactgcatatcaaagtcattcccacactagcactgctaaaagatgggaaaacacaagattatgttgttgggtttactgacctaggaaatacagatgacttcaccacagaaactttagaatggaggctcggttcttctgacattcttaattacaggtggtggccctagggccgtaggttgctggcccctgttctgaaccaccgagagatac

SEQ ID NO: 376716 - DNA, 1002 bp, Homo sapiens
agcggggtgctgggcgggaggcgcacgcgcagaactgttggccacccgaccgcccgccccttcctctggcgtccaaggtgatatcgcgcgaggttcgcagccaataaggaggcggatgtgacggcccgtttgcagccgccggcagctactgcaaggcaaaagccggagtggacgtgtcttttgaaactgctgctctttcacttctcaggcgtcaccgagagctcagcacccaggctgaactctgtaccatttggaagaatggaagctgatgcatctgttgacatgttttccaaagtcctggagcatcagctgcttcagactaccaaactggtggaagaacatttggattctgaaattcaaaaactggatcagatggatgaggatgaattggaacgccttaaagaaaagagactccaggcactaaggaaagctcaacagcagaaacaagaatggctttctaaaggacatggggaatacagagaaatccctagtgaaagagacttttttcaagaagtcaaggagagtgaaaatgtggtttgccatttctacagagactccacattcaggtgtaaaatactagacagacatctggcaatattgtccaagaaacacctcgagaccaaatttttgaagctgaatgtggaaaaagcacctttcctttgtgagagactgcatatcaaagtcattcccacactagcactgctaaaagatgggaaaacacaagattatgttgttgggtttactgacctaggaaatacagatgacttcaccacagaaactttagaatggaggctcggtctcggctcttatacgggactttaggggcccttccgaacaaagaatgggacaacttcaagtggaagaacatcccggaagattggtctgccccgatgacgaccacactggcaggccgttgagcacatcggtgacatatgtgatcggccagccattcgtaggcacacgcgtgcgtgccgtagagcctcagggggcggacactccagc

SEQ ID NO: 376717 - DNA, 2060 bp, Homo sapiens
agcggggtgctgggcgggaggcgcacgcgcagaactgttggccacccgaccgcccgccccttcctctggcgtccaaggtgatatcgcgcgaggttcgcagccaataaggaggcggatgtgacggcccgtttgcagccgccggcagctactgcaaggcaaaagccggagtggacgtgtcttttgaaactgctgctctttcacttctcaggcgtcaccgagagctcagcacccaggctgaactctgtaccatttggaagaatggaagctgatgcatctgttgacatgttttccaaagtcctggagcatcagctgcttcagactaccaaactggtggaagaacatttggattctgaaattcaaaaactggatcagatggatgaggatgaattggaacgccttaaagaaaagagactccaggcactaaggaaagctcaacagcagaaacaagaatggctttctaaaggacatggggaatacagagaaatccctagtgaaagagacttttttcaagaagtcaaggagagtgaaaatgtggtttgccatttctacagagactccacattcaggtgtaaaatactagacagacatctggcaatattgtccaagaaacacctcgagaccaaatttttgaagctgaatgtggaaaaagcacctttcctttgtgagagactgcatatcaaagtcattcccacactagcactgctaaaagatgggaaaacacaagattatgttgttgggtttactgacctaggaaatacagatgacttcaccacagaaactttagaatggaggctcggttcttctgacattcttaattacagtggaaatttaatggagccaccatttcagaaccaaaagaaatttggaacaaacttcacaaagctggaaaagaaaactatccgaggaaagaaatatgattcagactctgatgatgattagagctcaataattctttgtaaattgtctttttttttctgcttcagatttaaatgtgtttttaaaattctattaatgtctatacattggtcacctaaatactcatattctcgagttttatacagttgtatcacatcgaaaagtgtctttactgttttctgtgtggccatcatgtttaagttgaggaaaactcagttcttaaattatctgggaagggtctggattctctatttttgagattgactttatcacaatatgattcttacatctttataccatttacaattgtgttttagatctacagagttagaaattcgaaaactattccaggactaattcttaatcggcattatttatacaagaggtcaagtaacatttactagcgcaatactgcacttgtaaatgaattataaacgctcttctggaatatatttaaataaccattaaagaactgcttattcattctggacactgcatgttgatgttgaatcaactgatgccagcagaaagctattttgatttgtgaacatactgccttatttaaagggtcctgattgcttgtattttaagacattcattaaaaagaaaccaggaaacacttttgaaataacagcataaggaacttcactgtctctgctcaataaaatacctgtaactggaaagtttatgtggaaattgtcataaaagcatacatccaacaaaaacagtttttcaagaaagtcaatcttttagaatagggagtctgtggcattttcccactaaaatatttcacttggcactttggaggctgaggtgagtgagtcacttgaggtcaggagttcaagaccaggctggcaaacatggtgaaagtgggatgtcattgtgggttggattacatttccctgatagctatgattgagcatctttcatgtacttactggccaatggcattctttgggaagacgtacagatcttaccattttttttttggaaaggccacctcctttgccaaggaaaggaattcacgaagagacccccgcgtctacaaacagcgcgagagtcccacaaaaaaaaaagtgcccaacaacaaattgcgccaatataaaatatattatcaagcacacaatagcaaacaccaaaattaa

SEQ ID NO: 376718 - DNA, 1542 bp, Homo sapiens
agcggggtgctgggcgggaggcgcacgcgcagaactgttggccacccgaccgcccgccccttcctctggcgtccaaggtgatatcgcgcgaggttcgcagccaataaggaggcggatgtgacggcccgtttgcagccgccggcagctactgcaaggcaaaagccggagtggacgtgtcttttgaaactgctgctctttcacttctcaggcgtcaccgagagctcagcacccaggctgaactctgtaccatttggaagaatggaagctgatgcatctgttgacatgttttccaaagtcctggagcatcagctgcttcagactaccaaactggtggaagaacatttggattctgaaattcaaaaactggatcagatggatgaggatgaattggaacgccttaaagaaaagagactccaggcactaaggaaagctcaacagcagaaacaagaatggctttctaaaggacatggggaatacagagaaatccctagtgaaagagacttttttcaagaagtcaaggagagtgaaaatgtggtttgccatttctacagagactccacattcaggtgtaaaatactagacagacatctggcaatattgtccaagaaacacctcgagaccaaatttttgaagctgaatgtggaaaaagcacctttcctttgtgagagactgcatatcaaagtcattcccacactagcactgctaaaagatgggaaaacacaagattatgttgttgggtttactgacctaggaaatacagatgacttcaccacagaaactttagaatggaggctcggttcttctgacattcttaattacagtggaaatttaatggagccaccatttcagaaccaaaagaaatttggaacaaacttcacaaagctggaaaagaaaactatccgaggaaagaaatatgattcagactctgatgatgattagagctcaataattctttgtaaattgtctttttttttctgcttcagatttaaatgtgtttttttatacagttgtatcacatcgaaaagtgtctttactgttttctgtgtggccatcatgtttaagttgaggaaaactcagttcttaaattatctgggaagggtctggattctctatttttgagattgactttatcacaatatgattcttacatctttataccatttacaattgtgttttagatctacagagttagaaattcgaaaactattccaggactaattcttaatcggcattatttatacaagaggtcaagtaacatttactagcgcaatactgcacttgtaaatgaattataaacgctcttctggaatatatttaaataaccattaaagaactgcttattcattctggacactgcatgttgatgttgaatcaactgatgccagcagaaagctattttgatttgtgaacatactgccttatttaaagggtcctgattgcttgtattttaagacattcattaaaaagaaaccaggaaacacttttgaaataacagcataaggaacttcactgtctctgctcaataaaatacctgtaactgga

SEQ ID NO: 376719 - DNA, 1225 bp, Homo sapiens
agcggggtgctgggcgggaggcgcacgcgcagaactgttggccacccgaccgcccgccccttcctctggcgtccaaggtgatatcgcgcgaggttcgcagccaataaggaggcggatgtgacggcccgtttgcagccgccggcagctactgcaaggcaaaagccggagtggacgtgtcttttgaaactgctgctctttcacttctcaggcgtcaccgagagctcagcacccaggctgaactctgtaccatttggaagaatggaagctgatgcatctgttgacatgttttccaaagtcctggagcatcagctgcttcagactaccaaactggtggaagaacatttggattctgaaattcaaaaactggatcagatggatgaggatgaattggaacgccttaaagaaaagagactccaggcactaaggaaagctcaacagcagaaacaagaatggctttctaaaggacatggggaatacagagaaatccctagtgaaagagacttttttcaagaagtcaaggagagtgaaaatgtggtttgccatttctacagagactccacattcaggtgtaaaatactagacagacatctggcaatattgtccaagaaacacctcgagaccaaatttttgaagctgaatgtggaaaaagcacctttcctttgtgagagactgcatatcaaagtcattcccacactagcactgctaaaagatgggaaaacacaagattatgttgttgggtttactgacctaggaaatacagatgacttcaccacagaaactttagaatggaggctcggttcttctgacattcttaattacaggtaacttttaacaaaagaagagattgattttaattcatatatagttgatatttttacaaaagatttttgtattgtaacatttattttatgaaattaaggcattttggctgagatgtggaaagtttctcaaaggaaaagcatgtttttttgaagtgtgtaatattagcgtgattttacggcaaaatcagatttacagattaaactgatttaataggtaaaactgagtctcaccgtactcctgactataaaagttttcagcttaacgtatactattgacactaattttgtattaatctggaaacttaaaatggcaatccagtgttgactattccccaatttaagccagattgctcaaatgaattctgacttaagtgattctctttgataaaataaaaattaaaagc

SEQ ID NO: 376720 - DNA, 1737 bp, Homo sapiens
agcggggtgctgggcgggaggcgcacgcgcagaactgttggccacccgaccgcccgccccttcctctggcgtccaaggtgatatcgcgcgaggttcgcagccaataaggaggcggatgtgacggcccgtttgcagccgccggcagctactgcaaggcaaaagccggagtggacgtgtcttttgaaactgctgctctttcacttctcaggcgtcaccgagagctcagcacccaggctgaactctgtaccatttggaagaatggaagctgatgcatctgttgacatgttttccaaagtcctggagcatcagctgcttcagactaccaaactggtggaagaacatttggattctgaaattcaaaaactggatcagatggatgaggatgaattggaacgccttaaagaaaagagactccaggcactaaggaaagctcaacagcagaaacaaatggagtctcgctgtgacaccctggctggagtacagtggtgtcatctcaactcactgcaacctccgcttcccggcttcaagcaattattctgcctcagccacccgagtagctgggactacaggcgcacaccaccatgcctggaatggctttctaaaggacatggggaatacagagaaatccctagtgaaagagacttttttcaagaagtcaaggagagtgaaaatgtggtttgccatttctacagagactccacattcaggtgtaaaatactagacagacatctggcaatattgtccaagaaacacctcgagaccaaatttttgaagctgaatgtggaaaaagcacctttcctttgtgagagactgcatatcaaagtcattcccacactagcactgctaaaagatgggaaaacacaagattatgttgttgggtttactgacctaggaaatacagatgacttcaccacagaaactttagaatggaggctcggttcttctgacattcttaattacagtggaaatttaatggagccaccatttcagaaccaaaagaaatttggaacaaacttcacaaagctggaaaagaaaactatccgaggaaagaaatatgattcagactctgatgatgattagagctcaataattctttgtaaattgtctttttttttctgcttcagatttaaatgtgtttttaaaattctattaatgtctatacattggtcacctaaatactcatattctcgagttttatacagttgtatcacatcgaaaagtgtctttactgttttctgtgtggccatcatgtttaagttgaggaaaactcagttcttaaattatctgggaagggtctggattctctatttttgagattgactttatcacaatatgattcttacatctttataccatttacaattgtgttttagatctacagagttagaaattcgaaaactattccaggactaattcttaatcggcattatttatacaagaggtcaagtaacatttactagcgcaatactgcacttgtaaatgaattataaacgctcttctggaatatatttaaataaccattaaagaactgcttattcattctggacactgcatgttgatgttgaatcaactgatgccagcagaaagctattttgatttgtgaacatactgccttatttaaagggtcctgattgcttgtattttaagacattcattaaaaagaaaccaggaaacacttttgaaataacagcataaggaacttcactgtctctgctcaataaaatacctgtaactgga

SEQ ID NO: 376721 - DNA, 1341 bp, Homo sapiens
agcggggtgctgggcgggaggcgcacgcgcagaactgttggccacccgaccgcccgccccttcctctggcgtccaaggtgatatcgcgcgaggttcgcagccaataaggaggcggatgtgacggcccgtttgcagccgccggcagctactgcaaggcaaaagccggagtggacgtgtcttttgaaactgctgctctttcacttctcaggcgtcaccgagagctcagcacccaggctgaactctgtaccatttggaagaatggaagctgatgcatctgttgacatgttttccaaagtcctggagcatcagctgcttcagactaccaaactggtggaagaacatttggattctgaaattcaaaaactggatcagatggatgaggatgaattggaacgccttaaagaaaagagactccaggcactaaggaaagctcaacagcagaaacaagaatggctttctaaaggacatggggaatacagagaaatccctagtgaaagagacttttttcaagaagtcaaggagagtgaaaatgtggtttgccatttctacagagactccacattcagtggaaatttaatggagccaccatttcagaaccaaaagaaatttggaacaaacttcacaaagctggaaaagaaaactatccgaggaaagaaatatgattcagactctgatgatgattagagctcaataattctttgtaaattgtctttttttttctgcttcagatttaaatgtgtttttaaaattctattaatgtctatacattggtcacctaaatactcatattctcgagttttatacagttgtatcacatcgaaaagtgtctttactgttttctgtgtggccatcatgtttaagttgaggaaaactcagttcttaaattatctgggaagggtctggattctctatttttgagattgactttatcacaatatgattcttacatctttataccatttacaattgtgttttagatctacagagttagaaattcgaaaactattccaggactaattcttaatcggcattatttatacaagaggtcaagtaacatttactagcgcaatactgcacttgtaaatgaattataaacgctcttctggaatatatttaaataaccattaaagaactgcttattcattctggacactgcatgttgatgttgaatcaactgatgccagcagaaagctattttgatttgtgaacatactgccttatttaaagggtcctgattgcttgtattttaagacattcattaaaaagaaaccaggaaacacttttgaaataacagcataaggaacttcactgtctctgctcaataaaatacctgtaactgga

SEQ ID NO: 376722 - DNA, 744 bp, Homo sapiens
agcggggtgctgggcgggaggcgcacgcgcagaactgttggccacccgaccgcccgccccttcctctggcgtccaaggtgatatcgcgcgaggttcgcagccaataaggaggcggatgtgacggcccgtttgcagccgccggcagctactgcaaggcaaaagccggagtggacgtgtcttttgaaactgctgctctttcacttctcaggcgtcaccgagagctcagcacccaggctgaactctgtaccatttggaagaatggaagctgatgcatctgttgacatgttttccaaagtcctggagcatcagctgcttcagactaccaaactggtggaagaacatttggattctgaaattcaaaaactggatcagatggatgaggatgaattggaacgccttaaagaaaagagactccaggcactaaggaaagctcaacagcagaaacaaagaatgggctttctaaaggacattggggggcgaatacacgaaggaaaaattccctaggtgaacagagacttttttttcaacggaaagggttttccaaacgggggcaacagccaggttggaacccaacacttggtgctttgggcccaattatctttcccttttttaaaccccgatagtggtcgtccaaaccgcgggggcaaatacacctcctcttttatcccccccccccaacaaaaccacaccatctctcgtcacccaaacggcgcgggagcgttggcggtcttcctacactcccca

SEQ ID NO: 376723 - DNA, 538 bp, Homo sapiens
cagaagccccaggagacctcaactcactcgctctccaaaccttgcagcccacgcatcctcctccctagacttcctacttcctgcctcagtctgcatccccaagtctgagaaatgggccaactggggtcagacagcacctactcactctctaagaatcccaaggtctgttatggaaaaatgatcaagaaatcccatttcacccacttacacaatgtgtggccttggccaattaattcatttgagcctcaatgttacgtgggccacttctgtcatggggttgttgtgagtcaaagacaatatctatttgtgaagcattttgtagaagccaaaaacctgtaagatgttgttttgagctctaagaactttctgtaggcgcataagatcttttgaccccaaagactgttgaaggaacaggaagcttctctgggctttcagatcaactctctgtcctggatagaattttggccctaaaatggtaaacaagaggtcggttaagtgtgtacaagatgtaaaaggtcatgtgccatgaaatctcaaa

SEQ ID NO: 376724 - DNA, 420 bp, Homo sapiens
ctgcttagaaggctgagcccagaaattgaggagtcaatcttgatgcttctttctccttcagccgccacatcaatccatcagtaggtcctgtagattctcttcctaaatgcttctcaaatcctttcacctatttcaagtcccactgccactattctagtccaggttgctattatttccatcttcagtagccccatagcttcctaactactctcagggctctcattttcccccttgctaatctattatccacagggggagggtgacccctttctcagatgtgaatatgattatctcattcccacttaaaatgatttgctgccattctccttcccttaatatcatggtcaggtcctggattcaaccccagacttaaagaagtggaatctaccaggaaagttcataaaaattctcgtgacaacc

SEQ ID NO: 376725 - DNA, 529 bp, Homo sapiens
atttatttgtttgtttatttatttatgttttagaaggagtttttctcttgttgcccaggctgaggtgcaatggcgcgatcctggctcaccgcaatgtccccttcccgggtcaagggattgtcctgactcagcgtcctgagtagctgggattacaggcatgcaccaccatgcccagttaattttgtatttttagtagagatggggtttcttcgtgtggatcattctgttctagaactcccgacctcagttgatccgccagcctcaggctcccaaagtgctgggattacaggcgtaagccaccgctcccagcctaaccgattgcttcttttgttctgtagtcttttgccaaaactgttattctctggactcactttcaccttctctcacacatacatgtccctcgtgtccctttgtgtctccagggtcttctatttccacgtaatcttaatttttcatcacatcctggactcatgagtaattaatctgttattctccctgaaagtgcagccttgttgaatagaatgtgttc

SEQ ID NO: 376726 - DNA, 3311 bp, Homo sapiens
ggagtgcccaggatggagtgcagtggctattcacaggtttaatcatagctcactaccgtcttgaatccctgggctcaagtgatcctcctgcctcagcccctgagtagctggtactaaagttaccttccacgctgtatgtccgtgagaaatacaatgaagacggtctgaataatgaactggtaatcttcgataatatgaaacgaatttaagagaacatatcaaagagaaggctctcaaaataggctgctgcaaaagctggtatattgtccggttgctctctcagaatctcgcgtgtcagcccttcaagaagattcccaaatccttgtggaattcggtagtgggtgttggagaatggaatcgacatcttcttggtattggttttcgctttgcttcatacatcaataatgatatggtgctgcagaaggagcctgctggggcagtgatatggggcttcggtacacctggagccacagtgaccgtgaccctgcgccaaggtcaggaaaccatcatgaagaaagtgaccagtgtgaaagctcactctgatacgtggatggtggtactggatcctatgaagcctggaggacctttcgaagtgatggcacaacagactttggagaaaataaacttcaccctgagagttcatgacgtcctgtttggagatgtctggctctgtagtgggcagagtaacatgcagatgactgtgttacagatatttaatgctacaagggagttgtctaacactgcggcatatcagtctgtccgcatcctctctgtctctcccattcaagcagagcaggagctggaggaccttgttgcggttgacttgcagtggtctaagcccacctcagaaaacttaggccatggatatttcaagtacatgtcagcagtgtgctggctctttggacgtcacctttatgacactctgcagtatcccatcgggctgatcgcctccagctggggcgggacacccattgaagcctggtcatctggacggtcactgaaagcctgtggggtccctaaacaagggtccattccatacgattctgtaactggtcccagtaagcactctgttctctggaatgccatgatccatccactgtgcaatatgactctgaaaggggtagtatggtaccagggggagtccaatataaattataacacggatctgtacaattgcacattccctgcactcatcgaagactggcgtgaaaccttccaccgtggttcccaggggcagacggagcgtttcttcccatttggacttgtccagttatcttcagatttgtctaagaagagctcagacgatggatttccccagatccgttggcatcaaacagcagacttcggctatgtccccaacccaaagatgcccaatactttcatggctgtagctatggatctctgtgatagagactcgccttttggcagcatccaccctcgagataaacagactgtggcttatcggctgcatttgggggcccgtgctctggcttatggtgagaagaatttgacctttgaaggaccactgcctgagaagatagaactcttggctcacaaggggctgctcaatctcacatattaccagcaaatccaggtgcagaaaaaggacaacaagatatttgagatctcctgttgcagtgaccatcgatgcaagtggcttccagcttctatgaacaccgtctccacccagtccctgaccctggcgatcgattcttgtcatggcactgtggttgctctccgctatgcttggaccacgtggccttgtgaatataagcagtgtcccctataccaccccagtagtgccctgccagcccctcccttcattgctttcattacagaccagggtcctggacatcagagcaatgttgctaaatgactgtttcagtatgatcagaacttagatataaggatgggtccttcagattttagcatttaggagtttcaataataaccattgcttttaaaggaaattaatagaaagcctcattgaatggctttcagctagcacatggctgtttctatattctgatgagcccaggcttataggtaacttgaaatgcttgctttttgttccctagttggtctaagggtctgtattggactaattctgaactacagacaaattggacctcaatgtcatttacttccctcatattaatgggagtgaaatgtctaatacttttgcccctttttatccagagttgtgggaatctcaggattggaagagattttaaaggccacataggccagctagtgttcatgtgttctttataaaatttctcccatccaagtactaaccaggcccgaccctgcttagcttccgagatcagatgagatcaggcgcgttcagggtgatatggccgtagacgtctttacaaaattcctgacaggtggttactgaatctctctatgaactttccattcaaaactttccaagtttttccttatgtggaaccgaaatctttctttctcccgtgaaactttactactatcagataattgaagacagatctctttgtattctcttcaagcccaaaccaattctgttccttcaatctaaatagtggtaatatgaatgtttaagaaatgaaataagaaacatgtgcaggcactttggaaggtgctaagtgactgccctaaggaatgaaaagcaagggccaggtgggagtagcccagcgaaggcacttgggctgccaggaacaggaggcgtgggaaactctggcttaggaaaacatgaacacaggggcaacagaggcaaactgttgttcgagttaaatataaatctcaggctctttaaaggtaaaaggtttaaggataatccatttggaagaagaaaagagtgaggctgaaagtaaagccacatgacaagcatataaaaaaaaatgcagatgatacaaatatgaaagaggccttcagtgtttgtttattaagaatcttaatgcagtttactgatggattaaaaacagctaacattgtctgaaaattatgttacctataagaagttggaaataaataaaagcataatcactagtgatgtgtatgtatttatatccacttgcaaactgtccttgaagcatgtgaaaaggagtaagaatactatctatgggtagctttcctccccttaatgtgaaaaatgagaactaaagcaaaaagcatcactcactgtacatatacaatgtattttacgtagtgtaaaaaatatggtttagatagtgaatatattaatgaaatcatatgtaaatttatttttagtggctgaataatttaaaacattatgtggaattcactatgtttcccccaatttaggaact

SEQ ID NO: 376727 - DNA, 2051 bp, Homo sapiens
aaaaaactacggcggccgagaaggggcgagtacagcccagtcctgaggtcgcgggaggctgcgaggactgcaaaagggtggagtcggcctcgcccccgcccaggccccgcccctgccgggaacccactttcccagtcctaggcggcggtcagatccttgcaagcatggtcgcgccggggcttgtactcgggctggtgctgccattaatcctgtgggccgacagaagtgcaggtattggttttcgctttgcttcatacatcaataatgatatggtgctgcagaaggagcctgctggggcagtgatatggggcttcggtacacctggagccacagtgaccgtgaccctgcgccaaggtcaggaaaccatcatgaagaaagtgaccagtgtgaaagctcactctgatacgtggatggtggtactggatcctatgaagcctggaggacctttcgaagtgatggcacaacagactttggagaaaataaacttcaccctgagagttcatgacgtcctgtttggagatgtctggctctgtagtgggcagagtaacatgcagatgactgtgttacagatatttaatgctacaagggagttgtctaacactgcggcatatcagtctgtccgcatcctctctgtctctcccattcaagcagagcaggagctggaggaccttgttgcggttgacttgcagtggtctaagcccacctcagaaaacttaggccatggatatttcaagtacatgtcagcagtgtgctggctctttggacgtcacctttatgacactctgcagtatcccatcgggctgatcgcctccagctggggcgggacacccattgaagcctggtcatctggacggtcactgaaagcctgtggggtccctaaacaagggtccattccatacgattctgtaactggtcccagtaagcactctgttctctggaatgccatgatccatccactgtgcaatatgactctgaaaggggtagtatggtaccagggggagtccaatataaattataacacggatctgtacaattgcacattccctgcactcatcgaagactggcgtgaaaccttccaccgtggttcccaggggcagacggagcgtttcttcccatttggacttgtccagttatcttcagatttgtctaagaagagctcagacgatggatttccccagatccgttggcatcaaacagcagacttcggctatgtccccaacccaaagatgcccaatactttcatggctgtagctatggatctctgtgatagagactcgccttttggcagcatccaccctcgagataaacagactgtggcttatcggctgcatttgggggcccgtgctctggcttatggtgagaagaatttgacctttgaaggaccactgcctgagaagatagaactcttggctcacaaggggctgctcaatctcacatattaccagcaaatccaggtgcagaaaaaggacaacaagatatttgagatctcctgttgcagtgaccatcgatgcaagtggcttccagcttctatgaacaccgtctccacccagtccctgaccctggcgatcgattcttgtcatggcactgtggttgctctccgctatgcttggaccacgtggccttgtgaatataagcagtgtcccctataccaccccagtagtgccctgccagcccctcccttcattgctttcattacagaccagggtcctggacatcagagcaatgttgctaaatgactgtttcagtatgatcagaacttagatataaggatgggtccttcagattttagcatttaggagtttacactctgcagtatcccatcgggctgatcgcctccagctggggcgggacacccattgaagcctggtcatctggacggtcactgaaagcctgtggggtccctaaacaagggtccattccatacgattctgtaactggtcccagtaagcactctgttctctggaatgccatgatccatccactgtgcaatatgactctgaaaggggtagtatggtccaatataaattataacacggatctgtacaattgca

SEQ ID NO: 376728 - DNA, 551 bp, Homo sapiens
aaagactccagtgtgggattctgatacaataaaattagcaatgtctctgctttctagttatcttcagatttgtctaagaagagctcagacgatggatttccccagatccgttggcatcaaacagcagacttcggctatgtccccaacccaaagatgcccaatactttcatggctgtagctatggatctctgtgatagagactcgccttttggcaggtatgattgcttcttgggctttgcatgaacagtgtatgttctttgtagtctttcactctgatgttcaccggtgaggggcaattagactgaggattggcacttaagagtcacgtatgctggggtgtgctgcagtaacaacagcaaacaccctcaacatctcagttctctgatgcaccaacaatttatttcttggtcactctctctgttaaaagaaggtcaacagagactttgctcactgtaatcattcatagacccagagcaatagaggctccaagttgacctatgcttccatagtcatcttaaagtgtcacactggcaattcagtgcttccacaca

SEQ ID NO: 376729 - DNA, 2890 bp, Homo sapiens
aaaaaactacggcggccgagaaggggcgagtacagcccagtcctgaggtcgcgggaggctgcgaggactgcaaaagggtggagtcggcctcgcccccgcccaggccccgcccctgccgggaacccactttcccagtcctaggcggcggtcagatccttgcaagcatggtcgcgccggggcttgtactcgggctggtgctgccattaatcctgtgggccgacagaagtgcaggtattggttttcgctttgcttcatacatcaataatgatatggtgctgcagaaggagcctgctggggcagtgatatggggcttcggtacacctggagccacagtgaccgtgaccctgcgccaaggtcaggaaaccatcatgaagaaagtgaccagtgtgaaagctcactctgatacgtggatggtggtactggatcctatgaagcctggaggacctttcgaagtgatggcacaacagactttggagaaaataaacttcaccctgagagttcatgacgtcctgtttggagatgtctggctctgtagtgggcagagtaacatgcagatgactgtgttacagatatttaatgctacaagggagttgtctaacactgcggcatatcagtctgtccgcatcctctctgtctctcccattcaagcagagcaggagctggaggaccttgttgcggttgacttgcagtggtctaagcccacctcagaaaacttaggccatggatatttcaagtacatgtcagcagtgtgctggctctttggacgtcacctttatgacactctgcagtatcccatcgggctgatcgcctccagctggggcgggacacccattgaagcctggtcatctggacggtcactgaaagcctgtggggtccctaaacaagggtccattccatacgattctgtaactggtcccagtaagcactctgttctctggaatgccatgatccatccactgtgcaatatgactctgaaaggggtagtatggtaccagggggagtccaatataaattataacacggatctgtacaattgcacattccctgcactcatcgaagactggcgtgaaaccttccaccgtggttcccaggggcagacggagcgtttcttcccatttggacttgtccagttatcttcagatttgtctaagaagagctcagacgatggatttccccagatccgttggcatcaaacagcagacttcggctatgtccccaacccaaagatgcccaatactttcatggctgtagctatggatctctgtgatagagactcgccttttggcagcatccaccctcgagataaacagactgtggcttatcggctgcatttgggggcccgtgctctggcttatggtgagaagaatttgacctttgaaggaccactgcctgagaagatagaactcttggctcacaaggggctgctcaatctcacatattaccagcaaatccaggtgcagaaaaaggacaacaagatatttgagatctcctgttgcagtgaccatcgatgcaagtggcttccagcttctatgaacaccgtctccacccagtccctgaccctggcgatcgattcttgtcatggcactgtggttgctctccgctatgcttggaccacgtggccttgtgaatataagcagtgtcccctataccaccccagtagtgccctgccagcccctcccttcattgctttcattacagaccagggtcctggacatcagagcaatgttgctaaatgactgtttcagtatgatcagaacttagatataaggatgggtccttcagattttagcatttaggagtttcaataataaccattgcttttaaaggaaattaatagaaagcctcattgaatggctttcagctagcacatggctgtttctatattctgatgagcccaggcttataggtaacttgaaatgcttgctttttgttccctagttggtctaagggtctgtattggactaattctgaactacagacaaattggacctcaatgtcatttacttccctcatattaatgggagtgaaatgtctaatacttttgcccctttttatccagagttgtgggaatctcaggattggaagagattttaaaggccacataggccagctagtgttcatgtgttctttataaaatttctcccatccaagtactaaccaggcccgaccctgcttagcttccgagatcagatgagatcaggcgcgttcagggtgatatggccgtagacgtctttacaaaattcctgacaggtggttactgaatctctctatgaactttccattcaaaactttccaagtttttccttatgtggaaccgaaatctttctttctcccgtgaaactttactactatcagataattgaagacagatctctttgtattctcttcaagcccaaaccaattctgttccttcaatctaaatagtggtaatatgaatgtttaagaaatgaaataagaaacatgtgcaggcactttggaaggtgctaagtgactgccctaaggaatgaaaagcaagggccaggtgggagtagcccagcgaaggcacttgggctgccaggaacaggaggcgtgggaaactctggcttaggaaaacatgaacacaggggcaacagaggcaaactgttgttcgagttaaatataaatctcaggctctttaaaggtaaaaggtttaaggataatccatttggaagaagaaaagagtgaggctgaaagtaaagccacatgacaagcatataaaaaaaaatgcagatgatacaaatatgaaagaggccttcagtgtttgtttattaagaatcttaatgcagtttactgatggattaaaaacagctaacattgtctgaaaattatgttacctataagaagttggaaataaataaaagcataatcacta

SEQ ID NO: 376730 - DNA, 3030 bp, Homo sapiens
ggagtgcccaggatggagtgcagtggctattcacaggtttaatcatagctcactaccgtcttgaatccctgggctcaagtgatcctcctgcctcagcccctgagtagctggtactaaagttaccttccacgctgtatgtccgtgagaaatacaatgaagacggtctgaataatgaactggtaatcttcgataatatgaaacgaatttaagagaacatatcaaagagaaggctctcaaaataggctgctgcaaaagctggtatattgtccggttgctctctcagaatctcgcgtgtcagcccttcaagaagattcccaaatccttgtggaattcggtagtgggtgttggagaatggaatcgacatcttcttggtattggttttcgctttgcttcatacatcaataatgatatggtgctgcagaaggagcctgctggggcagtgatatggggcttcggtacacctggagccacagtgaccgtgaccctgcgccaaggtcaggaaaccatcatgaagaaagtgaccagtgtgaaagctcactctgatacgtggatggtggtactggatcctatgaagcctggaggacctttcgaagtgatggcacaacagactttggagaaaataaacttcaccctgagagttcatgacgtcctgtttggagatgtctggctctgtagtgggcagagtaacatgcagatgactgtgttacagatatttaatgctacaagggagttgtctaacactgcggcatatcagtctgtccgcatcctctctgtctctcccattcaagcagagcaggagctggaggaccttgttgcggttgacttgcagtggtctaagcccacctcagaaaacttaggccatggatatttcaagtacatgtcagcagtgtgctggctctttggacgtcacctttatgacactctgcagtatcccatcgggctgatcgcctccagctggggcgggacacccattgaagcctggtcatctggacggtcactgaaagcctgtggggtccctaaacaagggtccattccatacgattctgtaactggtcccagtaagcactctgttctctggaatgccatgatccatccactgtgcaatatgactctgaaaggggtagtatggtaccagggggagtccaatataaattataacacggatctgtacaattgcacattccctgcactcatcgaagactggcgtgaaaccttccaccgtggttcccaggggcagacggagcgtttcttcccatttggacttgtccagttatcttcagatttgtctaagaagagctcagacgatggatttccccagatccgttggcatcaaacagcagacttcggctatgtccccaacccaaagatgcccaatactttcatggctgtagctatggatctctgtgatagagactcgccttttggcagcatccaccctcgagataaacagactgtggcttatcggctgcatttgggggcccgtgctctggcttatggtgagaagaatttgacctttgaaggaccactgcctgagaagatagaactcttggctcacaaggggctgctcaatctcacatattaccagcaaatccaggtgcagaaaaaggacaacaagatatttgagatctcctgttgcagtgaccatcgatgcaagtggcttccagcttctatgaacaccgtctccacccagtccctgaccctggcgatcgattcttgtcatggcactgtggttgctctccgctatgcttggaccacgtggccttgtgaatataagcagtgtcccctataccaccccagtagtgccctgccagcccctcccttcattgctttcattacagaccagggtcctggacatcagagcaatgttgctaaatgactgtttcagtatgatcagaacttagatataaggatgggtccttcagattttagcatttaggagtttcaataataaccattgcttttaaaggaaattaatagaaagcctcattgaatggctttcagctagcacatggctgtttctatattctgatgagcccaggcttataggtaacttgaaatgcttgctttttgttccctagttggtctaagggtctgtattggactaattctgaactacagacaaattggacctcaatgtcatttacttccctcatattaatgggagtgaaatgtctaatacttttgcccctttttatccagagttgtgggaatctcaggattggaagagattttaaaggccacataggccagctagtgttcatgtgttctttataaaatttctcccatccaagtactaaccaggcccgaccctgcttagcttccgagatcagatgagatcaggcgcgttcagggtgatatggccgtagacgtctttacaaaattcctgacaggtggttactgaatctctctatgaactttccattcaaaactttccaagtttttccttatgtggaaccgaaatctttctttctcccgtgaaactttactactatcagataattgaagacagatctctttgtattctcttcaagcccaaaccaattctgttccttcaatctaaatagtggtaatatgaatgtttaagaaatgaaataagaaacatgtgcaggcactttggaaggtgctaagtgactgccctaaggaatgaaaagcaagggccaggtgggagtagcccagcgaaggcacttgggctgccaggaacaggaggcgtgggaaactctggcttaggaaaacatgaacacaggggcaacagaggcaaactgttgttcgagttaaatataaatctcaggctctttaaaggtaaaaggtttaaggataatccatttggaagaagaaaagagtgaggctgaaagtaaagccacatgacaagcatataaaaaaaaatgcagatgatacaaatatgaaagaggccttcagtgtttgtttattaagaatcttaatgcagtttactgatggattaaaaacagctaacattgtctgaaaattatgttacctataagaagttggaaataaataaaagcataatcacta

SEQ ID NO: 376731 - DNA, 743 bp, Homo sapiens
tccccagccttaaagaacgctccttttaaattcacagttgtgtaatattgaacttttcacctgtttttcttccctcctaaggtgtgtgttcctagggatggaacctgtacctataaatattcagtaaataggaccaaaactcaaatccatcccttcctctactcatccattcagcaagtatttactgagctgcccccaggtgccaggcactgcacagggcactggggataaggagatgaccagcagatgtggtccctggcctcatggaggccacagtggcacaggcaagcatgccagtaaatgcatagccacacctggtcatgagtgccgtgatggcaaagccagaagctgccagggattaatggagggacccgtgtatgagacacaggggtgcattaaggaaggccttgctgaggcaggggcttgagacctgaagaaataagggaggtgggcagtccaagagcagtgggaagagaacactgcaaatgcagaagccgtgagctggaaacgagccagaagtacccttagagagctgtattcctatggagtttcaattctaggtggcttaaaacaatcccagagaagttcagaatcttgtccaagatcataccattcaggatagacttgcgactataacttgggtgcctcaccttccagcctggggtgtctgactccattgttaattttattataacaatcatgatgacaacgatgaataaagtgaaattgtactgtacaggaaa

SEQ ID NO: 376732 - DNA, 391 bp, Homo sapiens
attttgtgggagtaagttcttaccaatcaaattacattttgttttaatttttatacttgtatctgaattttctaagcaatttattttcctatcaaagaatttgttttgtcaaccaagaaattcagtaataatccttctcattaaaaacctttctattatcttaatttattaaaagcttaattttagtttgttattttctaaagatatttgctttcaaaagtaattattcatatatatcagttacaaaattcttctactgagagttccccaccaaaataagccaggcatggtgtgcacgtgtactcccagctacttgggaggctgagatgggaggactgcttgaacctaggagttcaaaaccagcctggaaacgttagactcccaagacctt

SEQ ID NO: 376733 - DNA, 941 bp, Homo sapiens
agcctcctgagtagctgggattacaggtgtccaccaacacacccagctaatttttgtatttttagtgtagagcgggtttcaccatgttggctaggctggtctcgaactcctgacctcaggtgatccacccacctcggcctcccaaaatgttgggattacaggcgtgagccaccatgcccggccgcgagtactgttacttttaactccactagcagatttctgtttgtaaaaaagtcttcaaacaacagtaataataccaaacaattaccaagtatgctctgtgcctggcacagttgtatgcacattgcatgtgcccctctaaccctggtgtggggcagagtgtaggaacctagttcagagtcccagccattgagtcgcagagctcgtatctgagtccagcctgtctggctctgaaacccatactatactggtaactccttttcttcatcacttgcagaaaatagatctatcacacaggaggaaaagttagccaactgagacaaatcagcaaaagaagaaaatatgtctgcctttttttttattctgaaagtgataggtgttcattatagaaaaatggagtgtatacaaaactgtgtaagagagtaaataagtgttgcataagcctaccaccgcaagatgatctgttaatatttttgttgttatttccatttgagtcattttatggacttatgtaaggtacttccagtttagtattagtttacttattactactagttgatttatgccacattttttcccaaaaagctttcaaataacttacagaggcacataaaaatgtacaacctagcgtgagagcataaataagccatggtttttgtagagtgaagggaaaatttccctagaagtgccagattctgtttcatatggaagagagaataatgacatgataagtaagtagactagaatgtttatttgacatc

SEQ ID NO: 376734 - DNA, 553 bp, Homo sapiens
ttacgggggtggccacaggacataaagttttttctgatgtgttgtttgaggaggtacctgtggaatatctaagtggtgatgactgaatgaaatgtgaacacaaaaacctggaggtcagcagaaagatctgggttggagacgcagctctgagaatttactcagggaaacatctggagcagagtatgaggtaaagaaattccactgcttatctcagctgatgaaagggttaaagaagaaatgatcaacatcaatcataaagaaaagacagagttgattgaatgtccatgccacttaggtggatcacttgaagactaggagcagaaaaaaactgtagaaaattgtcttgaaaactttttatttaacagagaacacaaggtgtaatgattcagaagtaatgagtcatttagaaataataaaactattactttgcctggaaaacataggcaatcttgggtggatgactcagtgtggaaactgcttccaacagaacagtttaaaagaataccaaaagtgtacagtaaggcctatttgtggaataaaaaaggagacctgg

SEQ ID NO: 376735 - DNA, 418 bp, Homo sapiens
ttctactaaattcgcggccgcgtcgaccgaaacatctggagcagagtatgaggtaaagaaattccactgcttatctcagctgatgaaagggttaaagaagaaatgatcaacatcaatcataaagaaaagacagagttgattgaatgtccatgccacttaggtggatcacttgaagactaggagcagaaaaaaactgtagaaaattgtcttgaaaactttttatttaacagagaacacaaggtgtaatgattcagaagtaatgagtcatttagaaataataaaactattactttgcctggaaaacataggcaatcttgggtggatgactcagtgtggaaactgcttccaacagaacagtttaaaagaataccaaaagtgtacagtaaggcctatttgtggaataaaaaaggagacctgg

SEQ ID NO: 376736 - DNA, 503 bp, Homo sapiens
ttacgggggtggccacaggacataaagttttttctgatgtgttgtttgaggaggtacctgtggaatatctaagtggtgatgactgaatgaaatgtgaacacaaaaacctggaggaaacatctggagcagagtatgaggtaaagaaattccactgcttatctcagctgatgaaagggttaaagaagaaatgatcaacatcaatcataaagaaaagacagagttgattgaatgtccatgccacttaggtggatcacttgaagactaggagcagaaaaaaactgtagaaaattgtcttgaaaactttttatttaacagagaacacaaggtgtaatgattcagaagtaatgagtcatttagaaataataaaactattactttgcctggaaaacataggcaatcttgggtggatgactcagtgtggaaactgcttccaacagaacagtttaaaagaataccaaaagtgtacagtaaggcctatttgtggaataaaaaaggagacctgg

SEQ ID NO: 376737 - DNA, 638 bp, Homo sapiens
ttacgggggtggccacaggacataaagttttttctgatgtgttgtttgaggaggtacctgtggaatatctaagtggtgatgactgaatgaaatgtgaacacaaaaacctggaggaaacatctggagcagagtatgaggtaaagaaattccactgcttatctcagctgatgaaagggttaaagaagaaatgatcaacatcaatcataaagaaaagacagagttgattgaatgtccatgccacttaggtggatcacttgaagactaggagcagaaaaaaactgtagaaaattgtcttgaaaactttttatttaacagagaacacaaggtgtaatgattcagaagtaatgagtcatttagaaataataaaactattactttgcctggaaaacataggcaatcttgggtggatgactcagtgtggaaactgcttccaacagaacagtttaaaagaataccaaaagtgtacagtaaggcctatttgtggaataaaaaaggagacctggaatattttatttgtcatgtccacttcaaaaatagttgagaaatttaaaaaataaaataaataaaattaatatagttgagaaaataaaaaagtggcgtcgttggcctcaagcggtggagctcgttcccccggaagg

SEQ ID NO: 376738 - DNA, 855 bp, Homo sapiens
ttgttagaactgttgtgttcaggctgaaatactttcaaagtttgttagttattattgagaaatttctgtaataatcatggaaagggtaatttaatagttaaatctcaacttaattgaagttatttctgttgtggaacttatggtcatcttagcaagaggtcattgctttatagtcagttctctttctcattaaaaatatagtgtactcacctttacagggtgaatgttggtaaataacttctgtctgtgaaggaagtattctggacctgtaagttaaaaataaggtgtttatagcaaattatgtaaataaagattgtatattagaaggtacacactattcaaattaaagaaaatgtatattgagaaaataactcaaatttcttccatgaaattggcaagaagtaaacatttcaaatacacaaaacattatgggtatttttgttcatttgattataaaatgccaaagttgttttataaatgctacttcaagcctggaaactttgaggaagtcctgaacattaagcatataaatggcccagctctagaatacatgtaagttgaaaagctaacctgaagtgggaagcgcagtatatacctaagacttactctgcactgaaagtttgctttgtcactagaagtaaaacaagactgtggtaggatagtaagatcagtaacacctcagttaatcaggtatcttggaggaagtgaagaaagaccctaattcaagggacagttaattggccttttattccaagaatgggccttagtggcagtatcttaaaagcccacaagatggagatgtttcctaatgaaaggcctttaatttctttatagagctgagttagtgtcacatcc

SEQ ID NO: 376739 - DNA, 666 bp, Homo sapiens
ttgttagaactgttgtgttcaggctgaaatactttcaaagtttgttagttattattgagaaatttctgtaataatcatggaaagggtaatttaatagttaaatctcaacttaattgaagttatttctgttgtggaacttatggtcatcttagcaagaggtcattgctttatagtcagttctctttctcattaaaaatatagtgtactcacctttacagggtgaatgttggtaaataacttctgtctgtgaaggaagtattctggacctgtaagttaaaaataaggtgtttatagcaaattatgtaaataaagattgtatattagaaggtacacactattcaaattaaagaaaatgtatattgagaaaataactcaaatttcttccatgaaattggcaagaagtaaacatttcaaatacacaaaacattatgggtatttttgttcatttgattataaaatgccaaagttgttttataaatgctacttcaagcctggaaactttgaggaagtcctgaacattaagcatataaatggcccagctctagaatacatgtaagttgaaaagctaacctgaagtgggaagcgcagtatatacctaagacttactctgcactgaaagtttgcttgttccatttaacccgctggtgcagtaccacggtcctccat

SEQ ID NO: 376740 - DNA, 741 bp, Homo sapiens
tgcagttaaatgtttaagctgaataccaaaggaaggatgtttcaaataaatcatgccacaactaggcaggcaactacacttaaactctccattagattttaccctgaagcaaattcttagtctacttctttgtaaccatcctcatggtgctgcaagcaggacagaagacaataagggggggaattcatgatacagactgaatatgaaacgagaaactgaacccttaataatttaaaatactataggcaaaagcagacttcatgatattaaaggatatctaattccaatttgtgaaaaagacactgaatcatcagattttacattgggagcagctcttaaagattacctcattcccccaaaccccctcattctctgtctcattttgcagatgagaaacctggggtgagaggtaaagtgatctgtctgaggctctcatgtccagtgagggagctgaaactacagttcaggcctcattgctattttcactatgctttgctgtctactgtttttatttgtgtaattttaaactagatttggggtccactcttgcccctgcccccacaagccccatatcagcaatggctgatctcttaatttgagttagggagatttattacctagaaataatgacctctgtgctcttagagacccgtgactaattagaagaatgagacggggatacccaggcggatccgaacaactgcacagtgaagcccctctcgggggcgggccaagcctgtg

SEQ ID NO: 376741 - DNA, 484 bp, Homo sapiens
aattgatatttaatttgatgttggagacctaaaagtctttctgaatctagtattaattttgaattgccaccttgcctggtcagcatctttgcagttctcttcaattttataagttttgtaagtaaatatatgaagaaataaaaacattttaaattctttaatttaggtgactaatattaattgatggagcttattcatttttaaggatttttgtggttgattttcgtcatgttgcaattctagttagaatttgtataacaacatgttaatttgtattggcaattttgtatagtctgttaagtaatttaagtcaaggaaactgctaacgtgttccctcctcccttggcttttaaaaaaaagcttacaatatgtttaaatgaaatttgcataacaaattgtgtaatagatcatttgaaaagtactgttttgttacccttgagtattattcatctaaaatattaataatgaagtgctggtagttctg

SEQ ID NO: 376742 - DNA, 379 bp, Homo sapiens
tcattcaacaaacacttactgaggccaacactgggaatggagacgaacttccctgtcctcatggagcttgctttcaaaagggaaggaggcagacagtaaacaaaacaagcaagtcaatatacagcatgatgcagaaaaggtgtgatgccaccctcttgcctgagtttataacaagcagatgatgttgtcctaagaattaatttcagccggtgaaagagtacaggcaaaaaacgtggtctcggactttccggtgatgcttaagaacatagttgcagtttttgttctgattctttgtgcatctcgcgctaatgaaggattctgccatgattgccacctctggagacgtcacagccagcacagccatgaccagggatgaact

SEQ ID NO: 376743 - DNA, 428 bp, Homo sapiens
ttaaccttgccaggggattccgaagagccagggggtaagaaacactagtccaaatcaagctgtgagcactgtgcgtagctgtcttaaaatgttttctgtccccaatcctgaaactggggtaagttggttacaggtgtttccttcccttctatttggaatttaaaattctactaaaactgacaatatatactcagccttcccccacatacaccttgtccccaccaatctgtcctttaagtctgtgaggtagaaattctctccattaacatggtcatcccatttatggaatagatacattctgacaaagctgaccagaagatggaattccctatttcgacctcagtttccccactggcttcaatttaaagcagaaggtaggtggcttctggtttggagtcagaagcttcaatgagtacaccccttgagga

SEQ ID NO: 376744 - DNA, 342 bp, Homo sapiens
catttaggaagtagatgaagagagacagtaaataatccttttatttttaaaaattaaattatcttcagatcattgatagtaggtttatctaggattcaaaaatgtttctgaaaattggtcttacaaactcaaagttcgtaagactgctttttgcactgaatagtaacttgagttcacttaggtgttcctgcttctgttttaggaagaaactttgctgctttgtctttacaattaaagtatgatcttcttacattaactctctgctttacacaggaatggaatcctcagtttttgtttttgtttttacccccaaaggaggttagcagttggagttcattaaaa

SEQ ID NO: 376745 - DNA, 691 bp, Homo sapiens
gctatttactattatagtttgcacaaaggtaccctatagtctagtggtggctctgtcaaactaatattgtttcttttttgggggggtgggggatggagtctcgctctgttgccaggctggagtgcagtggcacgatcttggctcactgcaacctccacctctcgggttcaagcgattctcctgcctcagcctcccaagtagctggaattacaggtctgcaccaccaggcctggctaatttttatattttggtagagatggggtttcaccatgttggccaggctgatcttgaactcctgacctcagatgatccgcctgccttggcctcccaaagtgctgggattacaggtgtgagccaccgcgcccagcctgggaaggttattttctggcttcgagccatagtgtcttcgtctctgcctaagagatcaatgggattctcagacctcttccagccctgaaacatcatgacagctttttctgttttccccaaagtgaattcaaggctctagactgtgggccacacagctgggtactcaggactcacactaagggggaacaaggcacagagtctttgtcccatctcaatttttctcaaagatttttgagaaattttttgaaaattcaattttcaatttttaaaaatctgttaatttttgaaagaaacaaataaaacagaatttaataatatttta

SEQ ID NO: 376746 - DNA, 4737 bp, Homo sapiens
tccaggatcctacgcaccaaaccagtggagtccatgctagagggaactgggaccaccacggcacatggaactaagctagcccaggtactcaccacagtggacctcatctctcttggcgttggcagctgtgtgggcactggcatgtatgtggtctctggcctggtggccaaggaaatggcaggacctggtgtcattgtgtccttcatcattgcagccgtcgcatccatattatcaggcgtctgctatgcagagtttggagttcgagtccccaagaccacaggatctgcctacacctacagctatgtcactgttggggaatttgtggcatttttcattggctggaacctgatcctggagtacctgattggcactgcggccggagccagtgctctgagcagcatgtttgactcactagccaaccacaccatcagccgctggatggcggacagcgtgggaaccctcaatggcctggggaaaggtgaagaatcatacccagaccttctggctctgttgatcgcggtcatcgtgaccatcattgttgctctgggggtgaagaattccataggcttcaacaatgttctcaatgtgctgaacctggcagtatgggtgttcatcatgatcgcaggcctcttcttcatcaatgggaaatactgggcggagggccagttcttgccccacggctggtcaggggtgctgcaaggagcagcaacatgcttctacgctttcattggctttgacatcatcgccaccactggagaggaagccaagaatcccaacacgtccatcccttatgctatcactgcctccctggtcatctgcctgacagcatatgtgtctgtgagcgtgatcttaactctgatggtgccatattataccattgacacggaatccccactcatggagatgtttgtggctcatgggttctatgctgccaaattcgtagtggccattgggtcggttgcaggactgacagtcagcttgctggggtccctcttcccgatgccgagggtcatttatgccatggctggtgacgggctccttttcaggttcctggctcacgtcagctcctacacagagacaccagtggtggcctgcatcgtgtcggggttcctggcagcgctcctcgcactgttggtcagcttgagagacctgatagagatgatgtctatcggcacgctcctggcctacaccttggtctctgtctgtgtcttgctccttcgataccaacctgagagtgacattgatggttttgtcaagttcttgtctgaggagcacaccaagaagaaggagggcattctggctgactgtgagaaggaagcttgttctcctgtgagtgagggggatgagttttctggcccagccaccaacacatgtggggccaagaacttaccatccttgggagacaatgagatgctcatagggaaatcagacaagtcaacctacaacgtcaaccaccccaattacggcaccgtggacatgaccacaggcatagaagctgatgaatccgaaaatatttatctcatcaagttaaagaagctgattgggcctcattattacaccatgagaatccggctgggccttccaggcaaaatggaccggcccacagcagcgacggggcacacggtgaccatctgcgtgctcctgctcttcatcctcatgttcatcttctgctccttcatcatctttggttctgactacatctcagagcagagctggtgggccatccttctggttgttctgatggtgctgctgatcagcaccctggtgtttgtgatcctgcagcagccagagaaccccaagaagctgccctacatggccccttgcctcccctttgtgcctgcctttgccatgctggtgaacatctatctcatgctaaagctctccaccatcacatggatccggtttgcggtctggtgctttgtgggtctgctcatttattttggatatggcatctggaacagcaccctggaaatcagcgctcgagaagaggccctgcaccaaagcacgtaccaacgctacgacgtggatgaccccttctcagtggaggagggtttctcctacgccacagagggcgagagccaggaggactggggcgggcccactgaagacaaaggcttctattaccaacagatgtcagatgcgaaggcaaacggccggacaagtagcaaagcgaagagcaaaagcaaacacaaacagaactcagaggccctgattgcaaatgatgagttagattactctccagagtaggagaaacacacaagtgggtagaaatggtgatgactgattttcagtaacttaacctgtgggctagaaggtgaaaacttttttggctctcatttcacaaatccagccttccccaaattcaatccctagtcatagcctgtcatttgctacttttgctcttcaggatagttctgttgaagggcttaacctgggtcccctaactggtcgccttgttaaataaaataaataaataaacaagaggctatatgaaattccatcttaggtgcaaccaccagagctgatggtaccaaatgtttcctaggcctttgctttgctggttgaagcccaagcaggggctctgggcagaaggcagaatttcagtcacctgagacatggggacaaagctctgttcttggcatgtcaggctgagtgctgctccccgaggtcagggtgggtagatgggcattggcacttcctgagcaagcatcattttatcctgcaatctcacccaaaattaattcatggaaaagacacatgcttctttttattcaccaacattctcacagcttccaaactataattttaggatccagcaaagttcagggactctggaccattttcccaatggtttcagattcaccataaagcagtcaggcagacccagtgatatggtaagaagcaccatcaaagctctatgtaaatgcccagaagaaaattaaataaccatatcttgcggtaaaagccagaagggcattggcagaaattaactctctgtcatggcctctcttatatcagactgcagctcctggtgatatgatgaaagcgggcaaaggtggagcatgatttcatggcactgatatgccttgaaaaagtaggttgtttgttttataatcagataaaaatttttacaaggagaagtgagccagccactgagatcacattgcaaattctctttcatatttctaaaattataaattctaaagtttttgagataggcaaccacttgattggtgtgtgctactctgaaaacaaaataggctgaagtatagcgacttaggtagttgcattccatgagatcacatttcacttctgaaccttattccttggggctagctcactttcagaggtgtatttttttttcctgttatttcccagagtagtttcactgaagcccagagaaatatctacctggtaagatgtaaatttgggccataaaaggggctattaaaagaattttctcagaaatagaatagatgagagaatttgcaaaggaaaaaaacacacatgggctacaatataaattctactcttgggttacaagaattcctgtggctgcactgagatacgtacaaatgtatgtgaaggcacaatttgaatcaagctatcatagaattaaccaagctattaaaattaatcaagctattaataaaatctctgtgaggatttcctgaaagagggacaaaagaagaaattccttgtcctttctctcctggatgtatcagtatgccaaacgttttccagaacatattcgctagcactcaagtctgttctttctgaaaggctgaggctcatgccatcttggcatgctttaggattatggcaaggaggtaaaagtccattttttcattcaactaacactggttgagaatagacccaatgctaagtgacaggaatgaatagaagcatggcacttgcccttgggggctacagtccatggatgagcagcactggagcctggtaaatgcagataaaacaacaaacttgacaagtctccaggctgatgcactgggttttaacatacatataaagatgaattgaaactagtttttaaaaaatatgctttaaataaattacatatcgtaatcatagccaatgtataccattaaactaaaataactgcaattttctagatattttttattcttctgtagtcattgtttagaactctggtttcctgaggtcattttgtcattttaatatcatgcttgacaatgctatgttttctcttccctagagttaaccataaagatacagtgcctactctgtgaaatacagcattaggaattaattataaactaattatcagtcatcttttgaaaacaaagttttgaattggctataggactcaacaaatctgcctggtgtaaatagaatctgttaagcttgatacatatctagatagatgaggaggggttgtattcattaagcatgagaatagagaaataggagtgcaaaatggcaaaatcttaacgtgggtgaaagagcttccttttactagtgaggtttaagtattaaagtaacaatagcctggtggcagatgaatgcaatttctataggatgggaatggaaaatgtatgctttggttaacaccattgctgttgacttcatgcagattctattaagcactctcatttcaggagccatttttcccacatagtatattagtatattttaagcttagctccctttatttttctaaagttgataaatcacctccctagcaaccttagtttt

SEQ ID NO: 376747 - DNA, 4308 bp, Homo sapiens
tccaggatcctacgcaccaaaccagtggagtccatgctagagggaactgggaccaccacggcacatggaactaagctagcccaggtactcaccacagtggacctcatctctcttggcgttggcagctgtgtgggcactggcatgtatgtggtctctggcctggtggccaaggaaatggcaggacctggtgtcattgtgtccttcatcattgcagccgtcgcatccatattatcaggcgtctgctatgcagagtttggagttcgagtccccaagaccacaggatctgcctacacctacagctatgtcactgttggggaatttgtggcatttttcattggctggaacctgatcctggagtacctgattggcactgcggccggagccagtgctctgagcagcatgtttgactcactagccaaccacaccatcagccgctggatggcggacagcgtgggaaccctcaatggcctggggaaaggtgaagaatcatacccagaccttctggctctgttgatcgcggtcatcgtgaccatcattgttgctctgggggtgaagaattccataggcttcaacaatgttctcaatgtgctgaacctggcagtatgggtgttcatcatgatcgcaggcctcttcttcatcaatgggaaatactgggcggagggccagttcttgccccacggctggtcaggggtgctgcaaggagcagcaacatgcttctacgctttcattggctttgacatcatcgccaccactggagaggaagccaagaatcccaacacgtccatcccttatgctatcactgcctccctggtcatctgcctgacagcatatgtgtctgtgagcgtgatcttaactctgatggtgccatattataccattgacacggaatccccactcatggagatgtttgtggctcatgggttctatgctgccaaattcgtagtggccattgggtcggttgcaggactgacagtcagcttgctggggtccctcttcccgatgccgagggtcatttatgccatggctggtgacgggctccttttcaggttcctggctcacgtcagctcctacacagagacaccagtggtggcctgcatcgtgtcggggttcctggcagcgctcctcgcactgttggtcagcttgagagacctgatagagatgatgtctatcggcacgctcctggcctacaccttggtctctgtctgtgtcttgctccttcgataccaacctgagagtgacattgatggttttgtcaagttcttgtctgaggagcacaccaagaagaaggagggcattctggctgactgtgagaaggaagcttgttctcctgtgagtgagggggatgagttttctggcccagccaccaacacatgtggggccaagaacttaccatccttgggagacaatgagatgctcatagggaaatcagacaagtcaacctacaacgtcaaccaccccaattacggcaccgtggacatgaccacaggcatagaagctgatgaatccgaaaatatttatctcatcaagttaaagaagctgattgggcctcattattacaccatgagaatccggctgggccttccaggcaaaatggaccggcccacagcagcgacggggcacacggtgaccatctgcgtgctcctgctcttcatcctcatgttcatcttctgctccttcatcatctttggttctgactacatctcagagcagagctggtgggccatccttctggttgttctgatggtgctgctgatcagcaccctggtgtttgtgatcctgcagcagccagagaaccccaagaagctgccctacatggccccttgcctcccctttgtgcctgcctttgccatgctggtgaacatctatctcatgctaaagctctccaccatcacatggatccggtttgcggtctggtgctttgtgggtctgctcatttattttggatatggcatctggaacagcaccctggaaatcagcgctcgagaagaggccctgcaccaaagcacgtaccaacgctacgacgtggatgaccccttctcagtggaggagggtttctcctacgccacagagggcgagagccaggaggactggggcgggcccactgaagacaaaggcttctattaccaacagatgtcagatgcgaaggcaaacggccggacaagtagcaaagcgaagagcaaaagcaaacacaaacagaactcagaggccctgattgcaaatgatgagttagattactctccagagtaggagaaacacacaagtgggtagaaatggtgatgactgattttcagtaacttaacctgtgggctagaaggtgaaaacttttttggctctcatttcacaaatccagccttccccaaattcaatccctagtcatagcctgtcatttgctacttttgctcttcaggatagttctgttgaagggcttaacctgggtcccctaactggtcgccttgttaaataaaataaataaataaacaagaggctatatgaaattccatcttaggtgcaaccaccagagctgatggtaccaaatgtttcctaggcctttgctttgctggttgaagcccaagcaggggctctgggcagaaggcagaatttcagtcacctgagacatggggacaaagctctgttcttggcatgtcaggctgagtgctgctccccgaggtcagggtgggtagatgggcattggcacttcctgagcaagcatcattttatcctgcaatctcacccaaaattaattcatggaaaagacacatgcttctttttattcaccaacattctcacagcttccaaactataattttaggatccagcaaagttcagggactctggaccattttcccaatggtttcagattcaccataaagcagtcaggcagacccagtgatatggtaagaagcaccatcaaagctctatgtaaatgcccagaagaaaattaaataaccatatcttgcggtaaaagccagaagggcattggcagaaattaactctctgtcatggcctctcttatatcagactgcagctcctggtgatatgatgaaagcgggcaaaggtggagcatgatttcatggcactgatatgccttgaaaaagtaggttgtttgttttataatcagataaaaatttttacaaggagaagtgagccagccactgagatcacattgcaaattctctttcatatttctaaaattataaattctaaagtttttgagataggcaaccacttgattggtgtgtgctactctgaaaacaaaataggctgaagtatagcgacttaggtagttgcattccatgagatcacatttcacttctgaaccttattccttggggctagctcactttcagaggtgtatttttttttcctgttatttcccagagtagtttcactgaagcccagagaaatatctacctggtaagatgtaaatttgggccataaaaggggctattaaaagaattttctcagaaatagaatagatgagagaatttgcaaaggaaaaaaacacacatgggctacaatataaattctactcttgggttacaagaattcctgtggctgcactgagatacgtacaaatgtatgtgaaggcacaatttgaatcaagctatcatagaattaaccaagctattaaaattaatcaagctattaataaaatctctgtgaggatttcctgaaagagggacaaaagaagaaattccttgtcctttctctcctggatgtatcagtatgccaaacgttttccagaacatattcgctagcactcaagtctgttctttctgaaaggctgaggctcatgccatcttggcatgctttaggattatggcaaggaggtaaaagtccattttttcattcaactaacactggttgagaatagacccaatgctaagtgacaggaatgaatagaagcatggcacttgcccttgggggctacagtccatggatgagcagcactggagcctggtaaatgcagataaaacaacaaacttgacaagtctccaggctgatgcactgggttttaacatacatataaagatgaattgaaactagtttttaaaaaatatgctttaaataaattacatatcgtaatcatagccaatgtataccattaaactaaaataactgcaattttctagatattttttattcttctgtagtcattgtttagaactctggtttcctgaggaccattgggcctctagaatcagggtggaacaggcatgtttctcctccccaaattacccaaaaataagggcaactcgggaaaaaacacggaataattacaacaggcctttggaatgcgagagcgcc

SEQ ID NO: 376748 - DNA, 429 bp, Homo sapiens
gcttctgccttcacaggttttgctgctctgagaacccccagctaatgtgtgactggcacatccagcttagtgtcatacttccagacacccagagcccacgagcctggccctgaaaagaggggcaggaccccaggagagggtcctgatcctctgccttcacactctgagaagccagctttgttttaaaggtagtcatggggggagaatttcccgaagcccctaacgatgctctccagggagctcagagaggtttctgagaaatgcgtgggcaggggctgtgtatactactccagcctctacacagccacccccaatgcagagacaccacaggcagacatgcagtcacacacatctgcacactcactaacactgccatctctctgcctccctcgattctgcccttcctccctctttccctttccctctttc

SEQ ID NO: 376749 - DNA, 379 bp, Homo sapiens
  misc_feature (147)..(147): n is a, c, g, or t
  misc_feature (329)..(329): n is a, c, g, or t
  misc_feature (338)..(338): n is a, c, g, or t
gagctgaaaaattcctgtcacctagtgactttctagccaatataacactgtagcacaataccattactcatgtgtttgcagtgatgctgccgtaaacaaacctactctgctgctcagtgcatccttggcggtccagcaggccagggntgggtgaccgatggcttcagttccctgaaagactactaggagcaccgttaaggacaagttctctgagttctgggatttggaccctgaggtcagaccaacttcagccgtggtgcctgagacctcaataccccaagtccacctgcctatccatcctgccagctccttgggtcctgcaatcttcnagggctgcncctgtaaggttgcttaaaagggacaagtaattctcaagtgg

SEQ ID NO: 376750 - DNA, 424 bp, Homo sapiens
cagagactgatattagagcgcatcttacagctacaagccaaggaacgccaagaattgccagccagtaccagaagctgggacagacgcccaggacagagtctccctcagatcctgcagaaggaagccacgctgcagcaccttactgaaacacagcatttctttctattccaaatggagagaatacaccagagtggtatgagcagttacctgtgactttgtcactaaccaaaattacagatatctctgggtgcggtggctcatgtctgtaatcccagcactttgggaggccgaggcgggtggatcacctgaagtcagcagttcgagaccagcttggccaacatggtgaaaccccgtctctactaaaaatacaaaaattagccaaatgtggtggcgggcgcctgtaatcccagctactcaagagtcc

SEQ ID NO: 376751 - DNA, 350 bp, Homo sapiens
aaagaataaagcttctatagttcattcttttgatttatttttactgaaaatgagaatttagcactttttgtaccctcttgtcatcctccatataaaacttgtgatatataaacacaaatgtataaggtagtgtcatatataaataatatataataaattttatatagtaactcagttttaaaaaaatcagtatattcattctttgtaagaatcaggtaactgattatattgccttttttatattacctattgagtgtttttttctttggtaatttatttttaactagctacttttctgtatttataatccaccagttgatttttcttttcttagatatcttcttgaagcc

SEQ ID NO: 376752 - DNA, 365 bp, Homo sapiens
tttttttttgtagagacgtggttttgccatgttgcccaggctggtctcaaactcctgagctcaagtgatctacctgtctcaacctcccaaagtgctgagattacaagcatgagctaacgcgccaggcctcttttcttcctaacagccaaatgaatactactgaggtaggaaacctgtaggacttatttgccggtcccaacagaatgaaatgaaaaaaccagcaggaaccagcagatggcatcaaaagtgacctctagttgcccttgctgttcattggcataagacactcctaccagtgccatgacagtttacaaagaccatggcaacacccggaagttactgccccctttctagagatttctgaa

SEQ ID NO: 376753 - DNA, 275 bp, Homo sapiens
ctgcaaacattgataaattatttatccctactaagcctctggttctttataaaataaaaattataataatgatattaaacttctcacctaagaagttcattataagaaggaattagaagtatctataattatatttaggcatatctttggatataggtgtatttattttgtaaatgtcaagtttctcttctgccaaatggaatggctttcctgttaaggaactacattttcatctattttagtatttaagtagacctctattaggaaatattatt

SEQ ID NO: 376754 - DNA, 604 bp, Homo sapiens
catacctcttctcatctcttctgttccctgtggcttcaaaacatgtctcggagggtggcttggagaaaaaacaactctccagtacaaaacccttgggctggttaggattcagagaggaacacatggggaataagcccattcttcatgctctggggccttcccaggttttaggagtggtgtctttctttctcctgctcataagggtattgggcggtttccaagcctggtttgtatttcatcttcaattctaggattgtcgtccagatgtcaaaggtggcgtcctggtgtctcctgggcagaaagtccgaatgccaaagtggccttcttatcactctggggtctctcaatgacagctgtgtctggcctaccagatttgagcaaaccttgtcatctgtttcattatctgctgtattaaaattttttaatggcatttagatgttaaattctgaaacgctttcctctcatctttgaatgtataaaaaagctggagtacttcaagtacagacgaatcatctgaatgttcagcaccactggacttctgccagtggccgaggaagggaccatagcctcgtgtttccccctctacctctggatgattacagac

SEQ ID NO: 376755 - DNA, 360 bp, Homo sapiens
ggcatccctctgttgccttgactacggcgggcgctgtgggagtggagaagctgcaagtgctgaggcgcggtggaggaaagcatgggagccaagagtatgaggagctggtgtctgtgtcagatttgtagctgcggaccaggactgacaagggagccactgcctctgccataatcagaaaattgcaacagagctgtagactccagaatcactcgtctcttccaaggtcaagaagctgccaagttaggaaaccagcttgcaaatcaagatgccgcctaacaacttctagctccaatctcttgttgcctctattatgttccatgcaagcaaaataaatgttgtgccttgactctcaaaaaaaaa

SEQ ID NO: 376756 - DNA, 440 bp, Homo sapiens
ggcatccctctgttgccttgactacggcgggcgctgtgggagtggagaagctgcaagtgctgaggcgcggtggaggaaagcatgggagccaagagtatgaggagctggtgtctgtgtcagatttgtagctgcggctttctgtcctcccagccagaccatattcccattcccgtccaggcagcagttctttgggatccgcctgactgaaaagtcaaccaggactgacaagggagccactgcctctgccataatcagaaaattgcaacagagctgtagactccagaatcactcgtctcttccaaggtcaagaagctgccaagttaggaaaccagcttgcaaatcaagatgccgcctaacaacttctagctccaatctcttgttgcctctattatgttccatgcaagcaaaataaatgttgtgccttgactctcaaaaaaaaa

SEQ ID NO: 376757 - DNA, 490 bp, Homo sapiens
ggcatccctctgttgccttgactacggcgggcgctgtgggagtggagaagctgcaagtgctgaggcgcggtggaggaaagcatgggagccaagagtatgaggagctggtgtctgtgtcagatttgtagctgcggcccctgagactcccaatcaaggatgcaaagtaaaatgccacccgggccagctttctgtcctcccagccagaccatattcccattcccgtccaggcagcagttctttgggatccgcctgactgaaaagtcaaccaggactgacaagggagccactgcctctgccataatcagaaaattgcaacagagctgtagactccagaatcactcgtctcttccaaggtcaagaagctgccaagttaggaaaccagcttgcaaatcaagatgccgcctaacaacttctagctccaatctcttgttgcctctattatgttccatgcaagcaaaataaatgttgtgccttgactctcaaaaaaaaa

SEQ ID NO: 376758 - DNA, 356 bp, Homo sapiens
ttgtggataacgtaatctcctctggttagtctaggcaaaaaggaatttattaaggagtatatatatagttcacttggaagaacttaagaaatcattttcaaaataagcttccacaaaaattttaccacagaccaggactgacaagggagccactgcctctgccataatcagaaaattgcaacagagctgtagactccagaatcactcgtctcttccaaggtcaagaagctgccaagttaggaaaccagcttgcaaatcaagatgccgcctaacaacttctagctccaatctcttgttgcctctattatgttccatgcaagcaaaataaatgttgtgccttgactctcaaaaaaaaa

SEQ ID NO: 376759 - DNA, 287 bp, Homo sapiens
atggctcgtaattatagttggcagtagggatcgagtgaagatgtttgctgtatacgtattgaggcaatttagagaaagaaattatcccttgtcgatgaagaatcagtaggcccagttggaaattacaataattttttcccataataatgttcttcatatgattatttacatgtgatatagttcatatttcagtgaaagctcatttttctcttcctgacttaggctatcttacaagttgaccttgagtttttgaaaatcactgtgtaactgtggaatatttgctttca

SEQ ID NO: 376760 - DNA, 775 bp, Homo sapiens
ggctcccaatccagagctgttgggtggagaagcagctactctggtcacacgtgggaggcggggggagggggtcttgggcctaaaatagcggtgaagagattgtgatagctcgtgtcagaggggcatgcagagctactggagggcttctcctttctgcagcttctctgtggttttctctgcagctttccttccctgtgctaagcagatccctctccacaactcttacctcaacccgcagacttgaagaccttgatgtcatctcatccatttaccctggtagtgaaaaatcacagattttgagtttgggagaaacccttttccaataaccgaaatgtgtaattggattggtcctttttgcatttcctttcctcttagatggttttatggtcttggtctatctcacttaatggtgaggaagcttcaaggtcagtggtttttacaaaagtagacatcgtatttatagacctcatgtggatgttactaaattggaggcttctctccaaggtgggaatcgttttgggagcggggggcggtggttaactttgtttctggccacagttagtccggcttttatttcataatttgtgtgatttttttttttactctcacatctcatttgattttagcaacaatcctatagctaaggtttatagatgactcattatgacagtcactggccttggccttttatatgggttatctaatataatcttcacccattctcaagaggtggctactgttttttcctgcccctgaaccctttaacaacaacaac

SEQ ID NO: 376761 - DNA, 375 bp, Homo sapiens
gctgaccatcaatgctttccacattgtattcattgccagtcacctccacttggccttcatagatcttgtccatgcctaacctattgagaagcctgcgggccagcagcaggccagtacaatacgctgcagcataatttgtcaggccggccttcacaccatattttgtgcagactatcatagccccctctatacgggcataagcaacctgacaaatgatatctctatcatcctgtatttgggtgtgttgtatttatttttatactgtatcaccaagcatttctgagcatagtaatcagttttaccctttcatcatcttctaaatttcacttggtaactcttaaagtaggccttattcttaacaattttaacaaaccc

SEQ ID NO: 376762 - DNA, 399 bp, Homo sapiens
aagtgctgtgtagtgttcctaagtgcagaaaggttgtggtgtgacttagagagaaaatgcatgcattagataagcttccctcaggcgtgagttacaataagaacatggcactaaatagaatgtgaaaaggacacttgtttacagtgtgagaggagcaaaaaagaaggcagatcatctcctgttggttagacctcagctgggtaatttaaaattttactggctctgcatatgtcatgaatgactgtgaaagcaccctaagtaatgattttgaagtaacaaaaatatggaaaatgttacaattcagagggttataaatttaagataatatgtatataaattgcctagctcagagtagattactaatagtaatttggatttaaaaatatatccttaattata

SEQ ID NO: 376763 - DNA, 333 bp, Homo sapiens
ggtttctagctatttttatcttagttttgcttttattaatatttttatttgacacataatgattgtacatattaatggtgtacagaatgatattttgatacctgtatacaatgtataataaatcagggtaattattatattcatcacctcaaatatttatcatttcttgctgttgggaacatacaaaatttgttctttatagctatttgaaaatatacgataaattattgttaattatagtcaccctatagtgctatagaacacaaaaactgattccttaatctagctgtaattttgtattcattaaccaacttctggcaatgctcttccctc

SEQ ID NO: 376764 - DNA, 976 bp, Homo sapiens
gatgtgaaggaaaaatacagaccaagaatatatcttcagaaaattctaatctgtgctgggtagttaggggaaggctaagaggtttgagataatctctgagcaggtacaggagacaaagaaatggatagggatggattggtatggaaaggtattgcaggccaacagcattatgtaaatcttggtcaagagccagcataatggatttgaggaagtggaaagaagggaggttagtgtggcaggaggactgcctgggagccaggtctcagaagaggctagagagtgaggtaagggttttactcgaacttcatgtcctggctagagactcatgtttaattcaagccaaacagtttccagattccatgccagttttctacttcacctgttttttttgttaactgtggttaaaaaaaaaaatatatatatatatatatgcaaaatacagaatttactgtcttaagcattttaagtgtttgcagacagtccccagcttaacaatggtttaacttacgattcttttgactttccaccagtgcaaaagcaatacatatttagtataaaccggacattgagtatccatacaacccattttgttttttactttcagtatagtattcaaaaattacatgagattgtaattattatctcacttatttcacattatcaacactttattaaaaaataggctttatgttagatgattttgcccaactgtagactaatgtaaatgttctgagcatgttgaaggtagtgtaaaccaaaaataaaattctaagcacctctcccccaaccccccaactatctcaatggactttctcagccagggcgcttttaaaatgtaacctgagagactgattcaggccataaggggaagtgggtgttggacatgcctcattatacctctctggcattaacgtcaacacagaccttaaagtctaataagaaacatgtaccctaaaacttaaagtataataataat

SEQ ID NO: 376765 - DNA, 661 bp, Homo sapiens
tcaacttttccttctgtattagcaccagtagggtagaatagtgcggggaagtgttacaatgaggcttcccacttaggtgaggggagacaggagctcctttagagaagggctataagtttttaaaggatgtggaaatgggatgtgtttcctgttgccttgaaatggaggaaaagcctcaaagctaaaactaggagacaggttggttccttcaaaccaaaggaagccaacttcctgatttcttacacatggacaagagttttcctttatataaactcctatgttccattgaaaccaacccaataatcccatagactgttctttttgatacacatagaaattgacctttctgttcttaaagcttgaagcttacatttgttttatctgagttccttcctcaggaaagcaccttcaggcctcttaaaaaggtatccaagaagtgaaactcaccagatcatgacatcctaacaatgagaagcctggagccctcattcatcatgattgcatccttgcctctccctagttcctgtttcttacacattgttacatttctttctacagaagaatgttatataaacccataggtttagtcagttagagagatggatttgagcctgagctctcatctccttgactgcagcacctgattaaagacttcttcctt

SEQ ID NO: 376766 - DNA, 614 bp, Homo sapiens
aataccttttgctggtcttgttagtactataccaaaaacctcaagaaggcagttttcaggttggtcacatttctgccatttgctttttcaaatcaagttggcaaaaatagcattatcaaaacagtgaccttctgtaacagcctactgggtaagatcatgtatgaactccagagtcagactcttgtgggttagaacccagacttttgctagttcatcagctctctggctttagagagagctcttcactccccagttaggtttctgtatctataaggtggacatgatagtagcagggcctaccctcataggattgttatgaaggttaaattaggtaacacacaaaaagttctctactcagtgctctcacagaataagcattcaataaatgctattgatgctattgttacattgttgttaagccaaaaaaagtatggcacatctcttattatagtagttataaattaaaatgttcttttagccagtattacagctgtcatttcattttcttcccagtttccattgcttcctctgggtctgtttctatccattcacttaaaaaataaataaaatgaaatattgagcatatcttcttcagttctctctcacgccctgcc

SEQ ID NO: 376767 - DNA, 390 bp, Homo sapiens
attcatggcattttatgtcttgagattataaaaattttatttttaaaatatcctaaaggatacaaataaacgtcattgttttagtttttggtaaaactgtagaatacaaacaataatttaatagaaaaatgacttccagagtgtattggcaagaaaaaaatttttttaaataaccatttaaagtctctgccagttgtcctaagggaatatagcaaatgaagaaatgataaggaaagtttactaaatctccataagaacattgagtctgtggcatttaggctacaatccatttctccctaaccaaacccctgccccaactcaatgctatagaagctctactctgaggctccactcagtcttcttggatatggtcaagaagatcgtactcct

SEQ ID NO: 376768 - DNA, 5617 bp, Homo sapiens
agccggaagtcgcgagatctgaatgagtcaaagccggcggcctcggctcctcagctccacctgacagtaggccgctgatcggccgcgggtcttgtcgaccgctaggccaccaggttcatgtggaggctcccaggcgcccgcgccgcgcttcgggtgatccggacggcggtggagaagctgagccgggctgaagcggggagccagacagcggcgggagcgatggagcgcgctgtagtgcgctgcgtaccttcggaacccaagctgagcctgtcattcgctttggctgatggtagccacaagaacatgcagcgcgaccagagcgagccgctgggtcgagtcctcagccgcatcgctaccaatgccctaaagggtcacgctaaggcggccgccgccaagaagagcaggaagagccggccgaatgctagcggcggtgcggcctgttcagggccggggcctgagccggctgtgttctgcgagcccgtggtgaagctgtactaccgggaagaggcagtggctgaggacgtgctcaacgtggatgcctggcaagacggcgcggtgctgcagatcggcgatgttaagtacaaggtggagcgcaacccgcccgccttcaccgaactgcagttgccgcgctacatcatggccgggttccctgtgtgccccaaactcagcctcgaatttggggatcccgccagctcccttttccgctggtataaggaagccaagcccggagcggcggagcccgaggtcggtgtcccctcgtcattgtctccctcctcaccttcttcttcttggactgagactgatgtggaggagcgtgtctacaccccgtccaatgccgacatcgggctaaggctcaagcttcactgcaccccaggcgatgggcagcgctttgggcacagccgggagttggaaagtgtgtgtgtggtagaggctgggcctggcacctgcacttttgaccaccggcatctctacacgaagaaggtgactgaggacgctctcatccgcactgtctcttacaacatcctggcagacacgtacgcgcagactgagttctcgcgaacggttctgtacccatactgtgccccctacgccctggagctcgactaccgccagaaccttatccagaaggaactcaccggctacaacgccgatgtcatctgtttgcaggaggttgaccgcgcagtgttttctgacagcttggtacccgccctagaggccttcgggctcgagggggtgtttcgaatcaagcagcacgaaggcctggccactttctaccgaaagtctaagttcagccttcttagccagcatgacatttcattctacgaagccctcgagtccgacccacttcacaaagaactgctggagaaactagttttgtacccatcagcgcaggagaaggtgctccagagatcttctgttcttcaggtttcagttcttcagtctacaaaggactcttctaaaaggatatgtgttgctaatacccatctttactggcatcctaaaggtgggtatattcgcctcattcaaatggcagtagccttggctcacataagacatgtttcatgtgatctgtatcctggcataccagttatattttgtggggactttaatagtacaccatcaacaggaatgtttcattttgtcatcaatggcagcattcccagaggatcatgaagactgggcttccaatggggaggaggaaagatgcaatatgtctcttacacatttcttcaagctgaaaagtgcttgtggtgaacctgcttacacaaattatgttggtggctttcatggatgtctagattacattttcattgacttaaatgctttagaggttgaacaggtgattccattacctagtcatgaagaagttaccacccaccaggccttacctagtgtttcccatccctctgatcacatagcacttgtatgtgatttaaaatggaaatagatgtgtgtttaatggaattgaagtctgaaaaggaagtagttattttagcagaaaatttaatatgaatcaaagcttatatgtaaacttcaaggaggaatggtaaaatgttcagccctcctagttatgttcctgatgtcttcgttatgaaactgttgatgtttgcatcatacatcttctctttccttgttttcctctacaattggaggagaaacaaatatatttcttactagcaaaatagaaaattgaattatttttctccaacttgagactctcagaaaaggaagattgaattagcgtgttttttgtttgtttgtttttgtttttgtttttgtttttttgagatggagtttcactcttgttgcccaggctggagtgcaatggcacaatctcggctcactgcaacctccgccccctgggtttaagcgattctcctgcctcagcttcccgagtagctgggattacaggcatgcgccaacatgtctggctaatttttgtatttttagtagaaatggggtttcgccacgttggccaggctggtcttgaactcctgacctcaggtgatccacccacctcggcctcccaaagtgttgggattacaggcgtgagccaccgcacccggcccttgtgtacatttttataagagaatttttttagctaggagttcagaatttttaaagtaccatttgaatgatcttaatttttctttcatgacaacacattccaaaatgaatcatgcttatgtactaagagggaaaatgtatttaagttaagggtgagagacttaagttataggtgaccttagagacctaaggtgagagacttgacacatggaaggagtaacattagggtctacctctacctcaatttagttagcgatttactacaatttcagagctttaacaaaagataaaaataaatcgtcaccaattgttattgcttctcatctttcatttttcaatgaacaagtaaggtattttcattcttatttttaggattttagtttttagtgtatggtacaaatgaacacagtttatattctaattcttactgcagctcattttaatttttaggatgcaagcacaatttagtattcaaagtgagtagcaacatattcaacttgatcccattgtcttcagttactcttgcccatgaaaaatgttcataaatgaacagggtatttgaccatatgatattagaaaatacagcacattactttatgagaaactacctactgatatgggcttgaaattttggatgaatcattgagcatttctacactagaagtaatttcaaaattgttggtttttataaacaggaaaaaggttgagtagtgggacttttaagcatctctgaaataaaaaacttctttttacagacaagcattatagtttgagttacagacaacagtgtgtatatatgtaatatatatatagtaaaatgaaatttaaatatgaagccaaactttttaaaattagaaactacaaatggttatactgattagtgtctagcctagagtggtaaccatgctttactaattcagttatgaaatacattatttataatgcattagctgtattagctgttgcttttttgatgttcaggataactatgttatctcatttctgcatttaattaatagctcgagtattaaaagcccactcccttcaagaaaagctttgattttccccagtcatgaaagcccttgtttcaaattctttaatctctgaacctagtatcataagaatttcctcttttgataacatctgtactttcatattctgctcactatcaaatgtattgttaacacttagtaagtttgaaaatgaaggggttttatctgcatttgacattgaaccttgaagtactttaagtactccaaggggaaaattaaagtggaagtttcttcggatcttgtttagaaaaaactataaataaaaaattgatgctaccaaattgtgccttcctaaataacatttttgagagcattttaacagcagtttacaaatatgtaaataatagattaaaaccaaatcttgattctcttgtgaatttttttttcattttaaaaatatgtttttgggctgttttcaaagaaagatgttgatagaacccttagagtgacttgggagaaaacaaagtgtcacatcaaaaagttgagaaacattttgaaagaaaaaattcgaacatgcccatgaaaaaagcatacagcttccacattaacactggctagattaaactctagtcagaaaaactcagcacttaacagacattccatgtcctatatccttaattttgatgttttctgactaaacaatatactcagattgtatacaggcatttcacattattaggacatggaatgttattgtgaagtgccatatactgtgatcaaatctccagtatacggatacgttaaaatgattggagtccaaaggtagggaacactaagaaaatgtataaatagcatacacatttctttgtactcatgagttagaatgcagtgttattcagaaatgtctgtttaaagcacctatgtgattgcatttttctattacatttggattttttagtacatttaattttaagaaaacatgggaaatctagcgactttctatggtaaaccacattttataatgtcacaagttcttgctataggaattaacattctagaattttatattgattataaaagagtatttcagaacatattattctgttaaaatgaactcttgcacagttgccgctacagcaaatgtgtctgccaataatcaaaattcatgagcaaacaatcgtttctggctgtaatgtatgttctttttgaaattctgtatgctaaaatcagttgtttcaaaatttcaagaattccactgagtagtgatttttctgagtactaagctatgatctcatcagaatgtgctggtttcagtctggagatagatttctgaggagcctaatacaagggagagaatgtccaaagaacactactgtggaaagttcttacgatggaaattgacatcttttgtatctcattctccagccgtgaaataaaggcagaggttccctgcaaactagtttggttgggataaatccaatatttatatataatgaaaaataaaagtttgcattattagtttatcacaagacccatgtgacaactcagaaaatattctcagcataatttttttaagagatagggtctcactgttacccaggctggagtgcagtggtgcagtcataacttactacagcctcaaactgcggggctcaaatgatcctcctgcctcagcgtcccaagtagttgagattacaagcccaaccttccataactgaaaactaactttctttttttctttttttattattatactttaagttctagtgtacatgtgcccaacgtgcagatttgttacataggtatacatgtgccatgttggtttgctgcacccgttaactcgtcatttacattaggtatttctcctaatgctatccctcccccagccctgaaaatgaattttttaaacacaaataaaaaatatttcagtgttttgagaattttaataatttgcttaatatagtacaggaaggcaacactatctagagggccaggcatagtggctcttgactgtaatcacaacattttgggaggctgaggcaggaggatcacctgag

SEQ ID NO: 376769 - DNA, 5014 bp, Homo sapiens
agccggaagtcgcgagatctgaatgagtcaaagccggcggcctcggctcctcagctccacctgacagtaggccgctgatcggccgcgggtcttgtcgaccgctaggccaccaggttcatgtggaggctcccaggcgcccgcgccgcgcttcgggtgatccggacggcggtggagaagctgagccgggctgaagcggggagccagacagcggcgggagcgatggagcgcgctgtagtgcgctgcgtaccttcggaacccaagctgagcctgtcattcgctttggctgatggtagccacaagaacatgcagcgcgaccagagcgagccgctgggtcgagtcctcagccgcatcgctaccaatgccctaaagggtcacgctaaggcggccgccgccaagaagagcaggaagagccggccgaatgctagcggcggtgcggcctgttcagggccggggcctgagccggctgtgttctgcgagcccgtggtgaagctgtactaccgggaagaggcagtggctgaggacgtgctcaacgtggatgcctggcaagacggcgcggtgctgcagatcggcgatgttaagtacaaggtggagcgcaacccgcccgccttcaccgaactgcagttgccgcgctacatcatggccgggttccctgtgtgccccaaactcagcctcgaatttggggatcccgccagctcccttttccgctggtataaggaagccaagcccggagcggcggagcccgaggtcggtgtcccctcgtcattgtctccctcctcaccttcttcttcttggactgagactgatgtggaggagcgtgtctacaccccgtccaatgccgacatcgggctaaggctcaagcttcactgcaccccaggcgatgggcagcgctttgggcacagccgggagttggaaagtgtgtgtgtggtagaggctgggcctggcacctgcacttttgaccaccggcatctctacacgaagaaggtgactgaggacgctctcatccgcactgtctcttacaacatcctggcagacacgtacgcgcagactgagttctcgcgaacggttctgtacccatactgtgccccctacgccctggagctcgactaccgccagaaccttatccagaaggaactcaccggctacaacgccgatgtcatctgtttgcaggaggttgaccgcgcagtgttttctgacagcttggtacccgccctagaggccttcgggctcgagggggtgtttcgaatcaagcagcacgaaggcctggccactttctaccgaaagtctaagttcagccttcttagccagcatgacatttcattctacgaagccctcgagtccgacccacttcacaaagaactgctggagaaactagttttgtacccatcagcgcaggagaaggtgctccagagatcttctgttcttcaggtttcagttcttcagtctacaaaggactcttctaaaaggatatgtgttgctaatacccatctttactggcatcctaaaggtgggtatattcgcctcattcaaatggcagtagccttggctcacataagacatgtttcatgtgatctgtatcctggcataccagttatattttgtggggactttaatagtacaccatcaacaggaatgtttcattttgtcatcaatggcagcattcccagaggatcatgaagactgggcttccaatggggaggaggaaagatgcaatatgtctcttacacatttcttcaagctgaaaagtgcttgtggtgaacctgcttacacaaattatgttggtggctttcatggatgtctagattacattttcattgacttaaatgctttagaggttgaacaggtgattccattacctagtcatgaagaagttaccacccaccaggccttacctagtgtttcccatccctctgatcacatagcacttgtatgtgatttaaaatggaaatagatgtgtgtttaatggaattgaagtctgaaaaggaagtagttattttagcagaaaatttaatatgaatcaaagcttatatgtaaacttcaaggaggaatggtaaaatgttcagccctcctagttatgttcctgatgtcttcgttatgaaactgttgatgtttgcatcatacatcttctctttccttgttttcctctacaattggaggagaaacaaatatatttcttactagcaaaatagaaaattgaattatttttctccaacttgagactctcagaaaaggaagattgaattagcgtgttttttgtttgtttgtttttgtttttgtttttgtttttttgagatggagtttcactcttgttgcccaggctggagtgcaatggcacaatctcggctcactgcaacctccgccccctgggtttaagcgattctcctgcctcagcttcccgagtagctgggattacaggcatgcgccaacatgtctggctaatttttgtatttttagtagaaatggggtttcgccacgttggccaggctggtcttgaactcctgacctcaggtgatccacccacctcggcctcccaaagtgttgggattacaggcgtgagccaccgcacccggcccttgtgtacatttttataagagaatttttttagctaggagttcagaatttttaaagtaccatttgaatgatcttaatttttctttcatgacaacacattccaaaatgaatcatgcttatgtactaagagggaaaatgtatttaagttaagggtgagagacttaagttataggtgaccttagagacctaaggtgagagacttgacacatggaaggagtaacattagggtctacctctacctcaatttagttagcgatttactacaatttcagagctttaacaaaagataaaaataaatcgtcaccaattgttattgcttctcatctttcatttttcaatgaacaagtaaggtattttcattcttatttttaggattttagtttttagtgtatggtacaaatgaacacagtttatattctaattcttactgcagctcattttaatttttaggatgcaagcacaatttagtattcaaagtgagtagcaacatattcaacttgatcccattgtcttcagttactcttgcccatgaaaaatgttcataaatgaacagggtatttgaccatatgatattagaaaatacagcacattactttatgagaaactacctactgatatgggcttgaaattttggatgaatcattgagcatttctacactagaagtaatttcaaaattgttggtttttataaacaggaaaaaggttgagtagtgggacttttaagcatctctgaaataaaaaacttctttttacagacaagcattatagtttgagttacagacaacagtgtgtatatatgtaatatatatatagtaaaatgaaatttaaatatgaagccaaactttttaaaattagaaactacaaatggttatactgattagtgtctagcctagagtggtaaccatgctttactaattcagttatgaaatacattatttataatgcattagctgtattagctgttgcttttttgatgttcaggataactatgttatctcatttctgcatttaattaatagctcgagtattaaaagcccactcccttcaagaaaagctttgattttccccagtcatgaaagcccttgtttcaaattctttaatctctgaacctagtatcataagaatttcctcttttgataacatctgtactttcatattctgctcactatcaaatgtattgttaacacttagtaagtttgaaaatgaaggggttttatctgcatttgacattgaaccttgaagtactttaagtactccaaggggaaaattaaagtggaagtttcttcggatcttgtttagaaaaaactataaataaaaaattgatgctaccaaattgtgccttcctaaataacatttttgagagcattttaacagcagtttacaaatatgtaaataatagattaaaaccaaatcttgattctcttgtgaatttttttttcattttaaaaatatgtttttgggctgttttcaaagaaagatgttgatagaacccttagagtgacttgggagaaaacaaagtgtcacatcaaaaagttgagaaacattttgaaagaaaaaattcgaacatgcccatgaaaaaagcatacagcttccacattaacactggctagattaaactctagtcagaaaaactcagcacttaacagacattccatgtcctatatccttaattttgatgttttctgactaaacaatatactcagattgtatacaggcatttcacattattaggacatggaatgttattgtgaagtgccatatactgtgatcaaatctccagtatacggatacgttaaaatgattggagtccaaaggtagggaacactaagaaaatgtataaatagcatacacatttctttgtactcatgagttagaatgcagtgttattcagaaatgtctgtttaaagcacctatgtgattgcatttttctattacatttggattttttagtacatttaattttaagaaaacatgggaaatctagcgactttctatggtaaaccacattttataatgtcacaagttcttgctataggaattaacattctagaattttatattgattataaaagagtatttcagaacatattattctgttaaaatgaactcttgcacagttgccgctacagcaaatgtgtctgccaataatcaaaattcatgagcaaacaatcgtttctggctgtaatgtatgttctttttgaaattctgtatgctaaaatcagttgtttcaaaatttcaagaattccactgagtagtgatttttctgagtactaagctatgatctcatcagaatgtgctggtttcagtctggagatagatttctgaggagcctaatacaagggagagaatgtccaaagaacactactgtggaaagttcttacgatggaaattgacatcttttgtatctcattctccagccgtgaaataaaggcagaggttccctgca
